United States Patent Application Publication US 2007/0214517 A1 - sequence listing, part 6

SEQ ID NO: 7196 - protein, 544 aa, Zea mays subsp. mays
  peptide (1)..(544): Ceres Seq. ID no. 12404961
  misc_feature (266)..(414): Pfam Name: Putative snoRNA binding domain Pfam Description: Putative snoRNA binding domain
  misc_feature (1)..(537): Homolog of NCBI NO: 34899158 NR Description: putative nucleolar protein [Oryza sativa
  misc_feature (1)..(519): Homolog of NCBI NO: 15223458 NR Description: SAR DNA binding protein, putative; protein id: supported by cDNA: 31447., supported by cDNA: gi_11878188,
  misc_feature (1)..(466): Homolog of NCBI NO: 15230621 NR Description: nucleolar protein, putative; protein id:
  misc_feature (486)..(544): Homolog of NCBI NO: 15230621 NR Description: nucleolar protein, putative; protein id:
  misc_feature (466)..(522): Homolog of NCBI NO: 15230621 NR Description: nucleolar protein, putative; protein id:
  misc_feature (1)..(497): Homolog of NCBI NO: 11994428 NR Description: nucleolar protein [Arabidopsis thaliana]
  misc_feature (72)..(517): Homolog of NCBI NO: 3860319 NR Description: nucleolar protein [Cicer arietinum]
  misc_feature (3)..(543): Homolog of NCBI NO: 14799394 NR Description: XNop56 protein [Xenopus laevis]
  misc_feature (1)..(308): Homolog of NCBI NO: 34395308 NR Description: putative nucleolar protein [Oryza sativa
  misc_feature (3)..(542): Homolog of NCBI NO: 15021886 NR Description: hypothetical protein [Macaca fascicularis]
MALYLLFESASGYGLFHAYGIDEIGQSVEAVRSSVLDLDRFGKAVKLTAFNPFSSAVDALNQCNAYIRRIMTDELRSFLELNLPKPKEGKKAKYSLGVVEPKVGSHISEVTGIPCQSNEFVQELLRGVRLHFDRFINELKDSDLEKAQLGLGHSYSRAKVKFNVNRVDNMVIQAIFLLDTLDKDINSFSMRVREWFSWHFPELVKIVNDNYLYAKLAKFIVNKSDLTEKDIPALADIVGDEDKAKEIVEAAKASMGQDLSPVDLINVQQFAQRVMNLSEYRKNLYEYLVTKMNDIAPNLTSLIGEVVGARLISHAGSLSNLAKCAASTLQILGAEKALFRALKTRGNTPKYGLIFHSSFIGRASTKNKGRMARYLANKCSIASRIDCYSEASTSVFGQKLREQVEERLEFYDKGVAPRKNLDVMKAAIDSMVNGTSMDDDDIEKTDASPKKSKKKKTKTKADGDAMDVDKPSNVAGGEAEPGTEKKKKKKKHKLEEEAQEENGAADTTPKKKKKKSREASEEAEPKTATDGKKKKKKAKAEDDE

SEQ ID NO: 7197 - protein, 474 aa, Zea mays subsp. mays
  peptide (1)..(474): Ceres Seq. ID no. 12404962
  misc_feature (196)..(344): Pfam Name: Putative snoRNA binding domain Pfam Description: Putative snoRNA binding domain
  misc_feature (1)..(467): Homolog of NCBI NO: 34899158 NR Description: putative nucleolar protein [Oryza sativa
  misc_feature (1)..(449): Homolog of NCBI NO: 15223458 NR Description: SAR DNA binding protein, putative; protein id: supported by cDNA: 31447., supported by cDNA: gi_11878188,
  misc_feature (1)..(396): Homolog of NCBI NO: 15230621 NR Description: nucleolar protein, putative; protein id:
  misc_feature (416)..(474): Homolog of NCBI NO: 15230621 NR Description: nucleolar protein, putative; protein id:
  misc_feature (396)..(452): Homolog of NCBI NO: 15230621 NR Description: nucleolar protein, putative; protein id:
  misc_feature (1)..(427): Homolog of NCBI NO: 11994428 NR Description: nucleolar protein [Arabidopsis thaliana]
  misc_feature (2)..(447): Homolog of NCBI NO: 3860319 NR Description: nucleolar protein [Cicer arietinum]
  misc_feature (1)..(473): Homolog of NCBI NO: 14799394 NR Description: XNop56 protein [Xenopus laevis]
  misc_feature (1)..(238): Homolog of NCBI NO: 34395308 NR Description: putative nucleolar protein [Oryza sativa
  misc_feature (1)..(472): Homolog of NCBI NO: 15021886 NR Description: hypothetical protein [Macaca fascicularis]
MTDELRSFLELNLPKPKEGKKAKYSLGVVEPKVGSHISEVTGIPCQSNEFVQELLRGVRLHFDRFINELKDSDLEKAQLGLGHSYSRAKVKFNVNRVDNMVIQAIFLLDTLDKDINSFSMRVREWFSWHFPELVKIVNDNYLYAKLAKFIVNKSDLTEKDIPALADIVGDEDKAKEIVEAAKASMGQDLSPVDLINVQQFAQRVMNLSEYRKNLYEYLVTKMNDIAPNLTSLIGEVVGARLISHAGSLSNLAKCAASTLQILGAEKALFRALKTRGNTPKYGLIFHSSFIGRASTKNKGRMARYLANKCSIASRIDCYSEASTSVFGQKLREQVEERLEFYDKGVAPRKNLDVMKAAIDSMVNGTSMDDDDIEKTDASPKKSKKKKTKTKADGDAMDVDKPSNVAGGEAEPGTEKKKKKKKHKLEEEAQEENGAADTTPKKKKKKSREASEEAEPKTATDGKKKKKKAKAEDDE

SEQ ID NO: 7198 - protein, 375 aa, Zea mays subsp. mays
  peptide (1)..(375): Ceres Seq. ID no. 12404963
  misc_feature (97)..(245): Pfam Name: Putative snoRNA binding domain Pfam Description: Putative snoRNA binding domain
  misc_feature (317)..(375): Homolog of NCBI NO: 15230621 NR Description: nucleolar protein, putative; protein id:
  misc_feature (297)..(353): Homolog of NCBI NO: 15230621 NR Description: nucleolar protein, putative; protein id:
  misc_feature (1)..(328): Homolog of NCBI NO: 11994428 NR Description: nucleolar protein [Arabidopsis thaliana]
  misc_feature (1)..(348): Homolog of NCBI NO: 3860319 NR Description: nucleolar protein [Cicer arietinum]
  misc_feature (1)..(350): Homolog of NCBI NO: 15223458 NR Description: SAR DNA binding protein, putative; protein id: supported by cDNA: 31447., supported by cDNA: gi_11878188,
  misc_feature (1)..(297): Homolog of NCBI NO: 15230621 NR Description: nucleolar protein, putative; protein id:
  misc_feature (1)..(368): Homolog of NCBI NO: 34899158 NR Description: putative nucleolar protein [Oryza sativa
  misc_feature (1)..(374): Homolog of NCBI NO: 14799394 NR Description: XNop56 protein [Xenopus laevis]
  misc_feature (1)..(139): Homolog of NCBI NO: 34395308 NR Description: putative nucleolar protein [Oryza sativa
  misc_feature (1)..(373): Homolog of NCBI NO: 15021886 NR Description: hypothetical protein [Macaca fascicularis]
MVIQAIFLLDTLDKDINSFSMRVREWFSWHFPELVKIVNDNYLYAKLAKFIVNKSDLTEKDIPALADIVGDEDKAKEIVEAAKASMGQDLSPVDLINVQQFAQRVMNLSEYRKNLYEYLVTKMNDIAPNLTSLIGEVVGARLISHAGSLSNLAKCAASTLQILGAEKALFRALKTRGNTPKYGLIFHSSFIGRASTKNKGRMARYLANKCSIASRIDCYSEASTSVFGQKLREQVEERLEFYDKGVAPRKNLDVMKAAIDSMVNGTSMDDDDIEKTDASPKKSKKKKTKTKADGDAMDVDKPSNVAGGEAEPGTEKKKKKKKHKLEEEAQEENGAADTTPKKKKKKSREASEEAEPKTATDGKKKKKKAKAEDDE

SEQ ID NO: 7199 - DNA, 1275 bp, Zea mays subsp. mays
  misc_feature (1)..(1275): Ceres Seq. ID no. 12366288
  misc_feature: MA Experiment ID: 20000534 Result: Down-regulated in Transcription
  misc_feature: MA Experiment 20000534 PARAMETER Experiment Name: Zm_Hybrid_Pollen_P Parameter: Age (day) Value: 8
  misc_feature: MA Experiment 20000534 PARAMETER Experiment Name: Zm_Hybrid_Pollen_P Parameter: Organism Value: Zea mays
  misc_feature: MA Experiment 20000534 PARAMETER Experiment Name: Zm_Hybrid_Pollen_P Parameter: Plant Line Value: 35A19
  misc_feature: MA Experiment 20000534 PARAMETER Experiment Name: Zm_Hybrid_Pollen_P Parameter: Tissue Value: Pollen vs. Aerial
aaactatccgctgctgtagtagagatgctctcgatgcggccacccagcaccaccttgtcgcgccccttgatttggccgagacggggtcgcctcgggggagccgccgcgccgcaatatgttagcgccgcggcaccggcgcccgctctggagccagctgcgcctccggagagcgtctcctttccgattctggtgaatggctgcactggtaacatggggttatctgtcgctgaggctgctgctctgaggggccttcacctagtccctgtttcattcagtagtagagagaaggttgaaaaaacaatacaagttggacaaacagacattcaaatatatggtccttctaaaagagaagatgttgtttcatctattgctgatgaattcccagatgtcattgttgtggactacacaggacccaattctgtgaactctaatgctgagctctattgcaagcttggcttgccatttgtgatgggcacaactggtgggaacaagcatttgctctacaagtcagtgcaagattcaaaaaattatgcactaatatctccacagatgggcaaacaagtggttgcatttgttgctgctatgaaaatcatggctgagcagtttccaggggccttttcaggttatcatttagaggttttagaatcccatcaagctggcaagctggatacatctggtacagctaaagacgtgattgcttgttttgagaaactaggtgtgtcatatgatatgaaccggatggttaagattagagatccagaacagcagcttgagatggtgggtgtccctgaagaacacatccaagggcatgcattccatctgtatcatctcacttctcctgatgacagtgtttcatttgagttccagcacaatgtttgtggccgttcaatctatgccgaaggaactattgacgcggcaatgtttctgcataggaaggtgcaatcaaaggattctaagagaatatataatatggatgatgtcctgcgagaagaaacttgccataaagcctactgattagctgctgataaataatactccctccgttcttttttatttttcgctgtttagttcaaaaataaactagcgagcgacaaatattcaaggatggaggcaatattaagcacagcgctgttgtttttaccgttttttgttagaataatgcactgcgcaccttcacccattttagacttttgtgtaattgggttgaatatgagaggttcaataggaaaaaaatgacatgcttctagtgatggcaatcataatttaatattctcg

SEQ ID NO: 7200 - protein, 337 aa, Zea mays subsp. mays
  peptide (1)..(337): Ceres Seq. ID no. 12366289
  misc_feature (187)..(329): Pfam Name: Dihydrodipicolinate reductase, C-terminus Pfam Description: Dihydrodipicolinate reductase, C-terminus
  misc_feature (53)..(330): Homolog of NCBI NO: 18411368 NR Description: putative protein; protein id: At3g59890.1, by cDNA: 36111. [Arabidopsis thaliana]
  misc_feature (31)..(330): Homolog of NCBI NO: 18406430 NR Description: expressed protein; protein id: At2g44040.1, by cDNA: 10293. [Arabidopsis thaliana] expressed protein [Arabidopsis thaliana]
  misc_feature (53)..(312): Homolog of NCBI NO: 11357603 NR Description: hypothetical protein F24G16.160 - Arabidopsis >gi|7019683|emb|CAB75808.1| putative protein [Arabidopsis
  misc_feature (31)..(313): Homolog of NCBI NO: 7486478 NR Description: hypothetical protein At2g44040 [imported] -
  misc_feature (96)..(228): Homolog of NCBI NO: 282117 NR Description: dipicolinate reductase homolog - Coxiella
KLSAAVVEMLSMRPPSTTLSRPLIWPRRGRLGGAAAPQYVSAAAPAPALEPAAPPESVSFPILVNGCTGNMGLSVAEAAALRGLHLVPVSFSSREKVEKTIQVGQTDIQIYGPSKREDVVSSIADEFPDVIVVDYTGPNSVNSNAELYCKLGLPFVMGTTGGNKHLLYKSVQDSKNYALISPQMGKQVVAFVAAMKIMAEQFPGAFSGYHLEVLESHQAGKLDTSGTAKDVIACFEKLGVSYDMNRMVKIRDPEQQLEMVGVPEEHIQGHAFHLYHLTSPDDSVSFEFQHNVCGRSIYAEGTIDAAMFLHRKVQSKDSKRIYNMDDVLREETCHKAY

SEQ ID NO: 7201 - protein, 329 aa, Zea mays subsp. mays
  peptide (1)..(329): Ceres Seq. ID no. 12366290
  misc_feature (179)..(321): Pfam Name: Dihydrodipicolinate reductase, C-terminus Pfam Description: Dihydrodipicolinate reductase, C-terminus
  misc_feature (45)..(322): Homolog of NCBI NO: 18411368 NR Description: putative protein; protein id: At3g59890.1, by cDNA: 36111. [Arabidopsis thaliana]
  misc_feature (23)..(322): Homolog of NCBI NO: 18406430 NR Description: expressed protein; protein id: At2g44040.1, by cDNA: 10293. [Arabidopsis thaliana] expressed protein [Arabidopsis thaliana]
  misc_feature (45)..(304): Homolog of NCBI NO: 11357603 NR Description: hypothetical protein F24G16.160 - Arabidopsis >gi|7019683|emb|CAB75808.1| putative protein [Arabidopsis
  misc_feature (23)..(305): Homolog of NCBI NO: 7486478 NR Description: hypothetical protein At2g44040 [imported] -
  misc_feature (88)..(220): Homolog of NCBI NO: 282117 NR Description: dipicolinate reductase homolog - Coxiella
MLSMRPPSTTLSRPLIWPRRGRLGGAAAPQYVSAAAPAPALEPAAPPESVSFPILVNGCTGNMGLSVAEAAALRGLHLVPVSFSSREKVEKTIQVGQTDIQIYGPSKREDVVSSIADEFPDVIVVDYTGPNSVNSNAELYCKLGLPFVMGTTGGNKHLLYKSVQDSKNYALISPQMGKQVVAFVAAMKIMAEQFPGAFSGYHLEVLESHQAGKLDTSGTAKDVIACFEKLGVSYDMNRMVKIRDPEQQLEMVGVPEEHIQGHAFHLYHLTSPDDSVSFEFQHNVCGRSIYAEGTIDAAMFLHRKVQSKDSKRIYNMDDVLREETCHKAY

SEQ ID NO: 7202 - protein, 326 aa, Zea mays subsp. mays
  peptide (1)..(326): Ceres Seq. ID no. 12366291
  misc_feature (176)..(318): Pfam Name: Dihydrodipicolinate reductase, C-terminus Pfam Description: Dihydrodipicolinate reductase, C-terminus
  misc_feature (42)..(319): Homolog of NCBI NO: 18411368 NR Description: putative protein; protein id: At3g59890.1, by cDNA: 36111. [Arabidopsis thaliana]
  misc_feature (20)..(319): Homolog of NCBI NO: 18406430 NR Description: expressed protein; protein id: At2g44040.1, by cDNA: 10293. [Arabidopsis thaliana] expressed protein [Arabidopsis thaliana]
  misc_feature (42)..(301): Homolog of NCBI NO: 11357603 NR Description: hypothetical protein F24G16.160 - Arabidopsis >gi|7019683|emb|CAB75808.1| putative protein [Arabidopsis
  misc_feature (20)..(302): Homolog of NCBI NO: 7486478 NR Description: hypothetical protein At2g44040 [imported] -
  misc_feature (85)..(217): Homolog of NCBI NO: 282117 NR Description: dipicolinate reductase homolog - Coxiella
MRPPSTTLSRPLIWPRRGRLGGAAAPQYVSAAAPAPALEPAAPPESVSFPILVNGCTGNMGLSVAEAAALRGLHLVPVSFSSREKVEKTIQVGQTDIQIYGPSKREDVVSSIADEFPDVIVVDYTGPNSVNSNAELYCKLGLPFVMGTTGGNKHLLYKSVQDSKNYALISPQMGKQVVAFVAAMKIMAEQFPGAFSGYHLEVLESHQAGKLDTSGTAKDVIACFEKLGVSYDMNRMVKIRDPEQQLEMVGVPEEHIQGHAFHLYHLTSPDDSVSFEFQHNVCGRSIYAEGTIDAAMFLHRKVQSKDSKRIYNMDDVLREETCHKAY

SEQ ID NO: 7203 - DNA, 1706 bp, Zea mays subsp. mays
  misc_feature (1)..(1706): Ceres Seq. ID no. 12386684
  misc_feature: MA Experiment ID: 108522 Result: Down-regulated in Transcription
  misc_feature: MA Experiment 108522 PARAMETER Experiment Name: Zm_42deg_Heat_P Parameter: Age (day) Value: 8
  misc_feature: MA Experiment 108522 PARAMETER Experiment Name: Zm_42deg_Heat_P Parameter: Organism Value: Zea mays
  misc_feature: MA Experiment 108522 PARAMETER Experiment Name: Zm_42deg_Heat_P Parameter: Plant Line Value: 35A19
  misc_feature: MA Experiment 108522 PARAMETER Experiment Name: Zm_42deg_Heat_P Parameter: Temperature (deg C) Value: 42 vs. 22
  misc_feature: MA Experiment 108522 PARAMETER Experiment Name: Zm_42deg_Heat_P Parameter: Timepoint (hr) Value: 1
  misc_feature: MA Experiment 108522 PARAMETER Experiment Name: Zm_42deg_Heat_P Parameter: Tissue Value: Aerial
agtcggtctctctcactctctcttgtctccaagtttgtaaccctagccgccaagcttgaagctccagccgtgctcgtgtagggccgcaggccatccgggctccggcttccagcatctaccaggcgtccttagaatacggtgcagcgagcagcaagtcgccgagcagccgagccaccgccgaacacagggcgccgccgagcagccgagccgccgccgagcgccgagtcttctctgagtgacttcggtacagacgacaaactttctccacacataccgcgccactccgccactcactgtgctgacggatggggtggtgctccccgtccacttcccggcagcttctctccacgacctcactcttcaccttcggcgcgggtctccttaccttcggcatccacctctcctacgtccacatcgagccccagcgcgctcgcacgctcgctcgggaccaattcgtccgtgactacctccgcaagaagcacgacaagtagcccgccttctgcggtccccaggtgattgcttggtagtcggagacgatggccctggtcccatcgaggtccgacagcgaggccttgatcccggaggtggagatgaatgccggcgccgaccagaccgcaacaacggcgcgggtcaccgtcgttcaggcgtcgtccgtgttctacgacacccctgcgactctcgataaagcggagaaattggtagcagaagcagctgggtatggttcacagttggttttgtttccggaagtctttgttggtggctacccacatggatctacctttggactggttgtcggcaatcgcactgccaagggaaaggaagactttcagaagtatcacgcatctgccatagatgtgcctggtccagaagtgtcccgcttatctgcattagctggaaaatataaggtgtttctggtgataggggtggttgagagggcaggatatacactttacaacacggtgctctccttcgatccactgggaaaatacctagggaagcaccgcaaggtcatgcctactgcactagaacgtgtattctgggggtttggagatggatctacaatacctgtctacgatactccgattggaaaaatgggtgctctcatttgctgggaaaacagaatgccacttctcaggacggccatgtatgccaaaggtattgagatatattgtgctcccacggttgattgcatgccaacttggctgtcttctatgacacatatcgcccttgaagggggatgctttgtgctgtcagcgtgccagttctgtcgtagaaagaactaccctccccctcccgagtacacattttgtggcctagaggaagagccatccccggaatccgttgtttgttctggagggagtgtcatcatctcaccattgggaacagtgttggcgggtcccaactacgaaagtgaggcccttctcactgctgacctggaccttggagagattgttcgagccaagtttgattttgacgtggtgggccactactcgcgacctgaggtgctgagtttagtggtgaagagcgatccaaagcccgccgtctctttcatctcagccgctggtagggatgatgactatgtgcagacctaatgacaaacatatctttggtctttagcttccttatacggcaatcgcatgcatctgtataattgtgggtttccggaacgttgcacgttccgtcagaataataataaactgttatgt

SEQ ID NO: 7204 - protein, 351 aa, Zea mays subsp. mays
  peptide (1)..(351): Ceres Seq. ID no. 12386685
  misc_feature (1)..(351): Homolog of NCBI NO: 37654216 NR Description: nitrilase 1 [Zea mays]
  misc_feature (1)..(342): Homolog of NCBI NO: 25290269 NR Description: nitrilase-like protein [imported] - rice
  misc_feature (1)..(344): Homolog of NCBI NO: 37654214 NR Description: nitrilase 2 [Zea mays]
  misc_feature (1)..(344): Homolog of NCBI NO: 7435980 NR Description: nitrilase (EC 3.5.5.1) 4B - common tobacco
  misc_feature (1)..(344): Homolog of NCBI NO: 3914163 NR Description: NITRILASE 4 >gi|7435979|pir||T03736 nitrilase (EC - common tobacco >gi|1171482|dbj|BAA09645.1| nitrilase [Nicotiana
  misc_feature (1)..(349): Homolog of NCBI NO: 15242205 NR Description: Nitrilase 4 (sp P46011); protein id: At5g22300.1, by cDNA: 6220., supported by cDNA: gi_13937219, supported by gi_508736 [Arabidopsis thaliana] >gi|1171771|sp|P46011|NRL4_ARATH
  misc_feature (1)..(349): Homolog of NCBI NO: 21593970 NR Description: Nitrilase 4 (sp P46011) [Arabidopsis thaliana]
  misc_feature (26)..(347): Homolog of NCBI NO: 25290266 NR Description: nitrilase (EC 3.5.5.1) 2 [imported] - Arabidopsis
  misc_feature (26)..(347): Homolog of NCBI NO: 15229932 NR Description: nitrilase 2; protein id: At3g44300.1, supported cDNA: 40532., supported by cDNA: gi_508732 [Arabidopsis thaliana]
  misc_feature (26)..(347): Homolog of NCBI NO: 25290267 NR Description: nitrilase (EC 3.5.5.1) 2 [imported] - Arabidopsis
MALVPSRSDSEALIPEVEMNAGADQTATTARVTVVQASSVFYDTPATLDKAEKLVAEAAGYGSQLVLFPEVFVGGYPHGSTFGLVVGNRTAKGKEDFQKYHASAIDVPGPEVSRLSALAGKYKVFLVIGVVERAGYTLYNTVLSFDPLGKYLGKHRKVMPTALERVFWGFGDGSTIPVYDTPIGKMGALICWENRMPLLRTAMYAKGIEIYCAPTVDCMPTWLSSMTHIALEGGCFVLSACQFCRRKNYPPPPEYTFCGLEEEPSPESVVCSGGSVIISPLGTVLAGPNYESEALLTADLDLGEIVRAKFDFDVVGHYSRPEVLSLVVKSDPKPAVSFISAAGRDDDYVQT

SEQ ID NO: 7205 - protein, 333 aa, Zea mays subsp. mays
  peptide (1)..(333): Ceres Seq. ID no. 12386686
  misc_feature (1)..(333): Homolog of NCBI NO: 37654216 NR Description: nitrilase 1 [Zea mays]
  misc_feature (1)..(324): Homolog of NCBI NO: 25290269 NR Description: nitrilase-like protein [imported] - rice
  misc_feature (1)..(326): Homolog of NCBI NO: 37654214 NR Description: nitrilase 2 [Zea mays]
  misc_feature (1)..(326): Homolog of NCBI NO: 7435980 NR Description: nitrilase (EC 3.5.5.1) 4B - common tobacco
  misc_feature (1)..(326): Homolog of NCBI NO: 3914163 NR Description: NITRILASE 4 >gi|7435979|pir||T03736 nitrilase (EC - common tobacco >gi|1171482|dbj|BAA09645.1| nitrilase [Nicotiana
  misc_feature (1)..(331): Homolog of NCBI NO: 15242205 NR Description: Nitrilase 4 (sp P46011); protein id: At5g22300.1, by cDNA: 6220., supported by cDNA: gi_13937219, supported by gi_508736 [Arabidopsis thaliana] >gi|1171771|sp|P46011|NRL4_ARATH
  misc_feature (1)..(331): Homolog of NCBI NO: 21593970 NR Description: Nitrilase 4 (sp P46011) [Arabidopsis thaliana]
  misc_feature (8)..(329): Homolog of NCBI NO: 25290266 NR Description: nitrilase (EC 3.5.5.1) 2 [imported] - Arabidopsis
  misc_feature (8)..(329): Homolog of NCBI NO: 15229932 NR Description: nitrilase 2; protein id: At3g44300.1, supported cDNA: 40532., supported by cDNA: gi_508732 [Arabidopsis thaliana]
  misc_feature (8)..(329): Homolog of NCBI NO: 25290267 NR Description: nitrilase (EC 3.5.5.1) 2 [imported] - Arabidopsis
MNAGADQTATTARVTVVQASSVFYDTPATLDKAEKLVAEAAGYGSQLVLFPEVFVGGYPHGSTFGLVVGNRTAKGKEDFQKYHASAIDVPGPEVSRLSALAGKYKVFLVIGVVERAGYTLYNTVLSFDPLGKYLGKHRKVMPTALERVFWGFGDGSTIPVYDTPIGKMGALICWENRMPLLRTAMYAKGIEIYCAPTVDCMPTWLSSMTHIALEGGCFVLSACQFCRRKNYPPPPEYTFCGLEEEPSPESVVCSGGSVIISPLGTVLAGPNYESEALLTADLDLGEIVRAKFDFDVVGHYSRPEVLSLVVKSDPKPAVSFISAAGRDDDYVQT

SEQ ID NO: 7206 - protein, 193 aa, Zea mays subsp. mays
  peptide (1)..(193): Ceres Seq. ID no. 12386687
  misc_feature (1)..(193): Homolog of NCBI NO: 37654216 NR Description: nitrilase 1 [Zea mays]
  misc_feature (1)..(184): Homolog of NCBI NO: 25290269 NR Description: nitrilase-like protein [imported] - rice
  misc_feature (1)..(186): Homolog of NCBI NO: 37654214 NR Description: nitrilase 2 [Zea mays]
  misc_feature (1)..(186): Homolog of NCBI NO: 7435980 NR Description: nitrilase (EC 3.5.5.1) 4B - common tobacco
  misc_feature (1)..(186): Homolog of NCBI NO: 3914163 NR Description: NITRILASE 4 >gi|7435979|pir||T03736 nitrilase (EC - common tobacco >gi|1171482|dbj|BAA09645.1| nitrilase [Nicotiana
  misc_feature (1)..(191): Homolog of NCBI NO: 15242205 NR Description: Nitrilase 4 (sp P46011); protein id: At5g22300.1, by cDNA: 6220., supported by cDNA: gi_13937219, supported by gi_508736 [Arabidopsis thaliana] >gi|1171771|sp|P46011|NRL4_ARATH
  misc_feature (1)..(191): Homolog of NCBI NO: 21593970 NR Description: Nitrilase 4 (sp P46011) [Arabidopsis thaliana]
  misc_feature (1)..(189): Homolog of NCBI NO: 25290266 NR Description: nitrilase (EC 3.5.5.1) 2 [imported] - Arabidopsis
  misc_feature (1)..(189): Homolog of NCBI NO: 15229932 NR Description: nitrilase 2; protein id: At3g44300.1, supported cDNA: 40532., supported by cDNA: gi_508732 [Arabidopsis thaliana]
  misc_feature (1)..(189): Homolog of NCBI NO: 25290267 NR Description: nitrilase (EC 3.5.5.1) 2 [imported] - Arabidopsis
MPTALERVFWGFGDGSTIPVYDTPIGKMGALICWENRMPLLRTAMYAKGIEIYCAPTVDCMPTWLSSMTHIALEGGCFVLSACQFCRRKNYPPPPEYTFCGLEEEPSPESVVCSGGSVIISPLGTVLAGPNYESEALLTADLDLGEIVRAKFDFDVVGHYSRPEVLSLVVKSDPKPAVSFISAAGRDDDYVQT

SEQ ID NO: 7207 - DNA, 1437 bp, Zea mays subsp. mays
  misc_feature (1)..(1437): Ceres Seq. ID no. 12387026
  misc_feature: MA Experiment ID: 108527 Result: Down-regulated in Transcription
  misc_feature: MA Experiment 108527 PARAMETER Experiment Name: Zm_5mM_NO_P Parameter: Age (day) Value: 8
  misc_feature: MA Experiment 108527 PARAMETER Experiment Name: Zm_5mM_NO_P Parameter: Organism Value: Zea mays
  misc_feature: MA Experiment 108527 PARAMETER Experiment Name: Zm_5mM_NO_P Parameter: Plant Line Value: 35A19
  misc_feature: MA Experiment 108527 PARAMETER Experiment Name: Zm_5mM_NO_P Parameter: Timepoint (hr) Value: 6
  misc_feature: MA Experiment 108527 PARAMETER Experiment Name: Zm_5mM_NO_P Parameter: Tissue Value: Aerial
  misc_feature: MA Experiment 108527 PARAMETER Experiment Name: Zm_5mM_NO_P Parameter: Treatment Value: 5mM NO vs. No Treatment
  misc_feature: MA Experiment ID: 20000478 Result: Down-regulated in Transcription
  misc_feature: MA Experiment 20000478 PARAMETER Experiment Name: Zm_5mM_SA_P Parameter: Age (day) Value: 11
  misc_feature: MA Experiment 20000478 PARAMETER Experiment Name: Zm_5mM_SA_P Parameter: Organism Value: Zea mays
  misc_feature: MA Experiment 20000478 PARAMETER Experiment Name: Zm_5mM_SA_P Parameter: Plant Line Value: 35A19
  misc_feature: MA Experiment 20000478 PARAMETER Experiment Name: Zm_5mM_SA_P Parameter: Timepoint (hr) Value: 72
  misc_feature: MA Experiment 20000478 PARAMETER Experiment Name: Zm_5mM_SA_P Parameter: Tissue Value: Aerial
  misc_feature: MA Experiment 20000478 PARAMETER Experiment Name: Zm_5mM_SA_P Parameter: Treatment Value: 5mM SA vs. No Treatment
  misc_feature: MA Experiment ID: 20000535 Result: Down-regulated in Transcription
  misc_feature: MA Experiment 20000535 PARAMETER Experiment Name: Zm_Hybrid_Seed_Dev_P Parameter: DAP Value: 30 vs. 12
  misc_feature: MA Experiment 20000535 PARAMETER Experiment Name: Zm_Hybrid_Seed_Dev_P Parameter: Organism Value: Zea mays
  misc_feature: MA Experiment 20000535 PARAMETER Experiment Name: Zm_Hybrid_Seed_Dev_P Parameter: Plant Line Value: 35A19
  misc_feature: MA Experiment 20000535 PARAMETER Experiment Name: Zm_Hybrid_Seed_Dev_P Parameter: Tissue Value: Embryo vs. Unfert Floret
aatcgaagcaaatacaagcagagagttttttttggagaggcgtgtaagcataggcagaagatacacagtagcctcttgttgaacacggggatggcaaggcagagtgcagcctccatgttggctactacgacgccgttgcttctcagcgtcttggccaacatcgccgtggtggagtccatcggggtgtcctacggcatgagcggcgacaacctgccgccggcgagcaccgtcatcggcatgtacaaggacaacggcatcccgctgatgcggatctacgcgccggaccaggcggctctccaggccgtgggcggcacgggcatccgcgtcgtggccggcgcgcccaatgacgtgctgtccagcctcgccgccagccccgccgcggccgcgtcgtgggtccgcaacaacatccaggcctaccccaaggtcgccttccgctgcgtctgcgtgggcaacgaggtggaaggcggcgcggcgcagagcctggtcccggccatggagaacgtccgcgccgcgctggtcgccgccgggctggacggcatcaaggtcaccacgtccgtgtcgcaggccatcctcggcggctacaagccgccgtccgccgccgagttcacggacgaggcgcaggggttcatgggccccgtcctcaggttcctggcgcgcaccggcgcgcctctcatggccagcgtctacccctacttcacctacgccaccaacccggctgccatggacctcagctacgcgctcttcaccgctccgggcaccgttctccaggacggcgcctacgagtaccagaacctcttcgacgccaccgtcgactccttctacgtggcgatggccaaccacgggggctccggcgtcacccttgtggtgtcggagagcgggtggccgtccgctggcggcgtcgcggcgtcacccgagaatgcggccatctacaaccagaacctgatcaaccacgtcggccggggaacgccgcgccacccgggcgccatcgagaccatcctcttctccatgttcaacgagaacctcaagcagagcggcgtggagcagaactgggggctcttctaccctaacatgcagcgcgtctaccccatcaagttcaactgaagctagctcaatcgaggtgcacgtccacgtaccctacagtctacacacatcaatcaataggtatatatgtatcactgcatgcaacctgtatacttatgcatcccagctgcaggcgatcatgtattgctttgcgaccaccaccgggagtgtctaaggaggctactctcagatgagtatgccatgaggattcttatacgtcgagtcgtcgagagaccaacgcatgggcaacgcgtgtgaagtgtgatcaatatttttctttgatttttttttgtgttttcactgaaattgaacttcgaataaaaaaaggcagctcttcggagggctgagggatttgtc

SEQ ID NO: 7208 - protein, 366 aa, Zea mays subsp. mays
  peptide (1)..(366): Ceres Seq. ID no. 12387027
  misc_feature (60)..(365): Pfam Name: Glycosyl hydrolases family 17 Pfam Description: Glycosyl hydrolases family 17
  misc_feature (31)..(365): Homolog of NCBI NO: 100591 NR Description: licheninase (EC 3.2.1.73) I precursor, splice a - barley >gi|18984|emb|CAA40094.1| unnamed protein product
  misc_feature (31)..(365): Homolog of NCBI NO: 486849 NR Description: licheninase (EC 3.2.1.73) precursor - wheat
  misc_feature (31)..(365): Homolog of NCBI NO: 13249140 NR Description: glucanase [Oryza sativa]
  misc_feature (31)..(365): Homolog of NCBI NO: 288654 NR Description: (1-3, 1-4)-beta-glucanase [Avena sativa]
  misc_feature (31)..(365): Homolog of NCBI NO: 100664 NR Description: beta-glucanase - rice
  misc_feature (31)..(365): Homolog of NCBI NO: 854361 NR Description: beta-glucanase [Oryza sativa (japonica
  misc_feature (57)..(365): Homolog of NCBI NO: 100592 NR Description: licheninase (EC 3.2.1.73) isoenzyme EIb precursor barley >gi|4688931|emb|CAB41402.1| lichenase [Hordeum vulgare
  misc_feature (57)..(365): Homolog of NCBI NO: 840908 NR Description: beta glucanase [Triticum aestivum]
  misc_feature (31)..(365): Homolog of NCBI NO: 228411 NR Description: beta glucanase:ISOTYPE=II
  misc_feature (57)..(365): Homolog of NCBI NO: 121773 NR Description: LICHENASE II PRECURSOR (ENDO-BETA-1,3-1,4
NRSKYKQRVFFGEACKHRQKIHSSLLLNTGMARQSAASMLATTTPLLLSVLANIAVVESIGVSYGMSGDNLPPASTVIGMYKDNGIPLMRIYAPDQAALQAVGGTGIRVVAGAPNDVLSSLAASPAAAASWVRNNIQAYPKVAFRCVCVGNEVEGGAAQSLVPAMENVRAALVAAGLDGIKVTTSVSQAILGGYKPPSAAEFTDEAQGFMGPVLRFLARTGAPLMASVYPYFTYATNPAAMDLSYALFTAPGTVLQDGAYEYQNLFDATVDSFYVAMANHGGSGVTLVVSESGWPSAGGVAASPENAAIYNQNLINHVGRGTPRHPGAIETILFSMFNENLKQSGVEQNWGLFYPNMQRVYPIKFN

SEQ ID NO: 7209 - protein, 336 aa, Zea mays subsp. mays
  peptide (1)..(336): Ceres Seq. ID no. 12387028
  misc_feature (30)..(335): Pfam Name: Glycosyl hydrolases family 17 Pfam Description: Glycosyl hydrolases family 17
  misc_feature (1)..(335): Homolog of NCBI NO: 100591 NR Description: licheninase (EC 3.2.1.73) I precursor, splice a - barley >gi|18984|emb|CAA40094.1| unnamed protein product
  misc_feature (1)..(335): Homolog of NCBI NO: 486849 NR Description: licheninase (EC 3.2.1.73) precursor - wheat
  misc_feature (1)..(335): Homolog of NCBI NO: 13249140 NR Description: glucanase [Oryza sativa]
  misc_feature (1)..(335): Homolog of NCBI NO: 288654 NR Description: (1-3, 1-4)-beta-glucanase [Avena sativa]
  misc_feature (1)..(335): Homolog of NCBI NO: 100664 NR Description: beta-glucanase - rice
  misc_feature (1)..(335): Homolog of NCBI NO: 854361 NR Description: beta-glucanase [Oryza sativa (japonica
  misc_feature (27)..(335): Homolog of NCBI NO: 100592 NR Description: licheninase (EC 3.2.1.73) isoenzyme EIb precursor barley >gi|4688931|emb|CAB41402.1| lichenase [Hordeum vulgare
  misc_feature (27)..(335): Homolog of NCBI NO: 840908 NR Description: beta glucanase [Triticum aestivum]
  misc_feature (1)..(335): Homolog of NCBI NO: 228411 NR Description: beta glucanase:ISOTYPE=II
  misc_feature (27)..(335): Homolog of NCBI NO: 121773 NR Description: LICHENASE II PRECURSOR (ENDO-BETA-1,3-1,4
MARQSAASMLATTTPLLLSVLANIAVVESIGVSYGMSGDNLPPASTVIGMYKDNGIPLMRIYAPDQAALQAVGGTGIRVVAGAPNDVLSSLAASPAAAASWVRNNIQAYPKVAFRCVCVGNEVEGGAAQSLVPAMENVRAALVAAGLDGIKVTTSVSQAILGGYKPPSAAEFTDEAQGFMGPVLRFLARTGAPLMASVYPYFTYATNPAAMDLSYALFTAPGTVLQDGAYEYQNLFDATVDSFYVAMANHGGSGVTLVVSESGWPSAGGVAASPENAAIYNQNLINHVGRGTPRHPGAIETILFSMFNENLKQSGVEQNWGLFYPNMQRVYPIKFN

SEQ ID NO: 7210 - protein, 328 aa, Zea mays subsp. mays
  peptide (1)..(328): Ceres Seq. ID no. 12387029
  misc_feature (22)..(327): Pfam Name: Glycosyl hydrolases family 17 Pfam Description: Glycosyl hydrolases family 17
  misc_feature (1)..(327): Homolog of NCBI NO: 100591 NR Description: licheninase (EC 3.2.1.73) I precursor, splice a - barley >gi|18984|emb|CAA40094.1| unnamed protein product
  misc_feature (1)..(327): Homolog of NCBI NO: 486849 NR Description: licheninase (EC 3.2.1.73) precursor - wheat
  misc_feature (1)..(327): Homolog of NCBI NO: 13249140 NR Description: glucanase [Oryza sativa]
  misc_feature (1)..(327): Homolog of NCBI NO: 288654 NR Description: (1-3, 1-4)-beta-glucanase [Avena sativa]
  misc_feature (1)..(327): Homolog of NCBI NO: 100664 NR Description: beta-glucanase - rice
  misc_feature (1)..(327): Homolog of NCBI NO: 854361 NR Description: beta-glucanase [Oryza sativa (japonica
  misc_feature (19)..(327): Homolog of NCBI NO: 100592 NR Description: licheninase (EC 3.2.1.73) isoenzyme EIb precursor barley >gi|4688931|emb|CAB41402.1| lichenase [Hordeum vulgare
  misc_feature (19)..(327): Homolog of NCBI NO: 840908 NR Description: beta glucanase [Triticum aestivum]
  misc_feature (1)..(327): Homolog of NCBI NO: 228411 NR Description: beta glucanase:ISOTYPE=II
  misc_feature (19)..(327): Homolog of NCBI NO: 121773 NR Description: LICHENASE II PRECURSOR (ENDO-BETA-1,3-1,4
MLATTTPLLLSVLANIAVVESIGVSYGMSGDNLPPASTVIGMYKDNGIPLMRIYAPDQAALQAVGGTGIRVVAGAPNDVLSSLAASPAAAASWVRNNIQAYPKVAFRCVCVGNEVEGGAAQSLVPAMENVRAALVAAGLDGIKVTTSVSQAILGGYKPPSAAEFTDEAQGFMGPVLRFLARTGAPLMASVYPYFTYATNPAAMDLSYALFTAPGTVLQDGAYEYQNLFDATVDSFYVAMANHGGSGVTLVVSESGWPSAGGVAASPENAAIYNQNLINHVGRGTPRHPGAIETILFSMFNENLKQSGVEQNWGLFYPNMQRVYPIKFN

SEQ ID NO: 7211 - DNA, 907 bp, Zea mays subsp. mays
  misc_feature (1)..(907): Ceres Seq. ID no. 12362307
  misc_feature: MA Experiment ID: 108523 Result: Down-regulated in Transcription
  misc_feature: MA Experiment 108523 PARAMETER Experiment Name: Zm_42deg_Heat_P Parameter: Age (day) Value: 8
  misc_feature: MA Experiment 108523 PARAMETER Experiment Name: Zm_42deg_Heat_P Parameter: Organism Value: Zea mays
  misc_feature: MA Experiment 108523 PARAMETER Experiment Name: Zm_42deg_Heat_P Parameter: Plant Line Value: 35A19
  misc_feature: MA Experiment 108523 PARAMETER Experiment Name: Zm_42deg_Heat_P Parameter: Temperature (deg C) Value: 42 vs. 22
  misc_feature: MA Experiment 108523 PARAMETER Experiment Name: Zm_42deg_Heat_P Parameter: Timepoint (hr) Value: 6
  misc_feature: MA Experiment 108523 PARAMETER Experiment Name: Zm_42deg_Heat_P Parameter: Tissue Value: Aerial
  misc_feature: MA Experiment ID: 108527 Result: Up-regulated in Transcription
  misc_feature: MA Experiment 108527 PARAMETER Experiment Name: Zm_5mM_NO_P Parameter: Age (day) Value: 8
  misc_feature: MA Experiment 108527 PARAMETER Experiment Name: Zm_5mM_NO_P Parameter: Organism Value: Zea mays
  misc_feature: MA Experiment 108527 PARAMETER Experiment Name: Zm_5mM_NO_P Parameter: Plant Line Value: 35A19
  misc_feature: MA Experiment 108527 PARAMETER Experiment Name: Zm_5mM_NO_P Parameter: Timepoint (hr) Value: 6
  misc_feature: MA Experiment 108527 PARAMETER Experiment Name: Zm_5mM_NO_P Parameter: Tissue Value: Aerial
  misc_feature: MA Experiment 108527 PARAMETER Experiment Name: Zm_5mM_NO_P Parameter: Treatment Value: 5mM NO vs. No Treatment
  misc_feature: MA Experiment ID: 108528 Result: Down-regulated in Transcription
  misc_feature: MA Experiment 108528 PARAMETER Experiment Name: Zm_Imbibed_Seeds_P Parameter: Age (day) Value: 5 vs. 2
  misc_feature: MA Experiment 108528 PARAMETER Experiment Name: Zm_Imbibed_Seeds_P Parameter: Organism Value: Zea mays
  misc_feature: MA Experiment 108528 PARAMETER Experiment Name: Zm_Imbibed_Seeds_P Parameter: Plant Line Value: 35A19
  misc_feature: MA Experiment 108528 PARAMETER Experiment Name: Zm_Imbibed_Seeds_P Parameter: Tissue Value: Aerial vs. Embryo
  misc_feature: MA Experiment ID: 108529 Result: Up-regulated in Transcription
  misc_feature: MA Experiment 108529 PARAMETER Experiment Name: Zm_Imbibed_Seeds_P Parameter: Age (day) Value: 5 vs. 2
  misc_feature: MA Experiment 108529 PARAMETER Experiment Name: Zm_Imbibed_Seeds_P Parameter: Organism Value: Zea mays
  misc_feature: MA Experiment 108529 PARAMETER Experiment Name: Zm_Imbibed_Seeds_P Parameter: Plant Line Value: 35A19
  misc_feature: MA Experiment 108529 PARAMETER Experiment Name: Zm_Imbibed_Seeds_P Parameter: Tissue Value: Roots vs. Embryo
  misc_feature: MA Experiment ID: 108535 Result: Down-regulated in Transcription
  misc_feature: MA Experiment 108535 PARAMETER Experiment Name: Zm_Meristem_P Parameter: Age (day) Value: 8
  misc_feature: MA Experiment 108535 PARAMETER Experiment Name: Zm_Meristem_P Parameter: Organism Value: Zea mays
  misc_feature: MA Experiment 108535 PARAMETER Experiment Name: Zm_Meristem_P Parameter: Plant Line Value: 35A19
  misc_feature: MA Experiment 108535 PARAMETER Experiment Name: Zm_Meristem_P Parameter: Tissue Value: Root Meristem vs. Above Root Meristem
  misc_feature: MA Experiment ID: 108545 Result: Down-regulated in Transcription
  misc_feature: MA Experiment 108545 PARAMETER Experiment Name: Zm_Imbibed_Seeds_P Parameter: Age (day) Value: 3 vs. 2
  misc_feature: MA Experiment 108545 PARAMETER Experiment Name: Zm_Imbibed_Seeds_P Parameter: Organism Value: Zea mays
  misc_feature: MA Experiment 108545 PARAMETER Experiment Name: Zm_Imbibed_Seeds_P Parameter: Plant Line Value: 35A19
  misc_feature: MA Experiment 108545 PARAMETER Experiment Name: Zm_Imbibed_Seeds_P Parameter: Tissue Value: Aerial vs. Embryo
  misc_feature: MA Experiment ID: 108546 Result: Up-regulated in Transcription
  misc_feature: MA Experiment 108546 PARAMETER Experiment Name: Zm_Imbibed_Seeds_P Parameter: Age (day) Value: 3 vs. 2
  misc_feature: MA Experiment 108546 PARAMETER Experiment Name: Zm_Imbibed_Seeds_P Parameter: Organism Value: Zea mays
  misc_feature: MA Experiment 108546 PARAMETER Experiment Name: Zm_Imbibed_Seeds_P Parameter: Plant Line Value: 35A19
  misc_feature: MA Experiment 108546 PARAMETER Experiment Name: Zm_Imbibed_Seeds_P Parameter: Tissue Value: Roots vs. Embryo
  misc_feature: MA Experiment ID: 108689 Result: Down-regulated in Transcription
  misc_feature: MA Experiment 108689 PARAMETER Experiment Name: Zm_Drought_Roots_P Parameter: Age (day) Value: 9
  misc_feature: MA Experiment 108689 PARAMETER Experiment Name: Zm_Drought_Roots_P Parameter: Organism Value: Zea mays
  misc_feature: MA Experiment 108689 PARAMETER Experiment Name: Zm_Drought_Roots_P Parameter: Plant Line Value: 35A19
  misc_feature: MA Experiment 108689 PARAMETER Experiment Name: Zm_Drought_Roots_P Parameter: Timepoint (hr) Value: 24
  misc_feature: MA Experiment 108689 PARAMETER Experiment Name: Zm_Drought_Roots_P Parameter: Tissue Value: Roots
  misc_feature: MA Experiment 108689 PARAMETER Experiment Name: Zm_Drought_Roots_P Parameter: Treatment Value: Drought vs. No Drought
  misc_feature: MA Experiment ID: 20000492 Result: Down-regulated in Transcription
  misc_feature: MA Experiment 20000492 PARAMETER Experiment Name: Zm_Hybrid_Seed_Dev_P Parameter: DAP Value: 12
  misc_feature: MA Experiment 20000492 PARAMETER Experiment Name: Zm_Hybrid_Seed_Dev_P Parameter: Organism Value: Zea mays
  misc_feature: MA Experiment 20000492 PARAMETER Experiment Name: Zm_Hybrid_Seed_Dev_P Parameter: Plant Line Value: 35A19
  misc_feature: MA Experiment 20000492 PARAMETER Experiment Name: Zm_Hybrid_Seed_Dev_P Parameter: Tissue Value: Fert Kernel vs. Unfert Floret
  misc_feature: MA Experiment ID: 20000629 Result: Up-regulated in Transcription
  misc_feature: MA Experiment 20000629 PARAMETER Experiment Name: Zm_Herbicide-Treatments_P Parameter: Timepoint (hr) Value: 12
  misc_feature: MA Experiment 20000629 PARAMETER Experiment Name: Zm_Herbicide-Treatments_P Parameter: Tissue Value: Aerial
  misc_feature: MA Experiment 20000629 PARAMETER Experiment Name: Zm_Herbicide-Treatments_P Parameter: Treatment Value: Trimec vs. No Treatment
  misc_feature: MA Experiment ID: 20001608 Result: Down-regulated in Transcription
  misc_feature: MA Experiment 20001608 PARAMETER Experiment Name: Zm_50ppm_KNO3_L-to-H_P Parameter: Age (day) Value: 21
  misc_feature: MA Experiment 20001608 PARAMETER Experiment Name: Zm_50ppm_KNO3_L-to-H_P Parameter: Organism Value: Zea mays
  misc_feature: MA Experiment 20001608 PARAMETER Experiment Name: Zm_50ppm_KNO3_L-to-H_P Parameter: Plant Line Value: 35A19
  misc_feature: MA Experiment 20001608 PARAMETER Experiment Name: Zm_50ppm_KNO3_L-to-H_P Parameter: Timepoint (hr) Value: 48
  misc_feature: MA Experiment 20001608 PARAMETER Experiment Name: Zm_50ppm_KNO3_L-to-H_P Parameter: Tissue Value: Shoots
  misc_feature: MA Experiment 20001608 PARAMETER Experiment Name: Zm_50ppm_KNO3_L-to-H_P Parameter: Treatment Value: 50ppm KNO3 vs. 50ppm KCl
atcagattgggagactcacttcactcactcgggagtcgggtcctcctcgactcagctcctccacaaacaaagccaccaccatcccaacccaaacacatcggccgaccacgggcgccgccatgtccaccgctgacgcggcgagcccggccctggcgccggactgggacgcgccggcgggcgaaggcctggccctggcccagttcgccgcgggctgcttctggagcgtggagctggtgtaccagcgcctcccaggcgtggcgcgcacggaggtggggtactcgcagggccaccgccacgcccccacctaccgcgacgtctgcggcaacggcacgggccacgccgaggtggtccgcgtgcactacgaccccaaggcctgcccctacgacgtcctcctcgacgtcttctgggccaagcacaaccccaccacgctcaacagacagggcaacgacgtcgggacgcagtaccggtcgggcatctactactacacggcagagcaggagacgctggcgcgcgagtcgctggctgcgaagcagaaggagtggcaggacgcgatcgtcaccgaggtcctgccggcgcgacggttctaccccgccgaggagtaccaccagcagtacctcgagaagggcgggcagtccgccaagaagggctgcagcgatcccatccgctgctacggttgagtaccgaccgacccctgtccggagcaccgaagacgccgtgaatgaactgtgctgcatcgatgcgttgtactacctccacctccgctctcgaatagttgttgcccgctagttcattttataactaaacgaccataaataaaaaagaacggagggaagatattgtaactaaagtgtaagatgacttttttgtgttgtgtatcgtactactgcttgttcagagatctacgttg

SEQ ID NO: 7212 - protein, 261 aa, Zea mays subsp. mays
  peptide (1)..(261): Ceres Seq. ID no. 12362308
  misc_feature (79)..(239): Pfam Name: Mucin-like glycoprotein Pfam Description: Mucin-like glycoprotein
  misc_feature (6)..(239): Homolog of NCBI NO: 29246775 NR Description: GLP_375_16023_15058 [Giardia lamblia ATCC 50803]
  misc_feature (18)..(240): Homolog of NCBI NO: 1669674 NR Description: Microtubule-associated protein 4 [Gallus gallus]
IRLGDSLHSLGSRVLLDSAPPQTKPPPSQPKHIGRPRAPPCPPLTRRARPWRRTGTRRRAKAWPWPSSPRAASGAWSWCTSASQAWRARRWGTRRATATPPPTATSAATARATPRWSACTTTPRPAPTTSSSTSSGPSTTPPRSTDRATTSGRSTGRASTTTRQSRRRWRASRWLRSRRSGRTRSSPRSCRRDGSTPPRSTTSSTSRRAGSPPRRAAAIPSAATVEYRPTPVRSTEDAVNELCCIDALYYLHLRSRIVVAR

SEQ ID NO: 7213 - protein, 224 aa, Zea mays subsp. mays
  peptide (1)..(224): Ceres Seq. ID no. 12362309
  misc_feature (64)..(218): Pfam Name: Peptide methionine sulfoxide reductase Pfam Description: Peptide methionine sulfoxide reductase
  misc_feature (41)..(224): Homolog of NCBI NO: 38345255 NR Description: OSJNBb0011N17.16 [Oryza sativa (japonica
  misc_feature (45)..(224): Homolog of NCBI NO: 40019251 NR Description: peptide methionine sulfoxide reductase [Secale
  misc_feature (45)..(224): Homolog of NCBI NO: 38345256 NR Description: OSJNBb0011N17.17 [Oryza sativa (japonica
  misc_feature (43)..(224): Homolog of NCBI NO: 37536896 NR Description: putative peptide methionine sulfoxide reductase
  misc_feature (37)..(224): Homolog of NCBI NO: 1709692 NR Description: Peptide methionine sulfoxide reductase
  misc_feature (48)..(224): Homolog of NCBI NO: 1709691 NR Description: Peptide methionine sulfoxide reductase
  misc_feature (40)..(224): Homolog of NCBI NO: 31455408 NR Description: methionine sulfoxide reductase [Fragaria x
  misc_feature (16)..(224): Homolog of NCBI NO: 12230349 NR Description: Peptide methionine sulfoxide reductase
  misc_feature (40)..(224): Homolog of NCBI NO: 11342533 NR Description: methionine sulfoxide reductase [Fragaria x
  misc_feature (37)..(224): Homolog of NCBI NO: 18424492 NR Description: peptide methionine sulfoxide reductase - like protein id: At5g61640.1, supported by cDNA: 95135. [Arabidopsis >gi|9758479|dbj|BAB09008.1| peptide methionine sulfoxide
QIGRLTSLTRESGPPRLSSSTNKATTIPTQTHRPTTGAAMSTADAASPALAPDWDAPAGEGLALAQFAAGCFWSVELVYQRLPGVARTEVGYSQGHRHAPTYRDVCGNGTGHAEVVRVHYDPKACPYDVLLDVFWAKHNPTTLNRQGNDVGTQYRSGIYYYTAEQETLARESLAAKQKEWQDAIVTEVLPARRFYPAEEYHQQYLEKGGQSAKKGCSDPIRCYG

SEQ ID NO: 7214 - protein, 185 aa, Zea mays subsp. mays
  peptide (1)..(185): Ceres Seq. ID no. 12362310
  misc_feature (25)..(179): Pfam Name: Peptide methionine sulfoxide reductase Pfam Description: Peptide methionine sulfoxide reductase
  misc_feature (2)..(185): Homolog of NCBI NO: 38345255 NR Description: OSJNBb0011N17.16 [Oryza sativa (japonica
  misc_feature (6)..(185): Homolog of NCBI NO: 40019251 NR Description: peptide methionine sulfoxide reductase [Secale
  misc_feature (6)..(185): Homolog of NCBI NO: 38345256 NR Description: OSJNBb0011N17.17 [Oryza sativa (japonica
  misc_feature (4)..(185): Homolog of NCBI NO: 37536896 NR Description: putative peptide methionine sulfoxide reductase
  misc_feature (1)..(185): Homolog of NCBI NO: 1709692 NR Description: Peptide methionine sulfoxide reductase
  misc_feature (9)..(185): Homolog of NCBI NO: 1709691 NR Description: Peptide methionine sulfoxide reductase
  misc_feature (1)..(185): Homolog of NCBI NO: 31455408 NR Description: methionine sulfoxide reductase [Fragaria x
  misc_feature (1)..(185): Homolog of NCBI NO: 12230349 NR Description: Peptide methionine sulfoxide reductase
  misc_feature (1)..(185): Homolog of NCBI NO: 11342533 NR Description: methionine sulfoxide reductase [Fragaria x
  misc_feature (1)..(185): Homolog of NCBI NO: 18424492 NR Description: peptide methionine sulfoxide reductase - like protein id: At5g61640.1, supported by cDNA: 95135. [Arabidopsis >gi|9758479|dbj|BAB09008.1| peptide methionine sulfoxide
MSTADAASPALAPDWDAPAGEGLALAQFAAGCFWSVELVYQRLPGVARTEVGYSQGHRHAPTYRDVCGNGTGHAEVVRVHYDPKACPYDVLLDVFWAKHNPTTLNRQGNDVGTQYRSGIYYYTAEQETLARESLAAKQKEWQDAIVTEVLPARRFYPAEEYHQQYLEKGGQSAKKGCSDPIRCYG

SEQ ID NO: 7215 - DNA, 1488 bp, Zea mays subsp. mays
  misc_feature (1)..(1488): Ceres Seq. ID no. 13494410
  misc_feature: MA Experiment ID: 108523 Result: Up-regulated in Transcription
  misc_feature: MA Experiment 108523 PARAMETER Experiment Name: Zm_42deg_Heat_P Parameter: Age (day) Value: 8
  misc_feature: MA Experiment 108523 PARAMETER Experiment Name: Zm_42deg_Heat_P Parameter: Organism Value: Zea mays
  misc_feature: MA Experiment 108523 PARAMETER Experiment Name: Zm_42deg_Heat_P Parameter: Plant Line Value: 35A19
  misc_feature: MA Experiment 108523 PARAMETER Experiment Name: Zm_42deg_Heat_P Parameter: Temperature (deg C) Value: 42 vs. 22
  misc_feature: MA Experiment 108523 PARAMETER Experiment Name: Zm_42deg_Heat_P Parameter: Timepoint (hr) Value: 6
  misc_feature: MA Experiment 108523 PARAMETER Experiment Name: Zm_42deg_Heat_P Parameter: Tissue Value: Aerial
  misc_feature: MA Experiment ID: 108529 Result: Up-regulated in Transcription
  misc_feature: MA Experiment 108529 PARAMETER Experiment Name: Zm_Imbibed_Seeds_P Parameter: Age (day) Value: 5 vs. 2
  misc_feature: MA Experiment 108529 PARAMETER Experiment Name: Zm_Imbibed_Seeds_P Parameter: Organism Value: Zea mays
  misc_feature: MA Experiment 108529 PARAMETER Experiment Name: Zm_Imbibed_Seeds_P Parameter: Plant Line Value: 35A19
  misc_feature: MA Experiment 108529 PARAMETER Experiment Name: Zm_Imbibed_Seeds_P Parameter: Tissue Value: Roots vs. Embryo
  misc_feature: MA Experiment ID: 108534 Result: Up-regulated in Transcription
  misc_feature: MA Experiment 108534 PARAMETER Experiment Name: Zm_4deg_Cold_P Parameter: Age (hr) Value: 8
  misc_feature: MA Experiment 108534 PARAMETER Experiment Name: Zm_4deg_Cold_P Parameter: Organism Value: Zea mays
  misc_feature: MA Experiment 108534 PARAMETER Experiment Name: Zm_4deg_Cold_P Parameter: Plant Line Value: 35A19
  misc_feature: MA Experiment 108534 PARAMETER Experiment Name: Zm_4deg_Cold_P Parameter: Temperature (deg C) Value: 4 vs. 22
  misc_feature: MA Experiment 108534 PARAMETER Experiment Name: Zm_4deg_Cold_P Parameter: Timepoint (hr) Value: 6
  misc_feature: MA Experiment 108534 PARAMETER Experiment Name: Zm_4deg_Cold_P Parameter: Tissue Value: Aerial
  misc_feature: MA Experiment ID: 108543 Result: Down-regulated in Transcription
  misc_feature: MA Experiment ID: 108687 Result: Up-regulated in Transcription
  misc_feature: MA Experiment 108687 PARAMETER Experiment Name: Zm_Embryos-Flowers__P Parameter: Tissue Value: Embryo vs. Aerial+
  misc_feature: MA Experiment ID: 108688 Result: Down-regulated in Transcription
  misc_feature: MA Experiment 108688 PARAMETER Experiment Name: Zm_Embryos-Flowers__P Parameter: Tissue Value: Immature Flowers vs. Aerial+
  misc_feature: Pfam Name: Sterol_desat Pfam Description: Sterol desaturase
aactccccaccccagccgatcccaacgcacactgcacccagtccggcggccgccggcaatggcggtgcacggcggcgactacctgcggcggttcgttgcggagacggagtggtwcaacgaggtcgtcctcaacgccgtggcgccaggcgactggtggcgcggcctgccgcacccggtgcagtcgtggatgcgcaactgcgtcggcggttacctcctctacttcatctctggtttcctctggtgtttcgtcatctactactggaagcgccacgcctacatccccaaagatgccatccccacaaacgaagctatgaagaagcaaatagctgtagcatccaaggctatgcctttttactgtgctcttccaactttatctgagtatatgatcgasagcggatggacccggtgttactttaatatcagcgaahtgggtttttctgcgtacctttgttatatggctatgtatctcatttttgtggagtttggaatttactggatgcacagagagttgcatgacataaagccactatacaaacatctgcatgcgacccaccatatttacaacaaggagaacaccttgtctccgtttgctggactcgcgtttcacccactggatggtattctgcaagcgataccgcatgtgcttgcgctcttcctcctcccaacgcacttcaggacgcacatcgctctcgtgttcttggagggcgtgtggacgacaaacatccacgactgcattcacggcaaggtatggccagtcatgggcgctgggtatcacaccatccaccatacgacttaccgccacaactatggccactacaccgtctggatggactggatgtttggtacgctccgtgagccagatgatatcctcaagaaggcctgagttcgtcgtagctgtggttttcctacggtgctggatgtgcttggtctgttstgtccccagtgcctctaatccgctgagcctgttcagcgctctgtttctgtaggctttggtgtgctatttagtttgctaggttttatatgttgtgcttattctgtaatttagtgatgtttgtctgatgacgcaacggagttcaggacgaataaaaagaaagatttsctacacacattctggattccaaaaaaaaaaaaaaaaaaaaaaaaaaaaaaaaaaaaaaaaaaaaaaaaaaaaaaaataaaaaaaaaaaaaaaaaaktttttttttttttttttgtctgttctaggtttagaagcctatgctatgctgctggttcacctaagcatttgktggaaggtaacaccaagcagccgtgaacagccacggtcacctgaggagccttctcgcagtgtctggatgtggttgtttgagcctctgaggggaaatgccctgcgcgcttctgtgcttctcgtgtttctacctggcaaccacgtgcacataattttaccagaatccgattgtttccattcgtgtagcagtatttctctataaaatgccagaaagtttcaggc

SEQ ID NO: 7216 - protein, 293 aa, Zea mays subsp. mays
  peptide (1)..(293): Ceres Seq. ID no. 15222928
  misc_feature: Pfam Name: Sterol_desat Pfam Description: Sterol desaturase
  misc_feature (26)..(292): Homolog of NCBI NO: 4426627 NR Description: sterol-C5(6)-desaturase homolog [Nicotiana
  misc_feature (20)..(197): Homolog of NCBI NO: 34895618 NR Description: putative sterol-C5(6)-desaturase [Oryza sativa
  misc_feature (232)..(292): Homolog of NCBI NO: 34895618 NR Description: putative sterol-C5(6)-desaturase [Oryza sativa
  misc_feature (26)..(292): Homolog of NCBI NO: 33301670 NR Description: Delta-7-sterol-C5(6)-desaturase (Delta-7-C-5
  misc_feature (27)..(286): Homolog of NCBI NO: 5031219 NR Description: delta7 sterol C-5 desaturase [Arabidopsis
  misc_feature (27)..(286): Homolog of NCBI NO: 15232935 NR Description: delta 7-sterol-C5-desaturase (STE1) [Arabidopsis
  misc_feature (27)..(286): Homolog of NCBI NO: 21594971 NR Description: sterol-C5-desaturase [Arabidopsis thaliana]
  misc_feature (27)..(286): Homolog of NCBI NO: 2129741 NR Description: C-5 sterol desaturase (EC 1.-.-.-) - Arabidopsis
  misc_feature (20)..(286): Homolog of NCBI NO: 15232937 NR Description: delta 7-sterol-C5-desaturase, putative
  misc_feature (67)..(286): Homolog of NCBI NO: 25742651 NR Description: sterol-C5-desaturase (fungal ERG3,
  misc_feature (38)..(38): Xaa is any aa, unknown or other
  misc_feature (130)..(130): Xaa is any aa, unknown or other
  misc_feature (143)..(143): Xaa is any aa, unknown or other
TPHPSRSQRTLHPVRRPPAMAVHGGDYLRRFVAETEWXNEVVLNAVAPGDWWRGLPHPVQSWMRNCVGGYLLYFISGFLWCFVIYYWKRHAYIPKDAIPTNEAMKKQIAVASKAMPFYCALPTLSEYMIXSGWTRCYFNISEXGFSAYLCYMAMYLIFVEFGIYWMHRELHDIKPLYKHLHATHHIYNKENTLSPFAGLAFHPLDGILQAIPHVLALFLLPTHFRTHIALVFLEGVWTTNIHDCIHGKVWPVMGAGYHTIHHTTYRHNYGHYTVWMDWMFGTLREPDDILKKA

SEQ ID NO: 7217 - protein, 274 aa, Zea mays subsp. mays
  peptide (1)..(274): Ceres Seq. ID no. 15222929
  misc_feature: Pfam Name: Sterol_desat Pfam Description: Sterol desaturase
  misc_feature (1)..(178): Homolog of NCBI NO: 34895618 NR Description: putative sterol-C5(6)-desaturase [Oryza sativa
  misc_feature (213)..(273): Homolog of NCBI NO: 34895618 NR Description: putative sterol-C5(6)-desaturase [Oryza sativa
  misc_feature (7)..(273): Homolog of NCBI NO: 33301670 NR Description: Delta-7-sterol-C5(6)-desaturase (Delta-7-C-5
  misc_feature (8)..(267): Homolog of NCBI NO: 5031219 NR Description: delta7 sterol C-5 desaturase [Arabidopsis
  misc_feature (8)..(267): Homolog of NCBI NO: 15232935 NR Description: delta 7-sterol-C5-desaturase (STE1) [Arabidopsis
  misc_feature (8)..(267): Homolog of NCBI NO: 21594971 NR Description: sterol-C5-desaturase [Arabidopsis thaliana]
  misc_feature (8)..(267): Homolog of NCBI NO: 2129741 NR Description: C-5 sterol desaturase (EC 1.-.-.-) - Arabidopsis
  misc_feature (1)..(267): Homolog of NCBI NO: 15232937 NR Description: delta 7-sterol-C5-desaturase, putative
  misc_feature (48)..(267): Homolog of NCBI NO: 25742651 NR Description: sterol-C5-desaturase (fungal ERG3,
  misc_feature (7)..(273): Homolog of NCBI NO: 4426627 NR Description: sterol-C5(6)-desaturase homolog [Nicotiana
  misc_feature (19)..(19): Xaa is any aa, unknown or other
  misc_feature (111)..(111): Xaa is any aa, unknown or other
  misc_feature (124)..(124): Xaa is any aa, unknown or other
MAVHGGDYLRRFVAETEWXNEVVLNAVAPGDWWRGLPHPVQSWMRNCVGGYLLYFISGFLWCFVIYYWKRHAYIPKDAIPTNEAMKKQIAVASKAMPFYCALPTLSEYMIXSGWTRCYFNISEXGFSAYLCYMAMYLIFVEFGIYWMHRELHDIKPLYKHLHATHHIYNKENTLSPFAGLAFHPLDGILQAIPHVLALFLLPTHFRTHIALVFLEGVWTTNIHDCIHGKVWPVMGAGYHTIHHTTYRHNYGHYTVWMDWMFGTLREPDDILKKA

SEQ ID NO: 7218 - protein, 231 aa, Zea mays subsp. mays
  peptide (1)..(231): Ceres Seq. ID no. 15222930
  misc_feature: Pfam Name: Sterol_desat Pfam Description: Sterol desaturase
  misc_feature (1)..(230): Homolog of NCBI NO: 4426627 NR Description: sterol-C5(6)-desaturase homolog [Nicotiana
  misc_feature (1)..(135): Homolog of NCBI NO: 34895618 NR Description: putative sterol-C5(6)-desaturase [Oryza sativa
  misc_feature (170)..(230): Homolog of NCBI NO: 34895618 NR Description: putative sterol-C5(6)-desaturase [Oryza sativa
  misc_feature (1)..(230): Homolog of NCBI NO: 33301670 NR Description: Delta-7-sterol-C5(6)-desaturase (Delta-7-C-5
  misc_feature (1)..(224): Homolog of NCBI NO: 5031219 NR Description: delta7 sterol C-5 desaturase [Arabidopsis
  misc_feature (1)..(224): Homolog of NCBI NO: 15232935 NR Description: delta 7-sterol-C5-desaturase (STE1) [Arabidopsis
  misc_feature (1)..(224): Homolog of NCBI NO: 21594971 NR Description: sterol-C5-desaturase [Arabidopsis thaliana]
  misc_feature (1)..(224): Homolog of NCBI NO: 2129741 NR Description: C-5 sterol desaturase (EC 1.-.-.-) - Arabidopsis
  misc_feature (1)..(224): Homolog of NCBI NO: 15232937 NR Description: delta 7-sterol-C5-desaturase, putative
  misc_feature (5)..(224): Homolog of NCBI NO: 25742651 NR Description: sterol-C5-desaturase (fungal ERG3,
  misc_feature (68)..(68): Xaa is any aa, unknown or other
  misc_feature (81)..(81): Xaa is any aa, unknown or other
MRNCVGGYLLYFISGFLWCFVIYYWKRHAYIPKDAIPTNEAMKKQIAVASKAMPFYCALPTLSEYMIXSGWTRCYFNISEXGFSAYLCYMAMYLIFVEFGIYWMHRELHDIKPLYKHLHATHHIYNKENTLSPFAGLAFHPLDGILQAIPHVLALFLLPTHFRTHIALVFLEGVWTTNIHDCIHGKVWPVMGAGYHTIHHTTYRHNYGHYTVWMDWMFGTLREPDDILKKA

SEQ ID NO: 7219 - DNA, 1419 bp, Zea mays subsp. mays
  misc_feature (1)..(1419): Ceres Seq. ID no. 12361440
  misc_feature: MA Experiment ID: 108504 Result: Up-regulated in Transcription
  misc_feature: MA Experiment 108504 PARAMETER Experiment Name: Zm_Drought_P Parameter: Age (day) Value: 8
  misc_feature: MA Experiment 108504 PARAMETER Experiment Name: Zm_Drought_P Parameter: Organism Value: Zea mays
  misc_feature: MA Experiment 108504 PARAMETER Experiment Name: Zm_Drought_P Parameter: Plant Line Value: 35A19
  misc_feature: MA Experiment 108504 PARAMETER Experiment Name: Zm_Drought_P Parameter: Timepoint (hr) Value: 12
  misc_feature: MA Experiment 108504 PARAMETER Experiment Name: Zm_Drought_P Parameter: Tissue Value: Aerial
  misc_feature: MA Experiment 108504 PARAMETER Experiment Name: Zm_Drought_P Parameter: Treatment Value: Drought vs. No Drought
  misc_feature: MA Experiment ID: 108556 Result: Up-regulated in Transcription
  misc_feature: MA Experiment 108556 PARAMETER Experiment Name: Zm_Drought_P Parameter: Age (day) Value: 9
  misc_feature: MA Experiment 108556 PARAMETER Experiment Name: Zm_Drought_P Parameter: Organism Value: Zea mays
  misc_feature: MA Experiment 108556 PARAMETER Experiment Name: Zm_Drought_P Parameter: Plant Line Value: 35A19
  misc_feature: MA Experiment 108556 PARAMETER Experiment Name: Zm_Drought_P Parameter: Timepoint (hr) Value: 24
  misc_feature: MA Experiment 108556 PARAMETER Experiment Name: Zm_Drought_P Parameter: Tissue Value: Aerial
  misc_feature: MA Experiment 108556 PARAMETER Experiment Name: Zm_Drought_P Parameter: Treatment Value: Drought vs. No Drought
  misc_feature: MA Experiment ID: 108597 Result: Up-regulated in Transcription
  misc_feature: MA Experiment 108597 PARAMETER Experiment Name: Zm_100uM_ABA_P Parameter: Age (day) Value: 9
  misc_feature: MA Experiment 108597 PARAMETER Experiment Name: Zm_100uM_ABA_P Parameter: Organism Value: Zea mays
  misc_feature: MA Experiment 108597 PARAMETER Experiment Name: Zm_100uM_ABA_P Parameter: Plant Line Value: 35A19
  misc_feature: MA Experiment 108597 PARAMETER Experiment Name: Zm_100uM_ABA_P Parameter: Timepoint (hr) Value: 24
  misc_feature: MA Experiment 108597 PARAMETER Experiment Name: Zm_100uM_ABA_P Parameter: Tissue Value: Aerial
  misc_feature: MA Experiment 108597 PARAMETER Experiment Name: Zm_100uM_ABA_P Parameter: Treatment Value: 100uM ABA vs. No Treatment
  misc_feature: MA Experiment ID: 108689 Result: Up-regulated in Transcription
  misc_feature: MA Experiment 108689 PARAMETER Experiment Name: Zm_Drought_Roots_P Parameter: Age (day) Value: 9
  misc_feature: MA Experiment 108689 PARAMETER Experiment Name: Zm_Drought_Roots_P Parameter: Organism Value: Zea mays
  misc_feature: MA Experiment 108689 PARAMETER Experiment Name: Zm_Drought_Roots_P Parameter: Plant Line Value: 35A19
  misc_feature: MA Experiment 108689 PARAMETER Experiment Name: Zm_Drought_Roots_P Parameter: Timepoint (hr) Value: 24
  misc_feature: MA Experiment 108689 PARAMETER Experiment Name: Zm_Drought_Roots_P Parameter: Tissue Value: Roots
  misc_feature: MA Experiment 108689 PARAMETER Experiment Name: Zm_Drought_Roots_P Parameter: Treatment Value: Drought vs. No Drought
  misc_feature: MA Experiment ID: 20000478 Result: Up-regulated in Transcription
  misc_feature: MA Experiment 20000478 PARAMETER Experiment Name: Zm_5mM_SA_P Parameter: Age (day) Value: 11
  misc_feature: MA Experiment 20000478 PARAMETER Experiment Name: Zm_5mM_SA_P Parameter: Organism Value: Zea mays
  misc_feature: MA Experiment 20000478 PARAMETER Experiment Name: Zm_5mM_SA_P Parameter: Plant Line Value: 35A19
  misc_feature: MA Experiment 20000478 PARAMETER Experiment Name: Zm_5mM_SA_P Parameter: Timepoint (hr) Value: 72
  misc_feature: MA Experiment 20000478 PARAMETER Experiment Name: Zm_5mM_SA_P Parameter: Tissue Value: Aerial
  misc_feature: MA Experiment 20000478 PARAMETER Experiment Name: Zm_5mM_SA_P Parameter: Treatment Value: 5mM SA vs. No Treatment
  misc_feature: MA Experiment ID: 20000479 Result: Up-regulated in Transcription
  misc_feature: MA Experiment 20000479 PARAMETER Experiment Name: Zm_Drought_P Parameter: Age (day) Value: 10
  misc_feature: MA Experiment 20000479 PARAMETER Experiment Name: Zm_Drought_P Parameter: Organism Value: Zea mays
  misc_feature: MA Experiment 20000479 PARAMETER Experiment Name: Zm_Drought_P Parameter: Plant Line Value: 35A19
  misc_feature: MA Experiment 20000479 PARAMETER Experiment Name: Zm_Drought_P Parameter: Timepoint (hr) Value: 48
  misc_feature: MA Experiment 20000479 PARAMETER Experiment Name: Zm_Drought_P Parameter: Tissue Value: Aerial
  misc_feature: MA Experiment 20000479 PARAMETER Experiment Name: Zm_Drought_P Parameter: Treatment Value: Drought vs. No Drought
  misc_feature: MA Experiment ID: 20000480 Result: Up-regulated in Transcription
  misc_feature: MA Experiment 20000480 PARAMETER Experiment Name: Zm_Drought_P Parameter: Age (day) Value: 11
  misc_feature: MA Experiment 20000480 PARAMETER Experiment Name: Zm_Drought_P Parameter: Organism Value: Zea mays
  misc_feature: MA Experiment 20000480 PARAMETER Experiment Name: Zm_Drought_P Parameter: Plant Line Value: 35A19
  misc_feature: MA Experiment 20000480 PARAMETER Experiment Name: Zm_Drought_P Parameter: Timepoint (hr) Value: 72
  misc_feature: MA Experiment 20000480 PARAMETER Experiment Name: Zm_Drought_P Parameter: Tissue Value: Aerial
  misc_feature: MA Experiment 20000480 PARAMETER Experiment Name: Zm_Drought_P Parameter: Treatment Value: Drought vs. No Drought
  misc_feature: MA Experiment ID: 20000535 Result: Up-regulated in Transcription
  misc_feature: MA Experiment 20000535 PARAMETER Experiment Name: Zm_Hybrid_Seed_Dev_P Parameter: DAP Value: 30 vs. 12
  misc_feature: MA Experiment 20000535 PARAMETER Experiment Name: Zm_Hybrid_Seed_Dev_P Parameter: Organism Value: Zea mays
  misc_feature: MA Experiment 20000535 PARAMETER Experiment Name: Zm_Hybrid_Seed_Dev_P Parameter: Plant Line Value: 35A19
  misc_feature: MA Experiment 20000535 PARAMETER Experiment Name: Zm_Hybrid_Seed_Dev_P Parameter: Tissue Value: Embryo vs. Unfert Floret
gtcactttctctccggaggcgacgtgtcgagtggagcgacgtctccaccatcttcttggcttttcctccttccccgcccttccgaatttctccgcgatttcagcgcgcttcctcccgccggctcctccccccgcctccgctctcaccgcggccggccagccatggagcaaggccaggggccgccgccgccgaagccgcctgcgacggagcgcgacatcggattcgccgagcgggccgtggcggcggcaggcgcggccgtcgtgtccgccgtcctcgtcaaccccctcgacgtcgccaagacaaggttgcaagcacaagctgctggagttgtttataacccgatatggtcagattttaggtgctatccatcatgcagcactggtggaatcaatggtttaggcccatgctcggcctgcagtcctgaatgctttcagtacagaggaactatggatgtgttttctaaagtcactagacaggaaggaatttttagactatggagaggtactggtgcaagcctggcattggctgtaccaacggttggaatatatctgcctagttacgatttattgcgcaattggattgaagaatactcggaccgcaattgtcccaagcttcgaccatatgctcctcttatttctggctctattgcacgatcattggcatgcataacttgttgccctattgagttagcaagaacacgtatgcaggccttcaaagaatcgaatgttggagcgaagccccctggaatgtggaagaccttgataggtgtgctttcatcaagacagagcatcaagagccctgaaaacgtgcgaggataccacctcctatggactggtctgggagcgcaactagcacgcgatgcgccctactcagctatatgctggacagttcttgaaccaattagacgacatgtgacacgactattcggtgatcaaagcaacgcgacagttatattgggggcgaacttttctgcaggctttattgctggggttatctctgcgggcgctacctgccctcttgatgttgccaagacacgcagacaaatagagaaggatcctgaaagggtattgagcatgaacacaaggcgcatattgcttgaggtttggaggaaggaaggtgtggaaggtctgttcagaggcgcaggccctcgaatggggcgcgcaggcccgtcggtgggcatcgtcgtctcctcctacgaagttgtgaagcacctcatgcacaagaacacgagcaatgcagcagacctatgattcgatgagctcgattagcacgccctaatggcacaagtaggattaggaatgtcgctattcaaagaaacacatttttttacggtagtccatgacagataaatgttatccctccattccattacaaactgttacttctaagatgggtttttatgcatctagtggctagctt

SEQ ID NO: 7220 - protein, 415 aa, Zea mays subsp. mays
  peptide (1)..(415): Ceres Seq. ID no. 12361441
  misc_feature (129)..(407): Homolog of NCBI NO: 34904154 NR Description: P0417G05.20 [Oryza sativa (japonica
  misc_feature (67)..(407): Homolog of NCBI NO: 40253478 NR Description: putative mitochondrial carrier protein [Oryza
  misc_feature (68)..(411): Homolog of NCBI NO: 18417093 NR Description: putative protein; protein id: At4g27940.1, by cDNA: 147875., supported by cDNA: gi_16226566 [Arabidopsis >gi|16226567|gb|AAL16202.1|AF428433_1 AT4g27940/T13J8_50
  misc_feature (54)..(406): Homolog of NCBI NO: 30690323 NR Description: mitochondrial carrier protein family [Arabidopsis
  misc_feature (54)..(406): Homolog of NCBI NO: 19310377 NR Description: At2g46320/F11C10.1 [Arabidopsis thaliana]
  misc_feature (54)..(406): Homolog of NCBI NO: 25408981 NR Description: hypothetical protein At2g46320 [imported] - thaliana >gi|20197376|gb|AAM15049.1| hypothetical protein
  misc_feature (158)..(406): Homolog of NCBI NO: 30690327 NR Description: mitochondrial carrier protein family [Arabidopsis
  misc_feature (68)..(359): Homolog of NCBI NO: 7486963 NR Description: hypothetical protein T13J8.50 - Arabidopsis >gi|4455353|emb|CAB36763.1| putative protein [Arabidopsis >gi|7269648|emb|CAB79596.1| putative protein [Arabidopsis
  misc_feature (76)..(407): Homolog of NCBI NO: 31242839 NR Description: ENSANGP00000020264 [Anopheles gambiae]
  misc_feature (53)..(408): Homolog of NCBI NO: 28571261 NR Description: CG33075-PA [Drosophila melanogaster]
HFLSGGDVSSGATSPPSSWLFLLPRPSEFLRDFSALPPAGSSPRLRSHRGRPAMEQGQGPPPPKPPATERDIGFAERAVAAAGAAVVSAVLVNPLDVAKTRLQAQAAGVVYNPIWSDFRCYPSCSTGGINGLGPCSACSPECFQYRGTMDVFSKVTRQEGIFRLWRGTGASLALAVPTVGIYLPSYDLLRNWIEEYSDRNCPKLRPYAPLISGSIARSLACITCCPIELARTRMQAFKESNVGAKPPGMWKTLIGVLSSRQSIKSPENVRGYHLLWTGLGAQLARDAPYSAICWTVLEPIRRHVTRLFGDQSNATVILGANFSAGFIAGVISAGATCPLDVAKTRRQIEKDPERVLSMNTRRILLEVWRKEGVEGLFRGAGPRMGRAGPSVGIVVSSYEVVKHLMHKNTSNAADL

SEQ ID NO: 7221 - protein, 362 aa, Zea mays subsp. mays
  peptide (1)..(362): Ceres Seq. ID no. 12361442
  misc_feature (76)..(354): Homolog of NCBI NO: 34904154 NR Description: P0417G05.20 [Oryza sativa (japonica
  misc_feature (14)..(354): Homolog of NCBI NO: 40253478 NR Description: putative mitochondrial carrier protein [Oryza
  misc_feature (15)..(358): Homolog of NCBI NO: 18417093 NR Description: putative protein; protein id: At4g27940.1, by cDNA: 147875., supported by cDNA: gi_16226566 [Arabidopsis >gi|16226567|gb|AAL16202.1|AF428433_1 AT4g27940/T13J8_50
  misc_feature (1)..(353): Homolog of NCBI NO: 30690323 NR Description: mitochondrial carrier protein family [Arabidopsis
  misc_feature (1)..(353): Homolog of NCBI NO: 19310377 NR Description: At2g46320/F11C10.1 [Arabidopsis thaliana]
  misc_feature (1)..(353): Homolog of NCBI NO: 25408981 NR Description: hypothetical protein At2g46320 [imported] - thaliana >gi|20197376|gb|AAM15049.1| hypothetical protein
  misc_feature (105)..(353): Homolog of NCBI NO: 30690327 NR Description: mitochondrial carrier protein family [Arabidopsis
  misc_feature (15)..(306): Homolog of NCBI NO: 7486963 NR Description: hypothetical protein T13J8.50 - Arabidopsis >gi|4455353|emb|CAB36763.1| putative protein [Arabidopsis >gi|7269648|emb|CAB79596.1| putative protein [Arabidopsis
  misc_feature (23)..(354): Homolog of NCBI NO: 31242839 NR Description: ENSANGP00000020264 [Anopheles gambiae]
  misc_feature (1)..(355): Homolog of NCBI NO: 28571261 NR Description: CG33075-PA [Drosophila melanogaster]
MEQGQGPPPPKPPATERDIGFAERAVAAAGAAVVSAVLVNPLDVAKTRLQAQAAGVVYNPIWSDFRCYPSCSTGGINGLGPCSACSPECFQYRGTMDVFSKVTRQEGIFRLWRGTGASLALAVPTVGIYLPSYDLLRNWIEEYSDRNCPKLRPYAPLISGSIARSLACITCCPIELARTRMQAFKESNVGAKPPGMWKTLIGVLSSRQSIKSPENVRGYHLLWTGLGAQLARDAPYSAICWTVLEPIRRHVTRLFGDQSNATVILGANFSAGFIAGVISAGATCPLDVAKTRRQIEKDPERVLSMNTRRILLEVWRKEGVEGLFRGAGPRMGRAGPSVGIVVSSYEVVKHLMHKNTSNAADL

SEQ ID NO: 7222 - protein, 267 aa, Zea mays subsp. mays
  peptide (1)..(267): Ceres Seq. ID no. 12361443
  misc_feature (1)..(259): Homolog of NCBI NO: 34904154 NR Description: P0417G05.20 [Oryza sativa (japonica
  misc_feature (1)..(259): Homolog of NCBI NO: 40253478 NR Description: putative mitochondrial carrier protein [Oryza
  misc_feature (1)..(263): Homolog of NCBI NO: 18417093 NR Description: putative protein; protein id: At4g27940.1, by cDNA: 147875., supported by cDNA: gi_16226566 [Arabidopsis >gi|16226567|gb|AAL16202.1|AF428433_1 AT4g27940/T13J8_50
  misc_feature (1)..(258): Homolog of NCBI NO: 30690323 NR Description: mitochondrial carrier protein family [Arabidopsis
  misc_feature (1)..(258): Homolog of NCBI NO: 19310377 NR Description: At2g46320/F11C10.1 [Arabidopsis thaliana]
  misc_feature (1)..(258): Homolog of NCBI NO: 25408981 NR Description: hypothetical protein At2g46320 [imported] - thaliana >gi|20197376|gb|AAM15049.1| hypothetical protein
  misc_feature (10)..(258): Homolog of NCBI NO: 30690327 NR Description: mitochondrial carrier protein family [Arabidopsis
  misc_feature (1)..(211): Homolog of NCBI NO: 7486963 NR Description: hypothetical protein T13J8.50 - Arabidopsis >gi|4455353|emb|CAB36763.1| putative protein [Arabidopsis >gi|7269648|emb|CAB79596.1| putative protein [Arabidopsis
  misc_feature (1)..(259): Homolog of NCBI NO: 31242839 NR Description: ENSANGP00000020264 [Anopheles gambiae]
  misc_feature (1)..(260): Homolog of NCBI NO: 28571261 NR Description: CG33075-PA [Drosophila melanogaster]
MDVFSKVTRQEGIFRLWRGTGASLALAVPTVGIYLPSYDLLRNWIEEYSDRNCPKLRPYAPLISGSIARSLACITCCPIELARTRMQAFKESNVGAKPPGMWKTLIGVLSSRQSIKSPENVRGYHLLWTGLGAQLARDAPYSAICWTVLEPIRRHVTRLFGDQSNATVILGANFSAGFIAGVISAGATCPLDVAKTRRQIEKDPERVLSMNTRRILLEVWRKEGVEGLFRGAGPRMGRAGPSVGIVVSSYEVVKHLMHKNTSNAADL

SEQ ID NO: 7223 - DNA, 712 bp, Zea mays subsp. mays
  misc_feature (1)..(712): Ceres Seq. ID no. 12403665
  misc_feature: MA Experiment ID: 108689 Result: Up-regulated in Transcription
  misc_feature: MA Experiment 108689 PARAMETER Experiment Name: Zm_Drought_Roots_P Parameter: Age (day) Value: 9
  misc_feature: MA Experiment 108689 PARAMETER Experiment Name: Zm_Drought_Roots_P Parameter: Organism Value: Zea mays
  misc_feature: MA Experiment 108689 PARAMETER Experiment Name: Zm_Drought_Roots_P Parameter: Plant Line Value: 35A19
  misc_feature: MA Experiment 108689 PARAMETER Experiment Name: Zm_Drought_Roots_P Parameter: Timepoint (hr) Value: 24
  misc_feature: MA Experiment 108689 PARAMETER Experiment Name: Zm_Drought_Roots_P Parameter: Tissue Value: Roots
  misc_feature: MA Experiment 108689 PARAMETER Experiment Name: Zm_Drought_Roots_P Parameter: Treatment Value: Drought vs. No Drought
  misc_feature: MA Experiment ID: 20000479 Result: Up-regulated in Transcription
  misc_feature: MA Experiment 20000479 PARAMETER Experiment Name: Zm_Drought_P Parameter: Age (day) Value: 10
  misc_feature: MA Experiment 20000479 PARAMETER Experiment Name: Zm_Drought_P Parameter: Organism Value: Zea mays
  misc_feature: MA Experiment 20000479 PARAMETER Experiment Name: Zm_Drought_P Parameter: Plant Line Value: 35A19
  misc_feature: MA Experiment 20000479 PARAMETER Experiment Name: Zm_Drought_P Parameter: Timepoint (hr) Value: 48
  misc_feature: MA Experiment 20000479 PARAMETER Experiment Name: Zm_Drought_P Parameter: Tissue Value: Aerial
  misc_feature: MA Experiment 20000479 PARAMETER Experiment Name: Zm_Drought_P Parameter: Treatment Value: Drought vs. No Drought
  misc_feature: MA Experiment ID: 20000480 Result: Up-regulated in Transcription
  misc_feature: MA Experiment 20000480 PARAMETER Experiment Name: Zm_Drought_P Parameter: Age (day) Value: 11
  misc_feature: MA Experiment 20000480 PARAMETER Experiment Name: Zm_Drought_P Parameter: Organism Value: Zea mays
  misc_feature: MA Experiment 20000480 PARAMETER Experiment Name: Zm_Drought_P Parameter: Plant Line Value: 35A19
  misc_feature: MA Experiment 20000480 PARAMETER Experiment Name: Zm_Drought_P Parameter: Timepoint (hr) Value: 72
  misc_feature: MA Experiment 20000480 PARAMETER Experiment Name: Zm_Drought_P Parameter: Tissue Value: Aerial
  misc_feature: MA Experiment 20000480 PARAMETER Experiment Name: Zm_Drought_P Parameter: Treatment Value: Drought vs. No Drought
acattttcaggtggagatggaacacatttacccaccattatcaaatctccagaagcacgtggctggacattttttggttgggacattatgaagcataaaatgaagcaaaaaagttacaggaacaaggtgctacagaggtccgcagctgttctgggatatgcagcacatgcagtcttgctcatagcttgctatctagatgtccccctccgatatcccttgcgctttggagggtcccgatcttatgtgagtgatcgcttgccttcagctgatacagcatcatcggctgctttagcaagtaccaggaacaccgaatcagaactaacagaataccctcttttcctggaatgccaagacgatgactccactagtgcctcctatgccatttatttattgcacaaggatacggagcagcttctgaactatgttggagctgagagctgtggaaggcacgtgtttggtaacctacgagaacttcttaggatcgtgcagtctgataagtttgtgtacagatgatggttccaatccatgtggttttggagtgcttatgctgtagatgtattatagagatgtaagtaggtgtttttcttttctcttcccattctttcgtgtgattcattccctctttccctgcgctaggttttttatatgtgcaggaaataggcaattatgtttttctagagaaatgaaatgtactcacacgtatggcttcttg

SEQ ID NO: 7224 - protein, 170 aa, Zea mays subsp. mays
  peptide (1)..(170): Ceres Seq. ID no. 12403666
  misc_feature (42)..(168): Homolog of NCBI NO: 30685426 NR Description: expressed protein [Arabidopsis thaliana]
  misc_feature (42)..(133): Homolog of NCBI NO: 20197059 NR Description: hypothetical protein [Arabidopsis thaliana]
  misc_feature (42)..(133): Homolog of NCBI NO: 7486092 NR Description: hypothetical protein At2g32760 [imported] -
TFSGGDGTHLPTIIKSPEARGWTFFGWDIMKHKMKQKSYRNKVLQRSAAVLGYAAHAVLLIACYLDVPLRYPLRFGGSRSYVSDRLPSADTASSAALASTRNTESELTEYPLFLECQDDDSTSASYAIYLLHKDTEQLLNYVGAESCGRHVFGNLRELLRIVQSDKFVYR

SEQ ID NO: 7225 - protein, 141 aa, Zea mays subsp. mays
  peptide (1)..(141): Ceres Seq. ID no. 12403667
  misc_feature (13)..(139): Homolog of NCBI NO: 30685426 NR Description: expressed protein [Arabidopsis thaliana]
  misc_feature (13)..(104): Homolog of NCBI NO: 20197059 NR Description: hypothetical protein [Arabidopsis thaliana]
  misc_feature (13)..(104): Homolog of NCBI NO: 7486092 NR Description: hypothetical protein At2g32760 [imported] -
MKHKMKQKSYRNKVLQRSAAVLGYAAHAVLLIACYLDVPLRYPLRFGGSRSYVSDRLPSADTASSAALASTRNTESELTEYPLFLECQDDDSTSASYAIYLLHKDTEQLLNYVGAESCGRHVFGNLRELLRIVQSDKFVYR

SEQ ID NO: 7226 - protein, 137 aa, Zea mays subsp. mays
  peptide (1)..(137): Ceres Seq. ID no. 12403668
  misc_feature (9)..(135): Homolog of NCBI NO: 30685426 NR Description: expressed protein [Arabidopsis thaliana]
  misc_feature (9)..(100): Homolog of NCBI NO: 20197059 NR Description: hypothetical protein [Arabidopsis thaliana]
  misc_feature (9)..(100): Homolog of NCBI NO: 7486092 NR Description: hypothetical protein At2g32760 [imported] -
MKQKSYRNKVLQRSAAVLGYAAHAVLLIACYLDVPLRYPLRFGGSRSYVSDRLPSADTASSAALASTRNTESELTEYPLFLECQDDDSTSASYAIYLLHKDTEQLLNYVGAESCGRHVFGNLRELLRIVQSDKFVYR

SEQ ID NO: 7227 - DNA, 1062 bp, Zea mays subsp. mays
  misc_feature (1)..(1062): Ceres Seq. ID no. 12400985
  misc_feature: MA Experiment ID: 108523 Result: Up-regulated in Transcription
  misc_feature: MA Experiment 108523 PARAMETER Experiment Name: Zm_42deg_Heat_P Parameter: Age (day) Value: 8
  misc_feature: MA Experiment 108523 PARAMETER Experiment Name: Zm_42deg_Heat_P Parameter: Organism Value: Zea mays
  misc_feature: MA Experiment 108523 PARAMETER Experiment Name: Zm_42deg_Heat_P Parameter: Plant Line Value: 35A19
  misc_feature: MA Experiment 108523 PARAMETER Experiment Name: Zm_42deg_Heat_P Parameter: Temperature (deg C) Value: 42 vs. 22
  misc_feature: MA Experiment 108523 PARAMETER Experiment Name: Zm_42deg_Heat_P Parameter: Timepoint (hr) Value: 6
  misc_feature: MA Experiment 108523 PARAMETER Experiment Name: Zm_42deg_Heat_P Parameter: Tissue Value: Aerial
  misc_feature: MA Experiment ID: 108527 Result: Up-regulated in Transcription
  misc_feature: MA Experiment 108527 PARAMETER Experiment Name: Zm_5mM_NO_P Parameter: Age (day) Value: 8
  misc_feature: MA Experiment 108527 PARAMETER Experiment Name: Zm_5mM_NO_P Parameter: Organism Value: Zea mays
  misc_feature: MA Experiment 108527 PARAMETER Experiment Name: Zm_5mM_NO_P Parameter: Plant Line Value: 35A19
  misc_feature: MA Experiment 108527 PARAMETER Experiment Name: Zm_5mM_NO_P Parameter: Timepoint (hr) Value: 6
  misc_feature: MA Experiment 108527 PARAMETER Experiment Name: Zm_5mM_NO_P Parameter: Tissue Value: Aerial
  misc_feature: MA Experiment 108527 PARAMETER Experiment Name: Zm_5mM_NO_P Parameter: Treatment Value: 5mM NO vs. No Treatment
  misc_feature: MA Experiment ID: 108530 Result: Up-regulated in Transcription
  misc_feature: MA Experiment 108530 PARAMETER Experiment Name: Zm_Imbibed_Seeds_P Parameter: Age (day) Value: 6 vs. 2
  misc_feature: MA Experiment 108530 PARAMETER Experiment Name: Zm_Imbibed_Seeds_P Parameter: Organism Value: Zea mays
  misc_feature: MA Experiment 108530 PARAMETER Experiment Name: Zm_Imbibed_Seeds_P Parameter: Plant Line Value: 35A19
  misc_feature: MA Experiment 108530 PARAMETER Experiment Name: Zm_Imbibed_Seeds_P Parameter: Tissue Value: Aerial vs. Embryo
  misc_feature: MA Experiment ID: 108534 Result: Up-regulated in Transcription
  misc_feature: MA Experiment 108534 PARAMETER Experiment Name: Zm_4deg_Cold_P Parameter: Age (hr) Value: 8
  misc_feature: MA Experiment 108534 PARAMETER Experiment Name: Zm_4deg_Cold_P Parameter: Organism Value: Zea mays
  misc_feature: MA Experiment 108534 PARAMETER Experiment Name: Zm_4deg_Cold_P Parameter: Plant Line Value: 35A19
  misc_feature: MA Experiment 108534 PARAMETER Experiment Name: Zm_4deg_Cold_P Parameter: Temperature (deg C) Value: 4 vs. 22
  misc_feature: MA Experiment 108534 PARAMETER Experiment Name: Zm_4deg_Cold_P Parameter: Timepoint (hr) Value: 6
  misc_feature: MA Experiment 108534 PARAMETER Experiment Name: Zm_4deg_Cold_P Parameter: Tissue Value: Aerial
  misc_feature: MA Experiment ID: 108535 Result: Down-regulated in Transcription
  misc_feature: MA Experiment 108535 PARAMETER Experiment Name: Zm_Meristem_P Parameter: Age (day) Value: 8
  misc_feature: MA Experiment 108535 PARAMETER Experiment Name: Zm_Meristem_P Parameter: Organism Value: Zea mays
  misc_feature: MA Experiment 108535 PARAMETER Experiment Name: Zm_Meristem_P Parameter: Plant Line Value: 35A19
  misc_feature: MA Experiment 108535 PARAMETER Experiment Name: Zm_Meristem_P Parameter: Tissue Value: Root Meristem vs. Above Root Meristem
  misc_feature: MA Experiment ID: 108536 Result: Up-regulated in Transcription
  misc_feature: MA Experiment 108536 PARAMETER Experiment Name: Zm_Meristem_P Parameter: Age (day) Value: 8
  misc_feature: MA Experiment 108536 PARAMETER Experiment Name: Zm_Meristem_P Parameter: Organism Value: Zea mays
  misc_feature: MA Experiment 108536 PARAMETER Experiment Name: Zm_Meristem_P Parameter: Plant Line Value: 35A19
  misc_feature: MA Experiment 108536 PARAMETER Experiment Name: Zm_Meristem_P Parameter: Tissue Value: Shoot Meristem vs. Above Shoot Meristem
  misc_feature: MA Experiment ID: 108543 Result: Up-regulated in Transcription
  misc_feature: MA Experiment ID: 108599 Result: Down-regulated in Transcription
  misc_feature: MA Experiment 108599 PARAMETER Experiment Name: Zm_RT1_P Parameter: Age (day) Value: 11
  misc_feature: MA Experiment 108599 PARAMETER Experiment Name: Zm_RT1_P Parameter: Organism Value: Zea mays
  misc_feature: MA Experiment 108599 PARAMETER Experiment Name: Zm_RT1_P Parameter: Plant Line Value: rt1 mut vs. rt1 wt
  misc_feature: MA Experiment 108599 PARAMETER Experiment Name: Zm_RT1_P Parameter: Tissue Value: Roots
  misc_feature: MA Experiment ID: 20000532 Result: Up-regulated in Transcription
  misc_feature: MA Experiment 20000532 PARAMETER Experiment Name: Zm_0.001percent_MeJA_P Parameter: Age (day) Value: 10
  misc_feature: MA Experiment 20000532 PARAMETER Experiment Name: Zm_0.001percent_MeJA_P Parameter: Organism Value: Zea mays
  misc_feature: MA Experiment 20000532 PARAMETER Experiment Name: Zm_0.001percent_MeJA_P Parameter: Plant Line Value: 35A19
  misc_feature: MA Experiment 20000532 PARAMETER Experiment Name: Zm_0.001percent_MeJA_P Parameter: Timepoint (hr) Value: 48
  misc_feature: MA Experiment 20000532 PARAMETER Experiment Name: Zm_0.001percent_MeJA_P Parameter: Tissue Value: Aerial
  misc_feature: MA Experiment 20000532 PARAMETER Experiment Name: Zm_0.001percent_MeJA_P Parameter: Treatment Value: 0.001percent MeJA vs. No Treatment
  misc_feature: MA Experiment ID: 20000628 Result: Up-regulated in Transcription
  misc_feature: MA Experiment 20000628 PARAMETER Experiment Name: Zm_Herbicide-Treatments_P Parameter: Timepoint (hr) Value: 12
  misc_feature: MA Experiment 20000628 PARAMETER Experiment Name: Zm_Herbicide-Treatments_P Parameter: Tissue Value: Aerial
  misc_feature: MA Experiment 20000628 PARAMETER Experiment Name: Zm_Herbicide-Treatments_P Parameter: Treatment Value: Glean vs. No Treatment
agttcgaaaggttcaacttcaaacacactccaaactccaagcctcaataatctcgacctctgtaatgaccaagaagctcatctccatctccaccatggccgggaagcaaggttgcaaggagcagtccaatgatcggaggatccaggcttcgatccaaggagacgccaagagcgtggtggtggggttcggcggcaggctggtcacccgtgagcaggagcaggaggacgccatcatcgtcgcggcgctgcggcacgtggtgtccgggtacagcacgccgccgccggaggtcgtcgtcacggtggcgggcggggaggcgtgcgggacctgcggcatcgacgggtgcctcggctgcgacttcttcggggcgccggagctggcgcaggaggcagtggcctgcggcacatggcaggtggcgacgacggcgtcggtcgngggcgtgggcancggcggcggcgctgaggcccnnnnnnncgtaggnncaggaacatgtacnncggcgtgcggcagcggccgtggggcaagtgggcggcggagatccgcgatccnngnngcgcgcggcgcgcgtgtggctgggcacgttcgacaccgcggaggaggctgccagggcctacgactgcgccgcggtcgagttccgcggcccccgcgcgaagctcaacttcccgggccacgaggcgctgttccagggccacggcgacaccgcggcggcgaacaccgagacacagacgccgtcgccgtcgccgtcgccgggagagtggcagctgggcggcggagcaggagacgagctgtgggaaggtctacaggacctgatgaagcaggacgaggtggaccgctggctcgcgccggttttcggcgccgcgtctagtttttgagctattgtactgtgcacgcaagcgtggttactgacaggatcacagctagactgaccagcatatctagttggttcttttgtagcgtatttttttagggaaacatgattctttttttttgttgtcgtgtattgattgggatatagagagtttttttcctctcttgatggaagtagttggaaagctgtgttgatag

SEQ ID NO: 7228 - protein, 286 aa, Zea mays subsp. mays
  peptide (1)..(286): Ceres Seq. ID no. 12400986
  misc_feature (72)..(123): Homolog of NCBI NO: 15235365 NR Description: putative protein; protein id: At4g34410.1, by cDNA: gi_13272440, supported by cDNA: gi_17381277 [Arabidopsis
  misc_feature (144)..(144): Xaa is any aa, unknown or other
  misc_feature (148)..(148): Xaa is any aa, unknown or other
  misc_feature (155)..(155): Xaa is any aa, unknown or other
  misc_feature (156)..(156): Xaa is any aa, unknown or other
  misc_feature (157)..(157): Xaa is any aa, unknown or other
  misc_feature (159)..(159): Xaa is any aa, unknown or other
  misc_feature (160)..(160): Xaa is any aa, unknown or other
  misc_feature (164)..(164): Xaa is any aa, unknown or other
  misc_feature (165)..(165): Xaa is any aa, unknown or other
  misc_feature (182)..(182): Xaa is any aa, unknown or other
  misc_feature (183)..(183): Xaa is any aa, unknown or other
VRKVQLQTHSKLQASIISTSVMTKKLISISTMAGKQGCKEQSNDRRIQASIQGDAKSVVVGFGGRLVTREQEQEDAIIVAALRHVVSGYSTPPPEVVVTVAGGEACGTCGIDGCLGCDFFGAPELAQEAVACGTWQVATTASVXGVGXGGGAEAXXXVXXGTCXXACGSGRGASGRRRSAIXXARGARVAGHVRHRGGGCQGLRLRRGRVPRPPREAQLPGPRGAVPGPRRHRGGEHRDTDAVAVAVAGRVAAGRRSRRRAVGRSTGPDEAGRGGPLARAGFRRRV

SEQ ID NO: 7229 - protein, 265 aa, Zea mays subsp. mays
  peptide (1)..(265): Ceres Seq. ID no. 12400987
  misc_feature (51)..(102): Homolog of NCBI NO: 15235365 NR Description: putative protein; protein id: At4g34410.1, by cDNA: gi_13272440, supported by cDNA: gi_17381277 [Arabidopsis
  misc_feature (123)..(123): Xaa is any aa, unknown or other
  misc_feature (127)..(127): Xaa is any aa, unknown or other
  misc_feature (134)..(134): Xaa is any aa, unknown or other
  misc_feature (135)..(135): Xaa is any aa, unknown or other
  misc_feature (136)..(136): Xaa is any aa, unknown or other
  misc_feature (138)..(138): Xaa is any aa, unknown or other
  misc_feature (139)..(139): Xaa is any aa, unknown or other
  misc_feature (143)..(143): Xaa is any aa, unknown or other
  misc_feature (144)..(144): Xaa is any aa, unknown or other
  misc_feature (161)..(161): Xaa is any aa, unknown or other
  misc_feature (162)..(162): Xaa is any aa, unknown or other
MTKKLISISTMAGKQGCKEQSNDRRIQASIQGDAKSVVVGFGGRLVTREQEQEDAIIVAALRHVVSGYSTPPPEVVVTVAGGEACGTCGIDGCLGCDFFGAPELAQEAVACGTWQVATTASVXGVGXGGGAEAXXXVXXGTCXXACGSGRGASGRRRSAIXXARGARVAGHVRHRGGGCQGLRLRRGRVPRPPREAQLPGPRGAVPGPRRHRGGEHRDTDAVAVAVAGRVAAGRRSRRRAVGRSTGPDEAGRGGPLARAGFRRRV

SEQ ID NO: 7230 - protein, 255 aa, Zea mays subsp. mays
  peptide (1)..(255): Ceres Seq. ID no. 12400988
  misc_feature (41)..(92): Homolog of NCBI NO: 15235365 NR Description: putative protein; protein id: At4g34410.1, by cDNA: gi_13272440, supported by cDNA: gi_17381277 [Arabidopsis
  misc_feature (113)..(113): Xaa is any aa, unknown or other
  misc_feature (117)..(117): Xaa is any aa, unknown or other
  misc_feature (124)..(124): Xaa is any aa, unknown or other
  misc_feature (125)..(125): Xaa is any aa, unknown or other
  misc_feature (126)..(126): Xaa is any aa, unknown or other
  misc_feature (128)..(128): Xaa is any aa, unknown or other
  misc_feature (129)..(129): Xaa is any aa, unknown or other
  misc_feature (133)..(133): Xaa is any aa, unknown or other
  misc_feature (134)..(134): Xaa is any aa, unknown or other
  misc_feature (151)..(151): Xaa is any aa, unknown or other
  misc_feature (152)..(152): Xaa is any aa, unknown or other
MAGKQGCKEQSNDRRIQASIQGDAKSVVVGFGGRLVTREQEQEDAIIVAALRHVVSGYSTPPPEVVVTVAGGEACGTCGIDGCLGCDFFGAPELAQEAVACGTWQVATTASVXGVGXGGGAEAXXXVXXGTCXXACGSGRGASGRRRSAIXXARGARVAGHVRHRGGGCQGLRLRRGRVPRPPREAQLPGPRGAVPGPRRHRGGEHRDTDAVAVAVAGRVAAGRRSRRRAVGRSTGPDEAGRGGPLARAGFRRRV

SEQ ID NO: 7231 - DNA, 1101 bp, Zea mays subsp. mays
  misc_feature (1)..(1101): Ceres Seq. ID no. 12350018
  misc_feature: MA Experiment ID: 108544 Result: Down-regulated in Transcription
  misc_feature: MA Experiment ID: 108556 Result: Down-regulated in Transcription
  misc_feature: MA Experiment 108556 PARAMETER Experiment Name: Zm_Drought_P Parameter: Age (day) Value: 9
  misc_feature: MA Experiment 108556 PARAMETER Experiment Name: Zm_Drought_P Parameter: Organism Value: Zea mays
  misc_feature: MA Experiment 108556 PARAMETER Experiment Name: Zm_Drought_P Parameter: Plant Line Value: 35A19
  misc_feature: MA Experiment 108556 PARAMETER Experiment Name: Zm_Drought_P Parameter: Timepoint (hr) Value: 24
  misc_feature: MA Experiment 108556 PARAMETER Experiment Name: Zm_Drought_P Parameter: Tissue Value: Aerial
  misc_feature: MA Experiment 108556 PARAMETER Experiment Name: Zm_Drought_P Parameter: Treatment Value: Drought vs. No Drought
  misc_feature: MA Experiment ID: 20000477 Result: Down-regulated in Transcription
  misc_feature: MA Experiment 20000477 PARAMETER Experiment Name: Zm_5mM_SA_P Parameter: Age (day) Value: 10
  misc_feature: MA Experiment 20000477 PARAMETER Experiment Name: Zm_5mM_SA_P Parameter: Organism Value: Zea mays
  misc_feature: MA Experiment 20000477 PARAMETER Experiment Name: Zm_5mM_SA_P Parameter: Plant Line Value: 35A19
  misc_feature: MA Experiment 20000477 PARAMETER Experiment Name: Zm_5mM_SA_P Parameter: Timepoint (hr) Value: 48
  misc_feature: MA Experiment 20000477 PARAMETER Experiment Name: Zm_5mM_SA_P Parameter: Tissue Value: Aerial
  misc_feature: MA Experiment 20000477 PARAMETER Experiment Name: Zm_5mM_SA_P Parameter: Treatment Value: 5mM SA vs. No Treatment
  misc_feature: MA Experiment ID: 20000480 Result: Down-regulated in Transcription
  misc_feature: MA Experiment 20000480 PARAMETER Experiment Name: Zm_Drought_P Parameter: Age (day) Value: 11
  misc_feature: MA Experiment 20000480 PARAMETER Experiment Name: Zm_Drought_P Parameter: Organism Value: Zea mays
  misc_feature: MA Experiment 20000480 PARAMETER Experiment Name: Zm_Drought_P Parameter: Plant Line Value: 35A19
  misc_feature: MA Experiment 20000480 PARAMETER Experiment Name: Zm_Drought_P Parameter: Timepoint (hr) Value: 72
  misc_feature: MA Experiment 20000480 PARAMETER Experiment Name: Zm_Drought_P Parameter: Tissue Value: Aerial
  misc_feature: MA Experiment 20000480 PARAMETER Experiment Name: Zm_Drought_P Parameter: Treatment Value: Drought vs. No Drought
  misc_feature: MA Experiment ID: 20000492 Result: Up-regulated in Transcription
  misc_feature: MA Experiment 20000492 PARAMETER Experiment Name: Zm_Hybrid_Seed_Dev_P Parameter: DAP Value: 12
  misc_feature: MA Experiment 20000492 PARAMETER Experiment Name: Zm_Hybrid_Seed_Dev_P Parameter: Organism Value: Zea mays
  misc_feature: MA Experiment 20000492 PARAMETER Experiment Name: Zm_Hybrid_Seed_Dev_P Parameter: Plant Line Value: 35A19
  misc_feature: MA Experiment 20000492 PARAMETER Experiment Name: Zm_Hybrid_Seed_Dev_P Parameter: Tissue Value: Fert Kernel vs. Unfert Floret
  misc_feature: MA Experiment ID: 20000534 Result: Down-regulated in Transcription
  misc_feature: MA Experiment 20000534 PARAMETER Experiment Name: Zm_Hybrid_Pollen_P Parameter: Age (day) Value: 8
  misc_feature: MA Experiment 20000534 PARAMETER Experiment Name: Zm_Hybrid_Pollen_P Parameter: Organism Value: Zea mays
  misc_feature: MA Experiment 20000534 PARAMETER Experiment Name: Zm_Hybrid_Pollen_P Parameter: Plant Line Value: 35A19
  misc_feature: MA Experiment 20000534 PARAMETER Experiment Name: Zm_Hybrid_Pollen_P Parameter: Tissue Value: Pollen vs. Aerial
ctcccagcatccgtatccctccatcagtccctcgggccatccctagcttcatcccaattcttgttcgtgcagctgctcgtggcagcctgagaccaggcgcgaggatgctggcggtgttcagcggcgaggtggtggaggtgccggcggagctggtggcggcggggagccggacgccgtcgcccaagacgaaggcgtccgagctcgtcgcgcgcttcctggggaccagctgccccgccgccgtgtccgtgcgcctcgccgacctcggccacctcgcctactcccacgccaaccaggccctcctccgcccaaggtcgttcgcggcgaaggacgaggtgttctgcctgttcgagggggtgctggacaacctggggcggctgagccagcagtacgggctgtccaagggcgccaacgaggtgctcctggtcatcgaggcctacaaggcgctgcgggaccgggcgccgtacccggccagcctcatgctcgcgcagctcgccggcgcctacgccttcgtgctcttcgacgcgtccaccaactcgctcctcgtcgcgtcgggcggcgacgtgcccctcttctggggcgtcaccgccgacggctgcgtcgccttctccgacgacatcgacgtgctcaaaggctcctgcggcaagtccctcgcgcctttcccgcaaggttgcttctactctaatgcccttggaggattgaagtgctacgagaatcccaagaacaaagtgactgccgttcctgcaaacgaggaggaaatctgcggcgcaaccttccaggtggaaggggctacggtgctcacagcgctgcattaggagatgaggtgtcttcctccgtctccaggcctggactgggggcaactgtacatggtgcctggtggtgtaatgtaacataacggcaatggcatatgcagctgatcctggtctgcctgtatcatctcctcccacccgtaaagagaagttctttctgccgccatcgccatggtcagtcagagcttctctgctatagctgctggatgtgttgtgtgttgcgtctgtatcgtctctagtttgttcgacttacgtggaaacctgagatcagaccgggtatcgagcggctgcttgc

SEQ ID NO: 7232 - protein, 269 aa, Zea mays subsp. mays
  peptide (1)..(269): Ceres Seq. ID no. 12350019
  misc_feature (36)..(255): Homolog of NCBI NO: 7489671 NR Description: hypothetical protein wali7 - wheat (fragment)
  misc_feature (35)..(265): Homolog of NCBI NO: 15239658 NR Description: aluminium-induced protein - like; protein id: supported by cDNA: gi_14532643, supported by cDNA: gi_21280808
  misc_feature (35)..(267): Homolog of NCBI NO: 7488881 NR Description: hypothetical protein ARG10 - mung bean
  misc_feature (35)..(260): Homolog of NCBI NO: 7488440 NR Description: aluminum-induced protein - rape
  misc_feature (35)..(267): Homolog of NCBI NO: 13958130 NR Description: aluminium induced protein [Avicennia marina]
  misc_feature (35)..(267): Homolog of NCBI NO: 34541994 NR Description: Al-induced protein [Gossypium hirsutum]
  misc_feature (35)..(263): Homolog of NCBI NO: 20340249 NR Description: aluminum-induced protein-like protein
  misc_feature (22)..(260): Homolog of NCBI NO: 30017570 NR Description: unknown protein [Oryza sativa (japonica
  misc_feature (35)..(263): Homolog of NCBI NO: 15239993 NR Description: aluminum-induced protein-like; protein id: supported by cDNA: 12484., supported by cDNA: gi_15028024
  misc_feature (35)..(260): Homolog of NCBI NO: 15228883 NR Description: unknown protein; protein id: At3g22850.1, by cDNA: gi_18252900 [Arabidopsis thaliana] contains similarity to unknown
PSIRIPPSVPRAIPSFIPILVRAAARGSLRPGARMLAVFSGEVVEVPAELVAAGSRTPSPKTKASELVARFLGTSCPAAVSVRLADLGHLAYSHANQALLRPRSFAAKDEVFCLFEGVLDNLGRLSQQYGLSKGANEVLLVIEAYKALRDRAPYPASLMLAQLAGAYAFVLFDASTNSLLVASGGDVPLFWGVTADGCVAFSDDIDVLKGSCGKSLAPFPQGCFYSNALGGLKCYENPKNKVTAVPANEEEICGATFQVEGATVLTALH

SEQ ID NO: 7233 - protein, 235 aa, Zea mays subsp. mays
  peptide (1)..(235): Ceres Seq. ID no. 12350020
  misc_feature (2)..(221): Homolog of NCBI NO: 7489671 NR Description: hypothetical protein wali7 - wheat (fragment)
  misc_feature (1)..(231): Homolog of NCBI NO: 15239658 NR Description: aluminium-induced protein - like; protein id: supported by cDNA: gi_14532643, supported by cDNA: gi_21280808
  misc_feature (1)..(233): Homolog of NCBI NO: 7488881 NR Description: hypothetical protein ARG10 - mung bean
  misc_feature (1)..(226): Homolog of NCBI NO: 7488440 NR Description: aluminum-induced protein - rape
  misc_feature (1)..(233): Homolog of NCBI NO: 13958130 NR Description: aluminium induced protein [Avicennia marina]
  misc_feature (1)..(233): Homolog of NCBI NO: 34541994 NR Description: Al-induced protein [Gossypium hirsutum]
  misc_feature (1)..(229): Homolog of NCBI NO: 20340249 NR Description: aluminum-induced protein-like protein
  misc_feature (1)..(226): Homolog of NCBI NO: 30017570 NR Description: unknown protein [Oryza sativa (japonica
  misc_feature (1)..(229): Homolog of NCBI NO: 15239993 NR Description: aluminum-induced protein-like; protein id: supported by cDNA: 12484., supported by cDNA: gi_15028024
  misc_feature (1)..(226): Homolog of NCBI NO: 15228883 NR Description: unknown protein; protein id: At3g22850.1, by cDNA: gi_18252900 [Arabidopsis thaliana] contains similarity to unknown
MLAVFSGEVVEVPAELVAAGSRTPSPKTKASELVARFLGTSCPAAVSVRLADLGHLAYSHANQALLRPRSFAAKDEVFCLFEGVLDNLGRLSQQYGLSKGANEVLLVIEAYKALRDRAPYPASLMLAQLAGAYAFVLFDASTNSLLVASGGDVPLFWGVTADGCVAFSDDIDVLKGSCGKSLAPFPQGCFYSNALGGLKCYENPKNKVTAVPANEEEICGATFQVEGATVLTALH

SEQ ID NO: 7234 - DNA, 743 bp, Zea mays subsp. mays
  misc_feature (1)..(743): Ceres Seq. ID no. 12343252
  misc_feature: MA Experiment ID: 108556 Result: Down-regulated in Transcription
  misc_feature: MA Experiment 108556 PARAMETER Experiment Name: Zm_Drought_P Parameter: Age (day) Value: 9
  misc_feature: MA Experiment 108556 PARAMETER Experiment Name: Zm_Drought_P Parameter: Organism Value: Zea mays
  misc_feature: MA Experiment 108556 PARAMETER Experiment Name: Zm_Drought_P Parameter: Plant Line Value: 35A19
  misc_feature: MA Experiment 108556 PARAMETER Experiment Name: Zm_Drought_P Parameter: Timepoint (hr) Value: 24
  misc_feature: MA Experiment 108556 PARAMETER Experiment Name: Zm_Drought_P Parameter: Tissue Value: Aerial
  misc_feature: MA Experiment 108556 PARAMETER Experiment Name: Zm_Drought_P Parameter: Treatment Value: Drought vs. No Drought
  misc_feature: MA Experiment ID: 20001606 Result: Up-regulated in Transcription
  misc_feature: MA Experiment 20001606 PARAMETER Experiment Name: Zm_50ppm_KNO3_L-to-H_P Parameter: Age (day) Value: 19
  misc_feature: MA Experiment 20001606 PARAMETER Experiment Name: Zm_50ppm_KNO3_L-to-H_P Parameter: Organism Value: Zea mays
  misc_feature: MA Experiment 20001606 PARAMETER Experiment Name: Zm_50ppm_KNO3_L-to-H_P Parameter: Plant Line Value: 35A19
  misc_feature: MA Experiment 20001606 PARAMETER Experiment Name: Zm_50ppm_KNO3_L-to-H_P Parameter: Timepoint (hr) Value: 8
  misc_feature: MA Experiment 20001606 PARAMETER Experiment Name: Zm_50ppm_KNO3_L-to-H_P Parameter: Tissue Value: Shoots
  misc_feature: MA Experiment 20001606 PARAMETER Experiment Name: Zm_50ppm_KNO3_L-to-H_P Parameter: Treatment Value: 50ppm KNO3 vs. 50ppm KCl
aaaaaagccaaaagcccgaaaccagaggcgggtagggttctagctgcaggcgacggccatggccgcctccgccgccgccccggcgctgcttcgacgcctcttctgcagctctattccagcctcctcctccgtactgcgcgctaccttttgctcctccgccggcttcggctcgtcttctccgtcctccatattcggcgacgccaccgaggtcgccaacgtgccaccgctcaccacgcccaacctcttcgtcagtggcctttcaaggttaacgacagatgagaagctccagggtgcatttgctcctttcgggaggctccttgaagcaaaagtggtgacggatagagtttctgggaggtcaaagggtttcggtttcgtgagatatgccaccatagaagaggccgagagagcgcggcaggagatgaacgccaagttcctggatggatgggtcatcttcgttgaccctgccaagccaaggcagccaaagcccgctcctcagcaggacactggttcatcgcatgctggcttcacgacgaacaagactgtaggatggtgcggctaggctcattgatctgtcgcgatatttcacggcacaaaacttggattgcaggggtggatctaggggtgttagtcacccggataaaatttataaattctttagaaaaacacagttaaagttcaagaaaatttgtatcatgtagcaaacctgaccttgctacccgataatatttttggttagattcgcc

SEQ ID NO: 7235 - protein, 166 aa, Zea mays subsp. mays
  peptide (1)..(166): Ceres Seq. ID no. 12343253
  misc_feature (62)..(133): Pfam Name: RNA recognition motif. (a.k.a. RRM, RBD, or RNP domain) Pfam Description: RNA recognition motif. (a.k.a. RRM, RBD, or RNP
  misc_feature (38)..(165): Homolog of NCBI NO: 15224298 NR Description: RRM-containing protein; protein id: At2g37510.1,
  misc_feature (1)..(160): Homolog of NCBI NO: 15239676 NR Description: RRM-containing protein; protein id: At5g54580.1, by cDNA: 14044., supported by cDNA: gi_18175761, supported by gi_20465512 [Arabidopsis thaliana] >gi|9758950|dbj|BAB09337.1|
  misc_feature (55)..(149): Homolog of NCBI NO: 38636774 NR Description: putative RNA recognition motif (RRM)-containing
  misc_feature (56)..(153): Homolog of NCBI NO: 34898598 NR Description: P0534A03.25 [Oryza sativa (japonica
  misc_feature (37)..(145): Homolog of NCBI NO: 18402803 NR Description: expressed protein; protein id: At3g20930.1, by cDNA: 112006., supported by cDNA: gi_20466723 [Arabidopsis >gi|20466724|gb|AAM20679.1| unknown protein [Arabidopsis
  misc_feature (59)..(139): Homolog of NCBI NO: 38344030 NR Description: OJ991214_12.1 [Oryza sativa (japonica
  misc_feature (31)..(148): Homolog of NCBI NO: 15219486 NR Description: RRM-containing RNA-binding protein, putative;
  misc_feature (62)..(140): Homolog of NCBI NO: 15239958 NR Description: RRM-containing protein; protein id: At5g06210.1, by cDNA: 36764., supported by cDNA: gi_17065275, supported by gi_20260001 [Arabidopsis thaliana] >gi|9759319|dbj|BAB09686.1|
  misc_feature (29)..(141): Homolog of NCBI NO: 34906972 NR Description: putative glycine-rich RNA-binding protein 2
  misc_feature (63)..(139): Homolog of NCBI NO: 21388658 NR Description: glycine-rich RNA binding protein [Physcomitrella
MAASAAAPALLRRLFCSSIPASSSVLRATFCSSAGFGSSSPSSIFGDATEVANVPPLTTPNLFVSGLSRLTTDEKLQGAFAPFGRLLEAKVVTDRVSGRSKGFGFVRYATIEEAERARQEMNAKFLDGWVIFVDPAKPRQPKPAPQQDTGSSHAGFTTNKTVGWCG

SEQ ID NO: 7236 - protein, 92 aa, Zea mays subsp. mays
  peptide (1)..(92): Ceres Seq. ID no. 12343254
KKAKSPKPEAGRVLAAGDGHGRLRRRPGAASTPLLQLYSSLLLRTARYLLLLRRLRLVFSVLHIRRRHRGRQRATAHHAQPLRQWPFKVNDR

SEQ ID NO: 7237 - DNA, 654 bp, Zea mays subsp. mays
  misc_feature (1)..(654): Ceres Seq. ID no. 12401179
  misc_feature: MA Experiment ID: 108527 Result: Up-regulated in Transcription
  misc_feature: MA Experiment 108527 PARAMETER Experiment Name: Zm_5mM_NO_P Parameter: Age (day) Value: 8
  misc_feature: MA Experiment 108527 PARAMETER Experiment Name: Zm_5mM_NO_P Parameter: Organism Value: Zea mays
  misc_feature: MA Experiment 108527 PARAMETER Experiment Name: Zm_5mM_NO_P Parameter: Plant Line Value: 35A19
  misc_feature: MA Experiment 108527 PARAMETER Experiment Name: Zm_5mM_NO_P Parameter: Timepoint (hr) Value: 6
  misc_feature: MA Experiment 108527 PARAMETER Experiment Name: Zm_5mM_NO_P Parameter: Tissue Value: Aerial
  misc_feature: MA Experiment 108527 PARAMETER Experiment Name: Zm_5mM_NO_P Parameter: Treatment Value: 5mM NO vs. No Treatment
  misc_feature: MA Experiment ID: 20000535 Result: Down-regulated in Transcription
  misc_feature: MA Experiment 20000535 PARAMETER Experiment Name: Zm_Hybrid_Seed_Dev_P Parameter: DAP Value: 30 vs. 12
  misc_feature: MA Experiment 20000535 PARAMETER Experiment Name: Zm_Hybrid_Seed_Dev_P Parameter: Organism Value: Zea mays
  misc_feature: MA Experiment 20000535 PARAMETER Experiment Name: Zm_Hybrid_Seed_Dev_P Parameter: Plant Line Value: 35A19
  misc_feature: MA Experiment 20000535 PARAMETER Experiment Name: Zm_Hybrid_Seed_Dev_P Parameter: Tissue Value: Embryo vs. Unfert Floret
  misc_feature: MA Experiment ID: 20000627 Result: Up-regulated in Transcription
  misc_feature: MA Experiment 20000627 PARAMETER Experiment Name: Zm_Herbicide-Treatments_P Parameter: Timepoint (hr) Value: 12
  misc_feature: MA Experiment 20000627 PARAMETER Experiment Name: Zm_Herbicide-Treatments_P Parameter: Tissue Value: Aerial
  misc_feature: MA Experiment 20000627 PARAMETER Experiment Name: Zm_Herbicide-Treatments_P Parameter: Treatment Value: Finale vs. No Treatment
aagactggcgaaacgcgttgttttcctcttttccccaaggcaaccaaaccatctcgattctcgactcgtggggaagtttcgctctcgccggcgtcgacggcctagggttcgaggaacgtccgtccgtccgtccggggaaggagcggtagggaggcggagatgatcgaggtggtgctcaacgaccgcctggggaagaaggtgcgggtcaagtgcaacgaggacgacaccatcggcgacctcaagaagctggtggcggcgcagacgggggacgcgccccgagaagatccgcatccagaagtggtacaacatctacaaggaccacatcaccctcaaggactacgaggtccacgacggcatgggcctcgagctctactacaactgagccgccgcccctctctccctctcgtcaggttggtctgaattctgaagtcatgggtgcaattcgcttcgcggtgatctcttaagctcatcacatatataaaagcaacctcagtgggctatgtaagacatggcgtgccaaactatcagtgaccactgacagctttgcaatacgttgttgtatggtcaacctgcaaacttggtgtactgctactcgtactataaataacatagggttttaaccttggttgtggtaatggtcatcttttctcattc

SEQ ID NO: 7238 - protein, 86 aa, Zea mays subsp. mays
  peptide (1)..(86): Ceres Seq. ID no. 12401180
  misc_feature (1)..(41): Homolog of NCBI NO: 15230632 NR Description: putative protein; protein id: At3g45180.1
  misc_feature (1)..(36): Homolog of NCBI NO: 15238924 NR Description: ubiquitin-like protein; protein id: At5g42300.1, by cDNA: gi_13899064, supported by cDNA: gi_18377565 [Arabidopsis
  misc_feature (1)..(36): Homolog of NCBI NO: 23482066 NR Description: ubiquitin-like protein [Plasmodium yoelii yoelii]
  misc_feature (1)..(36): Homolog of NCBI NO: 23509060 NR Description: ubiquitin-like protein, putative [Plasmodium
  misc_feature (1)..(36): Homolog of NCBI NO: 40889756 NR Description: Chain A, Solution Structure Of The Murine
  misc_feature (1)..(36): Homolog of NCBI NO: 38492721 NR Description: Chain A, Solution Structure Of Ubl5 A Human
  misc_feature (1)..(36): Homolog of NCBI NO: 13236510 NR Description: ubiquitin-like 5 [Homo sapiens]
  misc_feature (1)..(36): Homolog of NCBI NO: 30585153 NR Description: Homo sapiens ubiquitin-like 5 [synthetic
  misc_feature (1)..(36): Homolog of NCBI NO: 33416599 NR Description: Unknown (protein for MGC:66388) [Danio rerio]
  misc_feature (1)..(36): Homolog of NCBI NO: 17507389 NR Description: UBiquitin-Like family UBL-5 (8.7 kD) (ubl-5)
MIEVVLNDRLGKKVRVKCNEDDTIGDLKKLVAAQTGDAPREDPHPEVVQHLQGPHHPQGLRGPRRHGPRALLQLSRRPSLPLVRLV

SEQ ID NO: 7239 - protein, 53 aa, Zea mays subsp. mays
  peptide (1)..(53): Ceres Seq. ID no. 12401181
RLAKRVVFLFSPRQPNHLDSRLVGKFRSRRRRRPRVRGTSVRPSGEGAVGRRR

SEQ ID NO: 7240 - protein, 48 aa, Zea mays subsp. mays
  peptide (1)..(48): Ceres Seq. ID no. 12401182
DWRNALFSSFPQGNQTISILDSWGSFALAGVDGLGFEERPSVRPGKER

SEQ ID NO: 7241 - DNA, 712 bp, Zea mays subsp. mays
  misc_feature (1)..(712): Ceres Seq. ID no. 12343010
  misc_feature: MA Experiment ID: 108535 Result: Up-regulated in Transcription
  misc_feature: MA Experiment 108535 PARAMETER Experiment Name: Zm_Meristem_P Parameter: Age (day) Value: 8
  misc_feature: MA Experiment 108535 PARAMETER Experiment Name: Zm_Meristem_P Parameter: Organism Value: Zea mays
  misc_feature: MA Experiment 108535 PARAMETER Experiment Name: Zm_Meristem_P Parameter: Plant Line Value: 35A19
  misc_feature: MA Experiment 108535 PARAMETER Experiment Name: Zm_Meristem_P Parameter: Tissue Value: Root Meristem vs. Above Root Meristem
  misc_feature: MA Experiment ID: 108544 Result: Down-regulated in Transcription
  misc_feature: MA Experiment ID: 108556 Result: Down-regulated in Transcription
  misc_feature: MA Experiment 108556 PARAMETER Experiment Name: Zm_Drought_P Parameter: Age (day) Value: 9
  misc_feature: MA Experiment 108556 PARAMETER Experiment Name: Zm_Drought_P Parameter: Organism Value: Zea mays
  misc_feature: MA Experiment 108556 PARAMETER Experiment Name: Zm_Drought_P Parameter: Plant Line Value: 35A19
  misc_feature: MA Experiment 108556 PARAMETER Experiment Name: Zm_Drought_P Parameter: Timepoint (hr) Value: 24
  misc_feature: MA Experiment 108556 PARAMETER Experiment Name: Zm_Drought_P Parameter: Tissue Value: Aerial
  misc_feature: MA Experiment 108556 PARAMETER Experiment Name: Zm_Drought_P Parameter: Treatment Value: Drought vs. No Drought
  misc_feature: MA Experiment ID: 20000477 Result: Down-regulated in Transcription
  misc_feature: MA Experiment 20000477 PARAMETER Experiment Name: Zm_5mM_SA_P Parameter: Age (day) Value: 10
  misc_feature: MA Experiment 20000477 PARAMETER Experiment Name: Zm_5mM_SA_P Parameter: Organism Value: Zea mays
  misc_feature: MA Experiment 20000477 PARAMETER Experiment Name: Zm_5mM_SA_P Parameter: Plant Line Value: 35A19
  misc_feature: MA Experiment 20000477 PARAMETER Experiment Name: Zm_5mM_SA_P Parameter: Timepoint (hr) Value: 48
  misc_feature: MA Experiment 20000477 PARAMETER Experiment Name: Zm_5mM_SA_P Parameter: Tissue Value: Aerial
  misc_feature: MA Experiment 20000477 PARAMETER Experiment Name: Zm_5mM_SA_P Parameter: Treatment Value: 5mM SA vs. No Treatment
  misc_feature: MA Experiment ID: 20000478 Result: Down-regulated in Transcription
  misc_feature: MA Experiment 20000478 PARAMETER Experiment Name: Zm_5mM_SA_P Parameter: Age (day) Value: 11
  misc_feature: MA Experiment 20000478 PARAMETER Experiment Name: Zm_5mM_SA_P Parameter: Organism Value: Zea mays
  misc_feature: MA Experiment 20000478 PARAMETER Experiment Name: Zm_5mM_SA_P Parameter: Plant Line Value: 35A19
  misc_feature: MA Experiment 20000478 PARAMETER Experiment Name: Zm_5mM_SA_P Parameter: Timepoint (hr) Value: 72
  misc_feature: MA Experiment 20000478 PARAMETER Experiment Name: Zm_5mM_SA_P Parameter: Tissue Value: Aerial
  misc_feature: MA Experiment 20000478 PARAMETER Experiment Name: Zm_5mM_SA_P Parameter: Treatment Value: 5mM SA vs. No Treatment
  misc_feature: MA Experiment ID: 20000479 Result: Down-regulated in Transcription
  misc_feature: MA Experiment 20000479 PARAMETER Experiment Name: Zm_Drought_P Parameter: Age (day) Value: 10
  misc_feature: MA Experiment 20000479 PARAMETER Experiment Name: Zm_Drought_P Parameter: Organism Value: Zea mays
  misc_feature: MA Experiment 20000479 PARAMETER Experiment Name: Zm_Drought_P Parameter: Plant Line Value: 35A19
  misc_feature: MA Experiment 20000479 PARAMETER Experiment Name: Zm_Drought_P Parameter: Timepoint (hr) Value: 48
  misc_feature: MA Experiment 20000479 PARAMETER Experiment Name: Zm_Drought_P Parameter: Tissue Value: Aerial
  misc_feature: MA Experiment 20000479 PARAMETER Experiment Name: Zm_Drought_P Parameter: Treatment Value: Drought vs. No Drought
  misc_feature: MA Experiment ID: 20000480 Result: Down-regulated in Transcription
  misc_feature: MA Experiment 20000480 PARAMETER Experiment Name: Zm_Drought_P Parameter: Age (day) Value: 11
  misc_feature: MA Experiment 20000480 PARAMETER Experiment Name: Zm_Drought_P Parameter: Organism Value: Zea mays
  misc_feature: MA Experiment 20000480 PARAMETER Experiment Name: Zm_Drought_P Parameter: Plant Line Value: 35A19
  misc_feature: MA Experiment 20000480 PARAMETER Experiment Name: Zm_Drought_P Parameter: Timepoint (hr) Value: 72
  misc_feature: MA Experiment 20000480 PARAMETER Experiment Name: Zm_Drought_P Parameter: Tissue Value: Aerial
  misc_feature: MA Experiment 20000480 PARAMETER Experiment Name: Zm_Drought_P Parameter: Treatment Value: Drought vs. No Drought
  misc_feature: MA Experiment ID: 20000492 Result: Up-regulated in Transcription
  misc_feature: MA Experiment 20000492 PARAMETER Experiment Name: Zm_Hybrid_Seed_Dev_P Parameter: DAP Value: 12
  misc_feature: MA Experiment 20000492 PARAMETER Experiment Name: Zm_Hybrid_Seed_Dev_P Parameter: Organism Value: Zea mays
  misc_feature: MA Experiment 20000492 PARAMETER Experiment Name: Zm_Hybrid_Seed_Dev_P Parameter: Plant Line Value: 35A19
  misc_feature: MA Experiment 20000492 PARAMETER Experiment Name: Zm_Hybrid_Seed_Dev_P Parameter: Tissue Value: Fert Kernel vs. Unfert Floret
  misc_feature: MA Experiment ID: 20000535 Result: Up-regulated in Transcription
  misc_feature: MA Experiment 20000535 PARAMETER Experiment Name: Zm_Hybrid_Seed_Dev_P Parameter: DAP Value: 30 vs. 12
  misc_feature: MA Experiment 20000535 PARAMETER Experiment Name: Zm_Hybrid_Seed_Dev_P Parameter: Organism Value: Zea mays
  misc_feature: MA Experiment 20000535 PARAMETER Experiment Name: Zm_Hybrid_Seed_Dev_P Parameter: Plant Line Value: 35A19
  misc_feature: MA Experiment 20000535 PARAMETER Experiment Name: Zm_Hybrid_Seed_Dev_P Parameter: Tissue Value: Embryo vs. Unfert Floret
gctagcggtccgcacccactcacccgttgcctccaaactcatttctcccgagcgccgccgcgagcctctgttccagcttcgttcatggcttccctcaccggatccgctctctcctttgcgaggcccgtcaaggcaatcagcattaagtctgtctctttctctggtctaaggaaggataatgtagccttccgcttgcagccagtgccacaaagattcgctgtctgctgtcctgctaaaaaggagactgtggatcgggtttgtgatattgtcaagaagcagcttgcacttcctgagggcactgaggtctgtggctcctctaagtttcaagacctcggtgctgattcgttggacactgttgagattgttatgggccttgaggaggctttcaagatcactgtagaggagtcgagcgcgcagtcaatcgcaactgtggaagatgctgctaatctcatcgacgaacttgttgcaggagcagcaaaatcgtgttaaactcgtggtcgtattgcgttgggtgctgtaccagggcatcacttgttgttctatgcccccttccctactagattttcttttctaccctgggcctggagagatgtttctgtcatgactgtcattgtggatctcgcgatattgttatattgaagcttttgtgcttgttcaagaaaagaaaatgttgttgcgatatatatgttattatattgaatttttttttgtc

SEQ ID NO: 7242 - protein, 162 aa, Zea mays subsp. mays
  peptide (1)..(162): Ceres Seq. ID no. 12343011
  misc_feature (84)..(151): Pfam Name: Phosphopantetheine attachment site Pfam Description: Phosphopantetheine attachment site
  misc_feature (29)..(155): Homolog of NCBI NO: 113169 NR Description: Acyl carrier protein II, chloroplast precursor
  misc_feature (29)..(161): Homolog of NCBI NO: 113172 NR Description: Acyl carrier protein III, chloroplast precursor
  misc_feature (51)..(161): Homolog of NCBI NO: 166975 NR Description: acyl carrier protein III precursor
  misc_feature (43)..(159): Homolog of NCBI NO: 7442270 NR Description: acyl carrier protein - maize acyl carrier protein [Zea mays] >gi|228957|prf||1814481A acyl
  misc_feature (29)..(155): Homolog of NCBI NO: 2465010 NR Description: acyl carrier protein [Fragaria vesca]
  misc_feature (50)..(154): Homolog of NCBI NO: 30102979 NR Description: putative acyl carrier protein, 3'-partial [Oryza
  misc_feature (29)..(155): Homolog of NCBI NO: 20137323 NR Description: Acyl carrier protein 1, chloroplast precursor
  misc_feature (29)..(159): Homolog of NCBI NO: 16518983 NR Description: acyl carrier protein [Olea europaea]
  misc_feature (26)..(155): Homolog of NCBI NO: 113165 NR Description: Acyl carrier protein I, chloroplast precursor
  misc_feature (29)..(154): Homolog of NCBI NO: 5669599 NR Description: acyl carrier protein [Coriandrum sativum]
ASGPHPLTRCLQTHFSRAPPRASVPASFMASLTGSALSFARPVKAISIKSVSFSGLRKDNVAFRLQPVPQRFAVCCPAKKETVDRVCDIVKKQLALPEGTEVCGSSKFQDLGADSLDTVEIVMGLEEAFKITVEESSAQSIATVEDAANLIDELVAGAAKSC

SEQ ID NO: 7243 - protein, 134 aa, Zea mays subsp. mays
  peptide (1)..(134): Ceres Seq. ID no. 12343012
  misc_feature (56)..(123): Pfam Name: Phosphopantetheine attachment site Pfam Description: Phosphopantetheine attachment site
  misc_feature (1)..(127): Homolog of NCBI NO: 113169 NR Description: Acyl carrier protein II, chloroplast precursor
  misc_feature (1)..(133): Homolog of NCBI NO: 113172 NR Description: Acyl carrier protein III, chloroplast precursor
  misc_feature (23)..(133): Homolog of NCBI NO: 166975 NR Description: acyl carrier protein III precursor
  misc_feature (15)..(131): Homolog of NCBI NO: 7442270 NR Description: acyl carrier protein - maize acyl carrier protein [Zea mays] >gi|228957|prf||1814481A acyl
  misc_feature (1)..(127): Homolog of NCBI NO: 2465010 NR Description: acyl carrier protein [Fragaria vesca]
  misc_feature (22)..(126): Homolog of NCBI NO: 30102979 NR Description: putative acyl carrier protein, 3'-partial [Oryza
  misc_feature (1)..(127): Homolog of NCBI NO: 20137323 NR Description: Acyl carrier protein 1, chloroplast precursor
  misc_feature (1)..(131): Homolog of NCBI NO: 16518983 NR Description: acyl carrier protein [Olea europaea]
  misc_feature (1)..(127): Homolog of NCBI NO: 113165 NR Description: Acyl carrier protein I, chloroplast precursor
  misc_feature (1)..(126): Homolog of NCBI NO: 5669599 NR Description: acyl carrier protein [Coriandrum sativum]
MASLTGSALSFARPVKAISIKSVSFSGLRKDNVAFRLQPVPQRFAVCCPAKKETVDRVCDIVKKQLALPEGTEVCGSSKFQDLGADSLDTVEIVMGLEEAFKITVEESSAQSIATVEDAANLIDELVAGAAKSC

SEQ ID NO: 7244 - DNA, 1024 bp, Zea mays subsp. mays
  misc_feature (1)..(1024): Ceres Seq. ID no. 12462326
  misc_feature: MA Experiment ID: 108523 Result: Up-regulated in Transcription
  misc_feature: MA Experiment 108523 PARAMETER Experiment Name: Zm_42deg_Heat_P Parameter: Age (day) Value: 8
  misc_feature: MA Experiment 108523 PARAMETER Experiment Name: Zm_42deg_Heat_P Parameter: Organism Value: Zea mays
  misc_feature: MA Experiment 108523 PARAMETER Experiment Name: Zm_42deg_Heat_P Parameter: Plant Line Value: 35A19
  misc_feature: MA Experiment 108523 PARAMETER Experiment Name: Zm_42deg_Heat_P Parameter: Temperature (deg C) Value: 42 vs. 22
  misc_feature: MA Experiment 108523 PARAMETER Experiment Name: Zm_42deg_Heat_P Parameter: Timepoint (hr) Value: 6
  misc_feature: MA Experiment 108523 PARAMETER Experiment Name: Zm_42deg_Heat_P Parameter: Tissue Value: Aerial
  misc_feature: MA Experiment ID: 108528 Result: Up-regulated in Transcription
  misc_feature: MA Experiment 108528 PARAMETER Experiment Name: Zm_Imbibed_Seeds_P Parameter: Age (day) Value: 5 vs. 2
  misc_feature: MA Experiment 108528 PARAMETER Experiment Name: Zm_Imbibed_Seeds_P Parameter: Organism Value: Zea mays
  misc_feature: MA Experiment 108528 PARAMETER Experiment Name: Zm_Imbibed_Seeds_P Parameter: Plant Line Value: 35A19
  misc_feature: MA Experiment 108528 PARAMETER Experiment Name: Zm_Imbibed_Seeds_P Parameter: Tissue Value: Aerial vs. Embryo
  misc_feature: MA Experiment ID: 108530 Result: Up-regulated in Transcription
  misc_feature: MA Experiment 108530 PARAMETER Experiment Name: Zm_Imbibed_Seeds_P Parameter: Age (day) Value: 6 vs. 2
  misc_feature: MA Experiment 108530 PARAMETER Experiment Name: Zm_Imbibed_Seeds_P Parameter: Organism Value: Zea mays
  misc_feature: MA Experiment 108530 PARAMETER Experiment Name: Zm_Imbibed_Seeds_P Parameter: Plant Line Value: 35A19
  misc_feature: MA Experiment 108530 PARAMETER Experiment Name: Zm_Imbibed_Seeds_P Parameter: Tissue Value: Aerial vs. Embryo
  misc_feature: MA Experiment ID: 108543 Result: Down-regulated in Transcription
  misc_feature: MA Experiment ID: 108545 Result: Up-regulated in Transcription
  misc_feature: MA Experiment 108545 PARAMETER Experiment Name: Zm_Imbibed_Seeds_P Parameter: Age (day) Value: 3 vs. 2
  misc_feature: MA Experiment 108545 PARAMETER Experiment Name: Zm_Imbibed_Seeds_P Parameter: Organism Value: Zea mays
  misc_feature: MA Experiment 108545 PARAMETER Experiment Name: Zm_Imbibed_Seeds_P Parameter: Plant Line Value: 35A19
  misc_feature: MA Experiment 108545 PARAMETER Experiment Name: Zm_Imbibed_Seeds_P Parameter: Tissue Value: Aerial vs. Embryo
  misc_feature: MA Experiment ID: 108547 Result: Up-regulated in Transcription
  misc_feature: MA Experiment 108547 PARAMETER Experiment Name: Zm_Imbibed_Seeds_P Parameter: Age (day) Value: 4 vs. 2
  misc_feature: MA Experiment 108547 PARAMETER Experiment Name: Zm_Imbibed_Seeds_P Parameter: Organism Value: Zea mays
  misc_feature: MA Experiment 108547 PARAMETER Experiment Name: Zm_Imbibed_Seeds_P Parameter: Plant Line Value: 35A19
  misc_feature: MA Experiment 108547 PARAMETER Experiment Name: Zm_Imbibed_Seeds_P Parameter: Tissue Value: Aerial vs. Embryo
  misc_feature: MA Experiment ID: 108688 Result: Down-regulated in Transcription
  misc_feature: MA Experiment 108688 PARAMETER Experiment Name: Zm_Embryos-Flowers__P Parameter: Tissue Value: Immature Flowers vs. Aerial+
  misc_feature: MA Experiment ID: 20000478 Result: Up-regulated in Transcription
  misc_feature: MA Experiment 20000478 PARAMETER Experiment Name: Zm_5mM_SA_P Parameter: Age (day) Value: 11
  misc_feature: MA Experiment 20000478 PARAMETER Experiment Name: Zm_5mM_SA_P Parameter: Organism Value: Zea mays
  misc_feature: MA Experiment 20000478 PARAMETER Experiment Name: Zm_5mM_SA_P Parameter: Plant Line Value: 35A19
  misc_feature: MA Experiment 20000478 PARAMETER Experiment Name: Zm_5mM_SA_P Parameter: Timepoint (hr) Value: 72
  misc_feature: MA Experiment 20000478 PARAMETER Experiment Name: Zm_5mM_SA_P Parameter: Tissue Value: Aerial
  misc_feature: MA Experiment 20000478 PARAMETER Experiment Name: Zm_5mM_SA_P Parameter: Treatment Value: 5mM SA vs. No Treatment
  misc_feature: MA Experiment ID: 20000535 Result: Down-regulated in Transcription
  misc_feature: MA Experiment 20000535 PARAMETER Experiment Name: Zm_Hybrid_Seed_Dev_P Parameter: DAP Value: 30 vs. 12
  misc_feature: MA Experiment 20000535 PARAMETER Experiment Name: Zm_Hybrid_Seed_Dev_P Parameter: Organism Value: Zea mays
  misc_feature: MA Experiment 20000535 PARAMETER Experiment Name: Zm_Hybrid_Seed_Dev_P Parameter: Plant Line Value: 35A19
  misc_feature: MA Experiment 20000535 PARAMETER Experiment Name: Zm_Hybrid_Seed_Dev_P Parameter: Tissue Value: Embryo vs. Unfert Floret
gcttctagcaagagcacgaacgagggccaagcgctccaaaaccagcgacgtggaagcgcctgcgccgcgagcatccttcctgagcgcggggccaagcagagcagtgcaagcagcatatggcgcgccgtgccagcctgctcctcgccgcggcgctgctcgtcgccgtcgctgccgcggcggtgccgccgacgtgcgagcgcatcgagtgcccggcgtacgaggtggtggacagcgccaacgggttcgagatccggcggtacacggacgccatgtggatcaccacggcgcccatcgaggacatctccttcgtcgccgccacgcgcaccggcttcctacagctgttcgactacatccagggcaagaacgcgtacaaccagacgatcgagatgacggcgccggtgctgacgcgggtgtcgcccagcgacgggcccttctgcgcctccgccttcgccgtgagcttctacgtgccggccaagaaccaggcggacccgccgccggccgagggcctgcgcgtggaccgctgggccggggccaggtacgcggccgtgcgccgcttcgggggcttcgtggcggacgccgacgtcggggagcaggcggcgcggctcgaggccagcctccagggcacccggtgggccgccgccgtcaacgacgcgcgcagggccgacccggcctcgccctacaccgtcgcgcagtacaactcgcccttcgagttcaccggcagggtcaacgagatctggatgctcttcgacgcggacgacgacgccagtatgtgatgcgattccaagcgtgctctcggggcactgaggcgtttagggaaggacgcgcatgcacctgtgcagtgcagctgtgctaccatgaagtatttcgtgctcttgtgcgctagcttcgtttactttcgacttttcgagtaaggaataaggtgcctcttgttgcaataatgataaagctaatcctgcttgtaattacatttcgtggcatggccattccggcaacatgtccagtaaaaaaaaactttttagtttcg

SEQ ID NO: 7245 - protein, 293 aa, Zea mays subsp. mays
  peptide (1)..(293): Ceres Seq. ID no. 12462327
  misc_feature (46)..(276): Pfam Name: HlyD family secretion protein Pfam Description: HlyD family secretion protein
LLARARTRAKRSKTSDVEAPAPRASFLSAGPSRAVQAAYGAPCQPAPRRGAARRRRCRGGAADVRAHRVPGVRGGGQRQRVRDPAVHGRHVDHHGAHRGHLLRRRHAHRLPTAVRLHPGQERVQPDDRDDGAGADAGVAQRRALLRLRLRRELLRAGQEPGGPAAGRGPARGPLGRGQVRGRAPLRGLRGGRRRRGAGGAARGQPPGHPVGRRRQRRAQGRPGLALHRRAVQLALRVHRQGQRDLDALRRGRRRQYVMRFQACSRGTEAFREGRACTCAVQLCYHEVFRALVR

SEQ ID NO: 7246 - protein, 218 aa, Zea mays subsp. mays
  peptide (1)..(218): Ceres Seq. ID no. 12462328
  misc_feature (28)..(211): Pfam Name: SOUL heme-binding protein Pfam Description: SOUL heme-binding protein
  misc_feature (1)..(218): Homolog of NCBI NO: 34903864 NR Description: unnamed protein product [Oryza sativa (japonica group)] >gi|8096573|dbj|BAA96146.1| unnamed protein product
  misc_feature (23)..(213): Homolog of NCBI NO: 15220033 NR Description: SOUL-like protein; protein id: At1g17100.1, by cDNA: 29992. [Arabidopsis thaliana] >gi|25372687|pir||G86306
  misc_feature (21)..(218): Homolog of NCBI NO: 18411970 NR Description: expressed protein; protein id: At1g78450.1, by cDNA: 5677. [Arabidopsis thaliana] >gi|25372685|pir||H96812
  misc_feature (21)..(218): Homolog of NCBI NO: 21593898 NR Description: SOUL-like protein [Arabidopsis thaliana]
  misc_feature (1)..(213): Homolog of NCBI NO: 34904402 NR Description: unnamed protein product [Oryza sativa (japonica group)] >gi|7339697|dbj|BAA92902.1| unnamed protein product
  misc_feature (23)..(211): Homolog of NCBI NO: 15218357 NR Description: hypothetical protein; protein id: At1g78460.1
  misc_feature (29)..(213): Homolog of NCBI NO: 28278449 NR Description: Similar to heme binding protein 2 [Danio rerio]
  misc_feature (20)..(209): Homolog of NCBI NO: 7657603 NR Description: heme binding protein 2; putative heme-binding chromosome 6 open reading frame 34 [Homo sapiens]
  misc_feature (27)..(209): Homolog of NCBI NO: 27731687 NR Description: similar to heme binding protein 2; putative
  misc_feature (43)..(209): Homolog of NCBI NO: 15778345 NR Description: C6ORF34B [Homo sapiens]
MARRASLLLAAALLVAVAAAAVPPTCERIECPAYEVVDSANGFEIRRYTDAMWITTAPIEDISFVAATRTGFLQLFDYIQGKNAYNQTIEMTAPVLTRVSPSDGPFCASAFAVSFYVPAKNQADPPPAEGLRVDRWAGARYAAVRRFGGFVADADVGEQAARLEASLQGTRWAAAVNDARRADPASPYTVAQYNSPFEFTGRVNEIWMLFDADDDASM

SEQ ID NO: 7247 - protein, 167 aa, Zea mays subsp. mays
  peptide (1)..(167): Ceres Seq. ID no. 12462329
  misc_feature (1)..(160): Pfam Name: SOUL heme-binding protein Pfam Description: SOUL heme-binding protein
  misc_feature (1)..(167): Homolog of NCBI NO: 34903864 NR Description: unnamed protein product [Oryza sativa (japonica group)] >gi|8096573|dbj|BAA96146.1| unnamed protein product
  misc_feature (1)..(162): Homolog of NCBI NO: 15220033 NR Description: SOUL-like protein; protein id: At1g17100.1, by cDNA: 29992. [Arabidopsis thaliana] >gi|25372687|pir||G86306
  misc_feature (1)..(167): Homolog of NCBI NO: 18411970 NR Description: expressed protein; protein id: At1g78450.1, by cDNA: 5677. [Arabidopsis thaliana] >gi|25372685|pir||H96812
  misc_feature (1)..(167): Homolog of NCBI NO: 21593898 NR Description: SOUL-like protein [Arabidopsis thaliana]
  misc_feature (1)..(162): Homolog of NCBI NO: 34904402 NR Description: unnamed protein product [Oryza sativa (japonica group)] >gi|7339697|dbj|BAA92902.1| unnamed protein product
  misc_feature (1)..(160): Homolog of NCBI NO: 15218357 NR Description: hypothetical protein; protein id: At1g78460.1
  misc_feature (1)..(162): Homolog of NCBI NO: 28278449 NR Description: Similar to heme binding protein 2 [Danio rerio]
  misc_feature (1)..(158): Homolog of NCBI NO: 7657603 NR Description: heme binding protein 2; putative heme-binding chromosome 6 open reading frame 34 [Homo sapiens]
  misc_feature (1)..(158): Homolog of NCBI NO: 27731687 NR Description: similar to heme binding protein 2; putative
  misc_feature (1)..(158): Homolog of NCBI NO: 15778345 NR Description: C6ORF34B [Homo sapiens]
MWITTAPIEDISFVAATRTGFLQLFDYIQGKNAYNQTIEMTAPVLTRVSPSDGPFCASAFAVSFYVPAKNQADPPPAEGLRVDRWAGARYAAVRRFGGFVADADVGEQAARLEASLQGTRWAAAVNDARRADPASPYTVAQYNSPFEFTGRVNEIWMLFDADDDASM

SEQ ID NO: 7248 - DNA, 761 bp, Zea mays subsp. mays
  misc_feature (1)..(761): Ceres Seq. ID no. 12401903
  misc_feature: MA Experiment ID: 108528 Result: Up-regulated in Transcription
  misc_feature: MA Experiment 108528 PARAMETER Experiment Name: Zm_Imbibed_Seeds_P Parameter: Age (day) Value: 5 vs. 2
  misc_feature: MA Experiment 108528 PARAMETER Experiment Name: Zm_Imbibed_Seeds_P Parameter: Organism Value: Zea mays
  misc_feature: MA Experiment 108528 PARAMETER Experiment Name: Zm_Imbibed_Seeds_P Parameter: Plant Line Value: 35A19
  misc_feature: MA Experiment 108528 PARAMETER Experiment Name: Zm_Imbibed_Seeds_P Parameter: Tissue Value: Aerial vs. Embryo
  misc_feature: MA Experiment ID: 108530 Result: Up-regulated in Transcription
  misc_feature: MA Experiment 108530 PARAMETER Experiment Name: Zm_Imbibed_Seeds_P Parameter: Age (day) Value: 6 vs. 2
  misc_feature: MA Experiment 108530 PARAMETER Experiment Name: Zm_Imbibed_Seeds_P Parameter: Organism Value: Zea mays
  misc_feature: MA Experiment 108530 PARAMETER Experiment Name: Zm_Imbibed_Seeds_P Parameter: Plant Line Value: 35A19
  misc_feature: MA Experiment 108530 PARAMETER Experiment Name: Zm_Imbibed_Seeds_P Parameter: Tissue Value: Aerial vs. Embryo
  misc_feature: MA Experiment ID: 108536 Result: Down-regulated in Transcription
  misc_feature: MA Experiment 108536 PARAMETER Experiment Name: Zm_Meristem_P Parameter: Age (day) Value: 8
  misc_feature: MA Experiment 108536 PARAMETER Experiment Name: Zm_Meristem_P Parameter: Organism Value: Zea mays
  misc_feature: MA Experiment 108536 PARAMETER Experiment Name: Zm_Meristem_P Parameter: Plant Line Value: 35A19
  misc_feature: MA Experiment 108536 PARAMETER Experiment Name: Zm_Meristem_P Parameter: Tissue Value: Shoot Meristem vs. Above Shoot Meristem
  misc_feature: MA Experiment ID: 108543 Result: Up-regulated in Transcription
  misc_feature: MA Experiment ID: 108545 Result: Up-regulated in Transcription
  misc_feature: MA Experiment 108545 PARAMETER Experiment Name: Zm_Imbibed_Seeds_P Parameter: Age (day) Value: 3 vs. 2
  misc_feature: MA Experiment 108545 PARAMETER Experiment Name: Zm_Imbibed_Seeds_P Parameter: Organism Value: Zea mays
  misc_feature: MA Experiment 108545 PARAMETER Experiment Name: Zm_Imbibed_Seeds_P Parameter: Plant Line Value: 35A19
  misc_feature: MA Experiment 108545 PARAMETER Experiment Name: Zm_Imbibed_Seeds_P Parameter: Tissue Value: Aerial vs. Embryo
  misc_feature: MA Experiment ID: 108547 Result: Up-regulated in Transcription
  misc_feature: MA Experiment 108547 PARAMETER Experiment Name: Zm_Imbibed_Seeds_P Parameter: Age (day) Value: 4 vs. 2
  misc_feature: MA Experiment 108547 PARAMETER Experiment Name: Zm_Imbibed_Seeds_P Parameter: Organism Value: Zea mays
  misc_feature: MA Experiment 108547 PARAMETER Experiment Name: Zm_Imbibed_Seeds_P Parameter: Plant Line Value: 35A19
  misc_feature: MA Experiment 108547 PARAMETER Experiment Name: Zm_Imbibed_Seeds_P Parameter: Tissue Value: Aerial vs. Embryo
  misc_feature: MA Experiment ID: 108687 Result: Down-regulated in Transcription
  misc_feature: MA Experiment 108687 PARAMETER Experiment Name: Zm_Embryos-Flowers__P Parameter: Tissue Value: Embryo vs. Aerial+
  misc_feature: MA Experiment ID: 108688 Result: Down-regulated in Transcription
  misc_feature: MA Experiment 108688 PARAMETER Experiment Name: Zm_Embryos-Flowers__P Parameter: Tissue Value: Immature Flowers vs. Aerial+
  misc_feature: MA Experiment ID: 20000492 Result: Down-regulated in Transcription
  misc_feature: MA Experiment 20000492 PARAMETER Experiment Name: Zm_Hybrid_Seed_Dev_P Parameter: DAP Value: 12
  misc_feature: MA Experiment 20000492 PARAMETER Experiment Name: Zm_Hybrid_Seed_Dev_P Parameter: Organism Value: Zea mays
  misc_feature: MA Experiment 20000492 PARAMETER Experiment Name: Zm_Hybrid_Seed_Dev_P Parameter: Plant Line Value: 35A19
  misc_feature: MA Experiment 20000492 PARAMETER Experiment Name: Zm_Hybrid_Seed_Dev_P Parameter: Tissue Value: Fert Kernel vs. Unfert Floret
ctctcgtatcaattctccaagcgcggtgccgcgccgagcgaagaagctcgtctcgtctccatggcggccgcagcggtggccgtctccacctctgtgtgcacgtcctcaaggcgtagcacgggctgtccgaacgtgaggccccaggcccgtccgctcctaggcaggccgtcgccgcgccggaggctgcagacggccttggccgcgacgggcaagacgccgggcgaggcggangancaggtncccgcgtgggccaagcccggcgcggacgagccgccaccctgggagcgcgagggcggggccgcgcgtggacaggaggcccngcaggtccccttctacnngtacctgctcgcgtccacgatcaccgccatcgccgcgatcggctccatcttcgagtacaccaaccagcggccggtgttcgggatcgtcggccccgacagcgccctgtacgcgccgntcctgggcttcttcgtacttcaccggcatccnnanntccgcgtttctgtggttcaaggccgtgcagacggcgaacagagaggccgaggagcaagaccgcagagacggattcctgtgagaggctgtgggtgactccggcgcactcgccggtgccgtcgccgtgcagaannacgcgcaccgcaccaccggtattcgcagcgacgggtgacgggtncatgttgtcatgttatgtatgtncggtgtactgtatactagaatttgagagagcggatggatttgcggcacaaatncagagaaaatatattaat

SEQ ID NO: 7249 - protein, 194 aa, Zea mays subsp. mays
  peptide (1)..(194): Ceres Seq. ID no. 12401904
  misc_feature (21)..(158): Homolog of NCBI NO: 15230505 NR Description: putative protein; protein id: At3g51510.1, by cDNA: 10009., supported by cDNA: gi_15027916, supported by gi_15450642, supported by cDNA: gi_20259288 [Arabidopsis
  misc_feature (77)..(77): Xaa is any aa, unknown or other
  misc_feature (78)..(78): Xaa is any aa, unknown or other
  misc_feature (80)..(80): Xaa is any aa, unknown or other
  misc_feature (107)..(107): Xaa is any aa, unknown or other
  misc_feature (113)..(113): Xaa is any aa, unknown or other
  misc_feature (152)..(152): Xaa is any aa, unknown or other
  misc_feature (162)..(162): Xaa is any aa, unknown or other
  misc_feature (163)..(163): Xaa is any aa, unknown or other
  misc_feature (164)..(164): Xaa is any aa, unknown or other
LSYQFSKRGAAPSEEARLVSMAAAAVAVSTSVCTSSRRSTGCPNVRPQARPLLGRPSPRRRLQTALAATGKTPGEAXXQXPAWAKPGADEPPPWEREGGAARGQEAXQVPFYXYLLASTITAIAAIGSIFEYTNQRPVFGIVGPDSALYAPXLGFFVLHRHXXXRVSVVQGRADGEQRGRGARPQRRIPVRGCG

SEQ ID NO: 7250 - protein, 174 aa, Zea mays subsp. mays
  peptide (1)..(174): Ceres Seq. ID no. 12401905
  misc_feature (1)..(138): Homolog of NCBI NO: 15230505 NR Description: putative protein; protein id: At3g51510.1, by cDNA: 10009., supported by cDNA: gi_15027916, supported by gi_15450642, supported by cDNA: gi_20259288 [Arabidopsis
  misc_feature (57)..(57): Xaa is any aa, unknown or other
  misc_feature (58)..(58): Xaa is any aa, unknown or other
  misc_feature (60)..(60): Xaa is any aa, unknown or other
  misc_feature (87)..(87): Xaa is any aa, unknown or other
  misc_feature (93)..(93): Xaa is any aa, unknown or other
  misc_feature (132)..(132): Xaa is any aa, unknown or other
  misc_feature (142)..(142): Xaa is any aa, unknown or other
  misc_feature (143)..(143): Xaa is any aa, unknown or other
  misc_feature (144)..(144): Xaa is any aa, unknown or other
MAAAAVAVSTSVCTSSRRSTGCPNVRPQARPLLGRPSPRRRLQTALAATGKTPGEAXXQXPAWAKPGADEPPPWEREGGAARGQEAXQVPFYXYLLASTITAIAAIGSIFEYTNQRPVFGIVGPDSALYAPXLGFFVLHRHXXXRVSVVQGRADGEQRGRGARPQRRIPVRGCG

SEQ ID NO: 7251 - DNA, 1086 bp, Zea mays subsp. mays
  misc_feature (1)..(1086): Ceres Seq. ID no. 12401172
  misc_feature: MA Experiment ID: 108527 Result: Up-regulated in Transcription
  misc_feature: MA Experiment 108527 PARAMETER Experiment Name: Zm_5mM_NO_P Parameter: Age (day) Value: 8
  misc_feature: MA Experiment 108527 PARAMETER Experiment Name: Zm_5mM_NO_P Parameter: Organism Value: Zea mays
  misc_feature: MA Experiment 108527 PARAMETER Experiment Name: Zm_5mM_NO_P Parameter: Plant Line Value: 35A19
  misc_feature: MA Experiment 108527 PARAMETER Experiment Name: Zm_5mM_NO_P Parameter: Timepoint (hr) Value: 6
  misc_feature: MA Experiment 108527 PARAMETER Experiment Name: Zm_5mM_NO_P Parameter: Tissue Value: Aerial
  misc_feature: MA Experiment 108527 PARAMETER Experiment Name: Zm_5mM_NO_P Parameter: Treatment Value: 5mM NO vs. No Treatment
  misc_feature: MA Experiment ID: 108559 Result: Up-regulated in Transcription
  misc_feature: MA Experiment 108559 PARAMETER Experiment Name: Zm_5mM_NO_P Parameter: Age (day) Value: 8
  misc_feature: MA Experiment 108559 PARAMETER Experiment Name: Zm_5mM_NO_P Parameter: Organism Value: Zea mays
  misc_feature: MA Experiment 108559 PARAMETER Experiment Name: Zm_5mM_NO_P Parameter: Plant Line Value: 35A19
  misc_feature: MA Experiment 108559 PARAMETER Experiment Name: Zm_5mM_NO_P Parameter: Timepoint (hr) Value: 12
  misc_feature: MA Experiment 108559 PARAMETER Experiment Name: Zm_5mM_NO_P Parameter: Tissue Value: Aerial
  misc_feature: MA Experiment 108559 PARAMETER Experiment Name: Zm_5mM_NO_P Parameter: Treatment Value: 5mM NO vs. No Treatment
atttattttcttcccccactccatcttggagaagaagaacaaggaggagaaggcaaaagaaggccgacgcgctcgccgctgctaccgaaatcggccagacattccccaaaccctacgctcgctcgctcgccggagccctcgttgaaccgagcaggcgggcgaaggaggctcgacgatgttccgcaaccagtacgacaccgacgtgaccacgtggagcccccaggggcggctcttccaggtggagtacgccatggaggccgtcaagcagggctccgcctgcgtggggctccggtcccgcacccacgccgtcctcgccgccgtcaacaagcctgcctccgagctctcctcctaccagcggaaggtgttccgcgtcgccgaccacgccggggtcgcgctcgccggcctcaccgccgacggccgcgtcctctcgcgcttcctccgcaacgagtgcatcaaccactccttcgtctacgaggcgccgctccccgtctccaggctcgcgctcaggctcgccgacaaggcgcaggtttgcacacagcggtcatggaagaggccctacggcgtgggcctcctcgttgccggactggacgagtcaggagcccacctgtactacaactgccccagcgggaactacttcgagtaccaggcgttcgccatcggctcccgctcccaagccgctaagacgttcctggagcgcaggttccagggctacgacgactacaccccggagcagctcgtcagggacgctctctccgccgtgaaggagacgctgcagggcgagaagctgtccggatccaactgcaccgtggccatcgtcggcaggaaggacgacggcaccgtcgagccgttcgaggtgatcggcacggcgagggtccaggaacttatcgactccatggagatggaggtcgccgagcaggcaccgcctccggaggctgctgctgctagctcctccatgcaggaggagggggagaggggctcggatgacgctgctgcacccatggacatctagagggctgggatagggggagactcatatgaaacccgtacactgcattccgagttccaaaagactaagaccacttcttt

SEQ ID NO: 7252 - protein, 277 aa, Zea mays subsp. mays
  peptide (1)..(277): Ceres Seq. ID no. 12401173
  misc_feature (29)..(214): Pfam Name: Proteasome A-type and B-type Pfam Description: Proteasome A-type and B-type
  misc_feature (1)..(277): Homolog of NCBI NO: 1709758 NR Description: Proteasome subunit alpha type 1 (20S proteasome
  misc_feature (1)..(277): Homolog of NCBI NO: 22947842 NR Description: 20S proteasome alpha 6 subunit [Nicotiana
  misc_feature (1)..(277): Homolog of NCBI NO: 21537234 NR Description: 20S proteasome subunit PAF1 [Arabidopsis thaliana]
  misc_feature (1)..(277): Homolog of NCBI NO: 25290066 NR Description: C 3.4.25.1 proteasome endopeptidase complex ()
  misc_feature (1)..(277): Homolog of NCBI NO: 15220151 NR Description: 20S proteasome alpha subunit F2 (PAF2); protein At1g47250.1, supported by cDNA: gi_16323090, supported by cDNA: [Arabidopsis thaliana] >gi|12229892|sp|O23712|PS12_ARATH complex
  misc_feature (1)..(277): Homolog of NCBI NO: 15239061 NR Description: 20S proteasome alpha subunit F1 (PAF1); protein At5g42790.1, supported by cDNA: 12455., supported by cDNA: supported by cDNA: gi_16648703 [Arabidopsis thaliana] (20S
  misc_feature (11)..(277): Homolog of NCBI NO: 2511586 NR Description: multicatalytic endopeptidase [Arabidopsis
  misc_feature (6)..(162): Homolog of NCBI NO: 14594923 NR Description: putative alpha6 proteasome subunit [Nicotiana
  misc_feature (1)..(243): Homolog of NCBI NO: 12229911 NR Description: Proteasome subunit alpha type 1 (Proteasome
  misc_feature (1)..(263): Homolog of NCBI NO: 33563282 NR Description: proteasome (prosome, macropain) subunit, alpha alpha type 1 (Proteasome component C2) (Macropain subunit C2)
MFRNQYDTDVTTWSPQGRLFQVEYAMEAVKQGSACVGLRSRTHAVLAAVNKPASELSSYQRKVFRVADHAGVALAGLTADGRVLSRFLRNECINHSFVYEAPLPVSRLALRLADKAQVCTQRSWKRPYGVGLLVAGLDESGAHLYYNCPSGNYFEYQAFAIGSRSQAAKTFLERRFQGYDDYTPEQLVRDALSAVKETLQGEKLSGSNCTVAIVGRKDDGTVEPFEVIGTARVQELIDSMEMEVAEQAPPPEAAAASSSMQEEGERGSDDAAAPMDI

SEQ ID NO: 7253 - protein, 252 aa, Zea mays subsp. mays
  peptide (1)..(252): Ceres Seq. ID no. 12401174
  misc_feature (4)..(189): Pfam Name: Proteasome A-type and B-type Pfam Description: Proteasome A-type and B-type
  misc_feature (1)..(252): Homolog of NCBI NO: 1709758 NR Description: Proteasome subunit alpha type 1 (20S proteasome
  misc_feature (1)..(252): Homolog of NCBI NO: 22947842 NR Description: 20S proteasome alpha 6 subunit [Nicotiana
  misc_feature (1)..(252): Homolog of NCBI NO: 21537234 NR Description: 20S proteasome subunit PAF1 [Arabidopsis thaliana]
  misc_feature (1)..(252): Homolog of NCBI NO: 25290066 NR Description: C 3.4.25.1 proteasome endopeptidase complex ()
  misc_feature (1)..(252): Homolog of NCBI NO: 15220151 NR Description: 20S proteasome alpha subunit F2 (PAF2); protein At1g47250.1, supported by cDNA: gi_16323090, supported by cDNA: [Arabidopsis thaliana] >gi|12229892|sp|O23712|PS12_ARATH complex
  misc_feature (1)..(252): Homolog of NCBI NO: 15239061 NR Description: 20S proteasome alpha subunit F1 (PAF1); protein At5g42790.1, supported by cDNA: 12455., supported by cDNA: supported by cDNA: gi_16648703 [Arabidopsis thaliana] (20S
  misc_feature (1)..(252): Homolog of NCBI NO: 2511586 NR Description: multicatalytic endopeptidase [Arabidopsis
  misc_feature (1)..(137): Homolog of NCBI NO: 14594923 NR Description: putative alpha6 proteasome subunit [Nicotiana
  misc_feature (1)..(218): Homolog of NCBI NO: 12229911 NR Description: Proteasome subunit alpha type 1 (Proteasome
  misc_feature (1)..(238): Homolog of NCBI NO: 33563282 NR Description: proteasome (prosome, macropain) subunit, alpha alpha type 1 (Proteasome component C2) (Macropain subunit C2)
MEAVKQGSACVGLRSRTHAVLAAVNKPASELSSYQRKVFRVADHAGVALAGLTADGRVLSRFLRNECINHSFVYEAPLPVSRLALRLADKAQVCTQRSWKRPYGVGLLVAGLDESGAHLYYNCPSGNYFEYQAFAIGSRSQAAKTFLERRFQGYDDYTPEQLVRDALSAVKETLQGEKLSGSNCTVAIVGRKDDGTVEPFEVIGTARVQELIDSMEMEVAEQAPPPEAAAASSSMQEEGERGSDDAAAPMDI

SEQ ID NO: 7254 - protein, 226 aa, Zea mays subsp. mays
  peptide (1)..(226): Ceres Seq. ID no. 12401175
IYFLPPLHLGEEEQGGEGKRRPTRSPLLPKSARHSPNPTLARSPEPSLNRAGGRRRLDDVPQPVRHRRDHVEPPGAALPGGVRHGGRQAGLRLRGAPVPHPRRPRRRQQACLRALLLPAEGVPRRRPRRGRARRPHRRRPRPLALPPQRVHQPLLRLRGAAPRLQARAQARRQGAGLHTAVMEEALRRGPPRCRTGRVRSPPVLQLPQRELLRVPGVRHRLPLPSR

SEQ ID NO: 7255 - DNA, 890 bp, Zea mays subsp. mays; identical to SEQ ID NO: 3402
  misc_feature (1)..(890): Ceres Seq. ID no. 12595102
  misc_feature: MA Experiment ID: 108543 Result: Down-regulated in Transcription
  misc_feature: MA Experiment ID: 108544 Result: Down-regulated in Transcription
  misc_feature: MA Experiment ID: 108556 Result: Down-regulated in Transcription
  misc_feature: MA Experiment 108556 PARAMETER Experiment Name: Zm_Drought_P Parameter: Age (day) Value: 9
  misc_feature: MA Experiment 108556 PARAMETER Experiment Name: Zm_Drought_P Parameter: Organism Value: Zea mays
  misc_feature: MA Experiment 108556 PARAMETER Experiment Name: Zm_Drought_P Parameter: Plant Line Value: 35A19
  misc_feature: MA Experiment 108556 PARAMETER Experiment Name: Zm_Drought_P Parameter: Timepoint (hr) Value: 24
  misc_feature: MA Experiment 108556 PARAMETER Experiment Name: Zm_Drought_P Parameter: Tissue Value: Aerial
  misc_feature: MA Experiment 108556 PARAMETER Experiment Name: Zm_Drought_P Parameter: Treatment Value: Drought vs. No Drought
  misc_feature: MA Experiment ID: 20000487 Result: Up-regulated in Transcription
  misc_feature: MA Experiment 20000487 PARAMETER Experiment Name: Zm_50mM_NH4NO3_L_to_H_P Parameter: Organism Value: Zea mays
  misc_feature: MA Experiment 20000487 PARAMETER Experiment Name: Zm_50mM_NH4NO3_L_to_H_P Parameter: Timepoint (hr) Value: 4
  misc_feature: MA Experiment 20000487 PARAMETER Experiment Name: Zm_50mM_NH4NO3_L_to_H_P Parameter: Tissue Value: Leaves
  misc_feature: MA Experiment 20000487 PARAMETER Experiment Name: Zm_50mM_NH4NO3_L_to_H_P Parameter: Treatment Value: 50mM NH4NO3 vs. 100mM Mannitol
  misc_feature: MA Experiment ID: 20000488 Result: Up-regulated in Transcription
  misc_feature: MA Experiment 20000488 PARAMETER Experiment Name: Zm_50mM_NH4NO3_L_to_H_P Parameter: Organism Value: Zea mays
  misc_feature: MA Experiment 20000488 PARAMETER Experiment Name: Zm_50mM_NH4NO3_L_to_H_P Parameter: Timepoint (hr) Value: 8
  misc_feature: MA Experiment 20000488 PARAMETER Experiment Name: Zm_50mM_NH4NO3_L_to_H_P Parameter: Tissue Value: Leaves
  misc_feature: MA Experiment 20000488 PARAMETER Experiment Name: Zm_50mM_NH4NO3_L_to_H_P Parameter: Treatment Value: 50mM NH4NO3 vs. 100mM Mannitol
  misc_feature: MA Experiment ID: 20000534 Result: Down-regulated in Transcription
  misc_feature: MA Experiment 20000534 PARAMETER Experiment Name: Zm_Hybrid_Pollen_P Parameter: Age (day) Value: 8
  misc_feature: MA Experiment 20000534 PARAMETER Experiment Name: Zm_Hybrid_Pollen_P Parameter: Organism Value: Zea mays
  misc_feature: MA Experiment 20000534 PARAMETER Experiment Name: Zm_Hybrid_Pollen_P Parameter: Plant Line Value: 35A19
  misc_feature: MA Experiment 20000534 PARAMETER Experiment Name: Zm_Hybrid_Pollen_P Parameter: Tissue Value: Pollen vs. Aerial
  misc_feature: MA Experiment ID: 20000626 Result: Up-regulated in Transcription
  misc_feature: MA Experiment 20000626 PARAMETER Experiment Name: Zm_Herbicide-Treatments_P Parameter: Timepoint (hr) Value: 12
  misc_feature: MA Experiment 20000626 PARAMETER Experiment Name: Zm_Herbicide-Treatments_P Parameter: Tissue Value: Aerial
  misc_feature: MA Experiment 20000626 PARAMETER Experiment Name: Zm_Herbicide-Treatments_P Parameter: Treatment Value: Roundup vs. No Treatment

SEQ ID NO: 7256 - protein, 145 aa, Zea mays subsp. mays; identical to SEQ ID NO: 3403
  peptide (1)..(145): Ceres Seq. ID no. 12595103
  misc_feature (1)..(62): Pfam Name: Uncharacterised protein family (UPF0113) Pfam Description: Uncharacterised protein family (UPF0113)
  misc_feature (1)..(62): Homolog of NCBI NO: 22831121 NR Description: putative 60S ribosome subunit biogenesis protein
  misc_feature (1)..(61): Homolog of NCBI NO: 20301988 NR Description: Saccharomyces cerevisiae Nip7p homolog [Rattus
  misc_feature (1)..(61): Homolog of NCBI NO: 7705437 NR Description: hypothetical protein HSPC031 [Homo sapiens]
  misc_feature (1)..(61): Homolog of NCBI NO: 12852038 NR Description: unnamed protein product [Mus musculus]
  misc_feature (1)..(61): Homolog of NCBI NO: 13928674 NR Description: RIKEN cDNA 1110017C15 [Mus musculus]
  misc_feature (1)..(62): Homolog of NCBI NO: 17506003 NR Description: 60S ribosome biogenesis (20.1 kD) [Caenorhabditis
  misc_feature (1)..(62): Homolog of NCBI NO: 39589582 NR Description: Hypothetical protein CBG12182 [Caenorhabditis
  misc_feature (1)..(61): Homolog of NCBI NO: 34876605 NR Description: similar to Saccharomyces cerevisiae Nip7p homolog
  misc_feature (1)..(61): Homolog of NCBI NO: 19075218 NR Description: putative protein involved in 60S ribosome subunit [Schizosaccharomyces pombe] >gi|7492919|pir||T41300 protein
  misc_feature (1)..(61): Homolog of NCBI NO: 6841580 NR Description: HSPC180 [Homo sapiens]

SEQ ID NO: 7257 - DNA, 947 bp, Zea mays subsp. mays
  misc_feature (1)..(947): Ceres Seq. ID no. 12467581
  misc_feature: MA Experiment ID: 108527 Result: Down-regulated in Transcription
  misc_feature: MA Experiment 108527 PARAMETER Experiment Name: Zm_5mM_NO_P Parameter: Age (day) Value: 8
  misc_feature: MA Experiment 108527 PARAMETER Experiment Name: Zm_5mM_NO_P Parameter: Organism Value: Zea mays
  misc_feature: MA Experiment 108527 PARAMETER Experiment Name: Zm_5mM_NO_P Parameter: Plant Line Value: 35A19
  misc_feature: MA Experiment 108527 PARAMETER Experiment Name: Zm_5mM_NO_P Parameter: Timepoint (hr) Value: 6
  misc_feature: MA Experiment 108527 PARAMETER Experiment Name: Zm_5mM_NO_P Parameter: Tissue Value: Aerial
  misc_feature: MA Experiment 108527 PARAMETER Experiment Name: Zm_5mM_NO_P Parameter: Treatment Value: 5mM NO vs. No Treatment
  misc_feature: MA Experiment ID: 108529 Result: Down-regulated in Transcription
  misc_feature: MA Experiment 108529 PARAMETER Experiment Name: Zm_Imbibed_Seeds_P Parameter: Age (day) Value: 5 vs. 2
  misc_feature: MA Experiment 108529 PARAMETER Experiment Name: Zm_Imbibed_Seeds_P Parameter: Organism Value: Zea mays
  misc_feature: MA Experiment 108529 PARAMETER Experiment Name: Zm_Imbibed_Seeds_P Parameter: Plant Line Value: 35A19
  misc_feature: MA Experiment 108529 PARAMETER Experiment Name: Zm_Imbibed_Seeds_P Parameter: Tissue Value: Roots vs. Embryo
  misc_feature: MA Experiment ID: 108532 Result: Down-regulated in Transcription
  misc_feature: MA Experiment 108532 PARAMETER Experiment Name: Zm_20uM_KNO3_H-to-L_P Parameter: Age (day) Value: 11
  misc_feature: MA Experiment 108532 PARAMETER Experiment Name: Zm_20uM_KNO3_H-to-L_P Parameter: Organism Value: Zea mays
  misc_feature: MA Experiment 108532 PARAMETER Experiment Name: Zm_20uM_KNO3_H-to-L_P Parameter: Plant Line Value: 35A19
  misc_feature: MA Experiment 108532 PARAMETER Experiment Name: Zm_20uM_KNO3_H-to-L_P Parameter: Timepoint (hr) Value: 16
  misc_feature: MA Experiment 108532 PARAMETER Experiment Name: Zm_20uM_KNO3_H-to-L_P Parameter: Tissue Value: Roots
  misc_feature: MA Experiment 108532 PARAMETER Experiment Name: Zm_20uM_KNO3_H-to-L_P Parameter: Treatment Value: 20uM KNO3 vs. 60mM KNO3
  misc_feature: MA Experiment ID: 108544 Result: Down-regulated in Transcription
  misc_feature: MA Experiment ID: 108597 Result: Up-regulated in Transcription
  misc_feature: MA Experiment 108597 PARAMETER Experiment Name: Zm_100uM_ABA_P Parameter: Age (day) Value: 9
  misc_feature: MA Experiment 108597 PARAMETER Experiment Name: Zm_100uM_ABA_P Parameter: Organism Value: Zea mays
  misc_feature: MA Experiment 108597 PARAMETER Experiment Name: Zm_100uM_ABA_P Parameter: Plant Line Value: 35A19
  misc_feature: MA Experiment 108597 PARAMETER Experiment Name: Zm_100uM_ABA_P Parameter: Timepoint (hr) Value: 24
  misc_feature: MA Experiment 108597 PARAMETER Experiment Name: Zm_100uM_ABA_P Parameter: Tissue Value: Aerial
  misc_feature: MA Experiment 108597 PARAMETER Experiment Name: Zm_100uM_ABA_P Parameter: Treatment Value: 100uM ABA vs. No Treatment
  misc_feature: MA Experiment ID: 108689 Result: Down-regulated in Transcription
  misc_feature: MA Experiment 108689 PARAMETER Experiment Name: Zm_Drought_Roots_P Parameter: Age (day) Value: 9
  misc_feature: MA Experiment 108689 PARAMETER Experiment Name: Zm_Drought_Roots_P Parameter: Organism Value: Zea mays
  misc_feature: MA Experiment 108689 PARAMETER Experiment Name: Zm_Drought_Roots_P Parameter: Plant Line Value: 35A19
  misc_feature: MA Experiment 108689 PARAMETER Experiment Name: Zm_Drought_Roots_P Parameter: Timepoint (hr) Value: 24
  misc_feature: MA Experiment 108689 PARAMETER Experiment Name: Zm_Drought_Roots_P Parameter: Tissue Value: Roots
  misc_feature: MA Experiment 108689 PARAMETER Experiment Name: Zm_Drought_Roots_P Parameter: Treatment Value: Drought vs. No Drought
  misc_feature: MA Experiment ID: 20000479 Result: Down-regulated in Transcription
  misc_feature: MA Experiment 20000479 PARAMETER Experiment Name: Zm_Drought_P Parameter: Age (day) Value: 10
  misc_feature: MA Experiment 20000479 PARAMETER Experiment Name: Zm_Drought_P Parameter: Organism Value: Zea mays
  misc_feature: MA Experiment 20000479 PARAMETER Experiment Name: Zm_Drought_P Parameter: Plant Line Value: 35A19
  misc_feature: MA Experiment 20000479 PARAMETER Experiment Name: Zm_Drought_P Parameter: Timepoint (hr) Value: 48
  misc_feature: MA Experiment 20000479 PARAMETER Experiment Name: Zm_Drought_P Parameter: Tissue Value: Aerial
  misc_feature: MA Experiment 20000479 PARAMETER Experiment Name: Zm_Drought_P Parameter: Treatment Value: Drought vs. No Drought
  misc_feature: MA Experiment ID: 20000480 Result: Down-regulated in Transcription
  misc_feature: MA Experiment 20000480 PARAMETER Experiment Name: Zm_Drought_P Parameter: Age (day) Value: 11
  misc_feature: MA Experiment 20000480 PARAMETER Experiment Name: Zm_Drought_P Parameter: Organism Value: Zea mays
  misc_feature: MA Experiment 20000480 PARAMETER Experiment Name: Zm_Drought_P Parameter: Plant Line Value: 35A19
  misc_feature: MA Experiment 20000480 PARAMETER Experiment Name: Zm_Drought_P Parameter: Timepoint (hr) Value: 72
  misc_feature: MA Experiment 20000480 PARAMETER Experiment Name: Zm_Drought_P Parameter: Tissue Value: Aerial
  misc_feature: MA Experiment 20000480 PARAMETER Experiment Name: Zm_Drought_P Parameter: Treatment Value: Drought vs. No Drought
  misc_feature: MA Experiment ID: 20000626 Result: Down-regulated in Transcription
  misc_feature: MA Experiment 20000626 PARAMETER Experiment Name: Zm_Herbicide-Treatments_P Parameter: Timepoint (hr) Value: 12
  misc_feature: MA Experiment 20000626 PARAMETER Experiment Name: Zm_Herbicide-Treatments_P Parameter: Tissue Value: Aerial
  misc_feature: MA Experiment 20000626 PARAMETER Experiment Name: Zm_Herbicide-Treatments_P Parameter: Treatment Value: Roundup vs. No Treatment
taaggaatgttttagatatgaatgctcactttggtggatttaatgctgctttactgaaggcaggaaagtctgtatgggtgatgaatgttgttcctacagatgccccaaactatctaccgctgatatttgaccggggttttatcggggttcaacatgactggtgtgatgcatttccaacttacccaagaacatatgatatggtgcacgctgatggttttctatcacttcagaagaaccacaagcatagatgttctactcttgacatattcttggaagttgaccgcatcctacgaccagagggctgggtcataatccgtgacgctgcccctcttattgaagcggcaagatctgttgttactcaactcagatgggacgcccgcgttttggatcttgacatagccagtgatgaaaaactactggtctgtcagaagccgtttctcagaaaataatgagcatagtagacactgacacaagatatgaacttattctttcaccctacacactgttacaattgctgtntgagcacaactgagtacaaagtttgggtaaaaaacacgggaagcatgattcagcaaacttgtcatgcatcaccatggaaccgcaaggtgccattaaattgatcggtcaagtgcatgctgcagaaacaggcttggtggctaagctttccaggccaaggttttattgccaggatatagagatgaagccataaaaattactttattagtgaaaccatatccaataaagagatgctgctgcggtgtacataatcgccgccaatgtgccatataggtataattcattttttcccttgttacaatttctctccttttttctgtaactgtgccaatttgttttattttgtatcttgtatgtaaattggttggtctatatactgatcatcccagactacagcctagtgaaatcaatataattattatttggagatg

SEQ ID NO: 7258 - protein, 148 aa, Zea mays subsp. mays
  peptide (1)..(148): Ceres Seq. ID no. 12467582
  misc_feature (1)..(143): Pfam Name: Putative methyltransferase Pfam Description: Putative methyltransferase
  misc_feature (1)..(148): Homolog of NCBI NO: 12324243 NR Description: unknown protein, 5' partial; 69506-67937
  misc_feature (1)..(148): Homolog of NCBI NO: 18395560 NR Description: expressed protein; protein id: At2g03480.1 thaliana] >gi|20197738|gb|AAD17428.2| expressed protein
  misc_feature (1)..(148): Homolog of NCBI NO: 25411012 NR Description: hypothetical protein At2g03480 [imported] -
  misc_feature (1)..(147): Homolog of NCBI NO: 14532450 NR Description: At2g03480/T4M8.9 [Arabidopsis thaliana]
  misc_feature (1)..(147): Homolog of NCBI NO: 24111341 NR Description: At2g03480/T4M8.9 [Arabidopsis thaliana]
  misc_feature (1)..(148): Homolog of NCBI NO: 15222970 NR Description: hypothetical protein; protein id: At1g13860.1
  misc_feature (1)..(148): Homolog of NCBI NO: 26449782 NR Description: unknown protein [Arabidopsis thaliana]
  misc_feature (1)..(130): Homolog of NCBI NO: 25402770 NR Description: protein F16A14.7 [imported] - Arabidopsis >gi|8778408|gb|AAF79416.1|AC068197_26 F16A14.7 [Arabidopsis
  misc_feature (1)..(143): Homolog of NCBI NO: 15222494 NR Description: unknown protein; protein id: At1g31850.1
  misc_feature (1)..(143): Homolog of NCBI NO: 21741752 NR Description: OSJNBa0060B20.12 [Oryza sativa (japonica
RNVLDMNAHFGGFNAALLKAGKSVWVMNVVPTDAPNYLPLIFDRGFIGVQHDWCDAFPTYPRTYDMVHADGFLSLQKNHKHRCSTLDIFLEVDRILRPEGWVIIRDAAPLIEAARSVVTQLRWDARVLDLDIASDEKLLVCQKPFLRK

SEQ ID NO: 7259 - protein, 143 aa, Zea mays subsp. mays
  peptide (1)..(143): Ceres Seq. ID no. 12467583
  misc_feature (1)..(138): Pfam Name: Putative methyltransferase Pfam Description: Putative methyltransferase
  misc_feature (1)..(143): Homolog of NCBI NO: 12324243 NR Description: unknown protein, 5' partial; 69506-67937
  misc_feature (1)..(143): Homolog of NCBI NO: 18395560 NR Description: expressed protein; protein id: At2g03480.1 thaliana] >gi|20197738|gb|AAD17428.2| expressed protein
  misc_feature (1)..(143): Homolog of NCBI NO: 25411012 NR Description: hypothetical protein At2g03480 [imported] -
  misc_feature (1)..(142): Homolog of NCBI NO: 14532450 NR Description: At2g03480/T4M8.9 [Arabidopsis thaliana]
  misc_feature (1)..(142): Homolog of NCBI NO: 24111341 NR Description: At2g03480/T4M8.9 [Arabidopsis thaliana]
  misc_feature (1)..(143): Homolog of NCBI NO: 15222970 NR Description: hypothetical protein; protein id: At1g13860.1
  misc_feature (1)..(143): Homolog of NCBI NO: 26449782 NR Description: unknown protein [Arabidopsis thaliana]
  misc_feature (1)..(125): Homolog of NCBI NO: 25402770 NR Description: protein F16A14.7 [imported] - Arabidopsis >gi|8778408|gb|AAF79416.1|AC068197_26 F16A14.7 [Arabidopsis
  misc_feature (1)..(138): Homolog of NCBI NO: 15222494 NR Description: unknown protein; protein id: At1g31850.1
  misc_feature (1)..(138): Homolog of NCBI NO: 21741752 NR Description: OSJNBa0060B20.12 [Oryza sativa (japonica
MNAHFGGFNAALLKAGKSVWVMNVVPTDAPNYLPLIFDRGFIGVQHDWCDAFPTYPRTYDMVHADGFLSLQKNHKHRCSTLDIFLEVDRILRPEGWVIIRDAAPLIEAARSVVTQLRWDARVLDLDIASDEKLLVCQKPFLRK

SEQ ID NO: 7260 - protein, 122 aa, Zea mays subsp. mays
  peptide (1)..(122): Ceres Seq. ID no. 12467584
  misc_feature (1)..(117): Pfam Name: Putative methyltransferase Pfam Description: Putative methyltransferase
  misc_feature (1)..(122): Homolog of NCBI NO: 12324243 NR Description: unknown protein, 5' partial; 69506-67937
  misc_feature (1)..(122): Homolog of NCBI NO: 18395560 NR Description: expressed protein; protein id: At2g03480.1 thaliana] >gi|20197738|gb|AAD17428.2| expressed protein
  misc_feature (1)..(122): Homolog of NCBI NO: 25411012 NR Description: hypothetical protein At2g03480 [imported] -
  misc_feature (1)..(121): Homolog of NCBI NO: 14532450 NR Description: At2g03480/T4M8.9 [Arabidopsis thaliana]
  misc_feature (1)..(121): Homolog of NCBI NO: 24111341 NR Description: At2g03480/T4M8.9 [Arabidopsis thaliana]
  misc_feature (1)..(122): Homolog of NCBI NO: 15222970 NR Description: hypothetical protein; protein id: At1g13860.1
  misc_feature (1)..(122): Homolog of NCBI NO: 26449782 NR Description: unknown protein [Arabidopsis thaliana]
  misc_feature (1)..(104): Homolog of NCBI NO: 25402770 NR Description: protein F16A14.7 [imported] - Arabidopsis >gi|8778408|gb|AAF79416.1|AC068197_26 F16A14.7 [Arabidopsis
  misc_feature (1)..(117): Homolog of NCBI NO: 15222494 NR Description: unknown protein; protein id: At1g31850.1
  misc_feature (1)..(117): Homolog of NCBI NO: 21741752 NR Description: OSJNBa0060B20.12 [Oryza sativa (japonica
MNVVPTDAPNYLPLIFDRGFIGVQHDWCDAFPTYPRTYDMVHADGFLSLQKNHKHRCSTLDIFLEVDRILRPEGWVIIRDAAPLIEAARSVVTQLRWDARVLDLDIASDEKLLVCQKPFLRK

SEQ ID NO: 7261 - DNA, 855 bp, Zea mays subsp. mays
  misc_feature (1)..(855): Ceres Seq. ID no. 12351202
  misc_feature: MA Experiment ID: 108523 Result: Down-regulated in Transcription
  misc_feature: MA Experiment 108523 PARAMETER Experiment Name: Zm_42deg_Heat_P Parameter: Age (day) Value: 8
  misc_feature: MA Experiment 108523 PARAMETER Experiment Name: Zm_42deg_Heat_P Parameter: Organism Value: Zea mays
  misc_feature: MA Experiment 108523 PARAMETER Experiment Name: Zm_42deg_Heat_P Parameter: Plant Line Value: 35A19
  misc_feature: MA Experiment 108523 PARAMETER Experiment Name: Zm_42deg_Heat_P Parameter: Temperature (deg C) Value: 42 vs. 22
  misc_feature: MA Experiment 108523 PARAMETER Experiment Name: Zm_42deg_Heat_P Parameter: Timepoint (hr) Value: 6
  misc_feature: MA Experiment 108523 PARAMETER Experiment Name: Zm_42deg_Heat_P Parameter: Tissue Value: Aerial
  misc_feature: MA Experiment ID: 108527 Result: Down-regulated in Transcription
  misc_feature: MA Experiment 108527 PARAMETER Experiment Name: Zm_5mM_NO_P Parameter: Age (day) Value: 8
  misc_feature: MA Experiment 108527 PARAMETER Experiment Name: Zm_5mM_NO_P Parameter: Organism Value: Zea mays
  misc_feature: MA Experiment 108527 PARAMETER Experiment Name: Zm_5mM_NO_P Parameter: Plant Line Value: 35A19
  misc_feature: MA Experiment 108527 PARAMETER Experiment Name: Zm_5mM_NO_P Parameter: Timepoint (hr) Value: 6
  misc_feature: MA Experiment 108527 PARAMETER Experiment Name: Zm_5mM_NO_P Parameter: Tissue Value: Aerial
  misc_feature: MA Experiment 108527 PARAMETER Experiment Name: Zm_5mM_NO_P Parameter: Treatment Value: 5mM NO vs. No Treatment
  misc_feature: MA Experiment ID: 108535 Result: Down-regulated in Transcription
  misc_feature: MA Experiment 108535 PARAMETER Experiment Name: Zm_Meristem_P Parameter: Age (day) Value: 8
  misc_feature: MA Experiment 108535 PARAMETER Experiment Name: Zm_Meristem_P Parameter: Organism Value: Zea mays
  misc_feature: MA Experiment 108535 PARAMETER Experiment Name: Zm_Meristem_P Parameter: Plant Line Value: 35A19
  misc_feature: MA Experiment 108535 PARAMETER Experiment Name: Zm_Meristem_P Parameter: Tissue Value: Root Meristem vs. Above Root Meristem
  misc_feature: MA Experiment ID: 108543 Result: Up-regulated in Transcription
  misc_feature: MA Experiment ID: 108544 Result: Down-regulated in Transcription
  misc_feature: MA Experiment ID: 108559 Result: Down-regulated in Transcription
  misc_feature: MA Experiment 108559 PARAMETER Experiment Name: Zm_5mM_NO_P Parameter: Age (day) Value: 8
  misc_feature: MA Experiment 108559 PARAMETER Experiment Name: Zm_5mM_NO_P Parameter: Organism Value: Zea mays
  misc_feature: MA Experiment 108559 PARAMETER Experiment Name: Zm_5mM_NO_P Parameter: Plant Line Value: 35A19
  misc_feature: MA Experiment 108559 PARAMETER Experiment Name: Zm_5mM_NO_P Parameter: Timepoint (hr) Value: 12
  misc_feature: MA Experiment 108559 PARAMETER Experiment Name: Zm_5mM_NO_P Parameter: Tissue Value: Aerial
  misc_feature: MA Experiment 108559 PARAMETER Experiment Name: Zm_5mM_NO_P Parameter: Treatment Value: 5mM NO vs. No Treatment
  misc_feature: MA Experiment ID: 20000477 Result: Down-regulated in Transcription
  misc_feature: MA Experiment 20000477 PARAMETER Experiment Name: Zm_5mM_SA_P Parameter: Age (day) Value: 10
  misc_feature: MA Experiment 20000477 PARAMETER Experiment Name: Zm_5mM_SA_P Parameter: Organism Value: Zea mays
  misc_feature: MA Experiment 20000477 PARAMETER Experiment Name: Zm_5mM_SA_P Parameter: Plant Line Value: 35A19
  misc_feature: MA Experiment 20000477 PARAMETER Experiment Name: Zm_5mM_SA_P Parameter: Timepoint (hr) Value: 48
  misc_feature: MA Experiment 20000477 PARAMETER Experiment Name: Zm_5mM_SA_P Parameter: Tissue Value: Aerial
  misc_feature: MA Experiment 20000477 PARAMETER Experiment Name: Zm_5mM_SA_P Parameter: Treatment Value: 5mM SA vs. No Treatment
  misc_feature: MA Experiment ID: 20000478 Result: Down-regulated in Transcription
  misc_feature: MA Experiment 20000478 PARAMETER Experiment Name: Zm_5mM_SA_P Parameter: Age (day) Value: 11
  misc_feature: MA Experiment 20000478 PARAMETER Experiment Name: Zm_5mM_SA_P Parameter: Organism Value: Zea mays
  misc_feature: MA Experiment 20000478 PARAMETER Experiment Name: Zm_5mM_SA_P Parameter: Plant Line Value: 35A19
  misc_feature: MA Experiment 20000478 PARAMETER Experiment Name: Zm_5mM_SA_P Parameter: Timepoint (hr) Value: 72
  misc_feature: MA Experiment 20000478 PARAMETER Experiment Name: Zm_5mM_SA_P Parameter: Tissue Value: Aerial
  misc_feature: MA Experiment 20000478 PARAMETER Experiment Name: Zm_5mM_SA_P Parameter: Treatment Value: 5mM SA vs. No Treatment
  misc_feature: MA Experiment ID: 20000487 Result: Down-regulated in Transcription
  misc_feature: MA Experiment 20000487 PARAMETER Experiment Name: Zm_50mM_NH4NO3_L_to_H_P Parameter: Organism Value: Zea mays
  misc_feature: MA Experiment 20000487 PARAMETER Experiment Name: Zm_50mM_NH4NO3_L_to_H_P Parameter: Timepoint (hr) Value: 4
  misc_feature: MA Experiment 20000487 PARAMETER Experiment Name: Zm_50mM_NH4NO3_L_to_H_P Parameter: Tissue Value: Leaves
  misc_feature: MA Experiment 20000487 PARAMETER Experiment Name: Zm_50mM_NH4NO3_L_to_H_P Parameter: Treatment Value: 50mM NH4NO3 vs. 100mM Mannitol
  misc_feature: MA Experiment ID: 20000534 Result: Down-regulated in Transcription
  misc_feature: MA Experiment 20000534 PARAMETER Experiment Name: Zm_Hybrid_Pollen_P Parameter: Age (day) Value: 8
  misc_feature: MA Experiment 20000534 PARAMETER Experiment Name: Zm_Hybrid_Pollen_P Parameter: Organism Value: Zea mays
  misc_feature: MA Experiment 20000534 PARAMETER Experiment Name: Zm_Hybrid_Pollen_P Parameter: Plant Line Value: 35A19
  misc_feature: MA Experiment 20000534 PARAMETER Experiment Name: Zm_Hybrid_Pollen_P Parameter: Tissue Value: Pollen vs. Aerial
  misc_feature: MA Experiment ID: 20000535 Result: Down-regulated in Transcription
  misc_feature: MA Experiment 20000535 PARAMETER Experiment Name: Zm_Hybrid_Seed_Dev_P Parameter: DAP Value: 30 vs. 12
  misc_feature: MA Experiment 20000535 PARAMETER Experiment Name: Zm_Hybrid_Seed_Dev_P Parameter: Organism Value: Zea mays
  misc_feature: MA Experiment 20000535 PARAMETER Experiment Name: Zm_Hybrid_Seed_Dev_P Parameter: Plant Line Value: 35A19
  misc_feature: MA Experiment 20000535 PARAMETER Experiment Name: Zm_Hybrid_Seed_Dev_P Parameter: Tissue Value: Embryo vs. Unfert Floret
  misc_feature: MA Experiment ID: 20001614 Result: Up-regulated in Transcription
  misc_feature: MA Experiment 20001614 PARAMETER Experiment Name: Zm_50ppm_KNO3_L-to-H_P Parameter: Age (day) Value: 21
  misc_feature: MA Experiment 20001614 PARAMETER Experiment Name: Zm_50ppm_KNO3_L-to-H_P Parameter: Organism Value: Zea mays
  misc_feature: MA Experiment 20001614 PARAMETER Experiment Name: Zm_50ppm_KNO3_L-to-H_P Parameter: Plant Line Value: 35A19
  misc_feature: MA Experiment 20001614 PARAMETER Experiment Name: Zm_50ppm_KNO3_L-to-H_P Parameter: Timepoint (hr) Value: 48
  misc_feature: MA Experiment 20001614 PARAMETER Experiment Name: Zm_50ppm_KNO3_L-to-H_P Parameter: Tissue Value: Roots
  misc_feature: MA Experiment 20001614 PARAMETER Experiment Name: Zm_50ppm_KNO3_L-to-H_P Parameter: Treatment Value: 50ppm KNO3 vs. 50ppm KCl
agctaattgcttttccagctgttcgtctcgccctgcatatgcgtctctctgctgccaggctcaagggctccacgctcgtcaccaatggcgtgataacggccgggtctgacgagtgggcgatctacggcggaaccggggtgtttgccatggcgaggggcgtcataaggagaaggtatctcgccgacagggccggcgggaacactgatgagctcaacatggatgtcttctgccggccgtttggctcacagtcagagctgcaagataagatgcaggtgcaggggcagggctctagcgtcaccaagattggactatggggtggaccgggagggtcggcacaggacatcacggcggagcggccgccgcagcgtctgcacagcgtcaccgttcgtgctggcgtcgccctcgactccatcgagttcacctatactgacagcgcttggcagaggcgcgccgctgggcgatggggtggactcgggggcaatgttcgaacgatcgaccttggcgacgccgaggatgtcagggaagtctcgggaacatacggcgcatttgaaggtgccactacgctgacctcgctcaggctcgtcaccagcagcagaacctggggcccctggggtgtcgagaacgggacgcgtttctccgtcacggcgcccatcggcagcagcatcgtgggattctatgcgcgggcgggaaccaggctcgtcgatgctatcggtgtttacttgcgtcagatttaattcgaataatagcaggggagctactgctagctacgtacctgctccatcctccattatcctttatttcaattcgctcatcatcgtcgtgtgtaaattaaataaataaagctcttgtgcccat

SEQ ID NO: 7262 - protein, 243 aa, Zea mays subsp. mays
  peptide (1)..(243): Ceres Seq. ID no. 12351203
  misc_feature (109)..(241): Pfam Name: Jacalin-like lectin domain Pfam Description: Jacalin-like lectin domain
  misc_feature (19)..(243): Homolog of NCBI NO: 9313027 NR Description: beta-glucosidase aggregating factor precursor
  misc_feature (19)..(243): Homolog of NCBI NO: 7489385 NR Description: jakalin homolog - barley
  misc_feature (19)..(243): Homolog of NCBI NO: 7489383 NR Description: jacalin homolog - barley
  misc_feature (19)..(229): Homolog of NCBI NO: 7489384 NR Description: jacalin homolog - barley
  misc_feature (19)..(240): Homolog of NCBI NO: 7489661 NR Description: benzothiadiazole-induced protein (clone WCI-1) -
  misc_feature (19)..(241): Homolog of NCBI NO: 21311647 NR Description: hessian fly response gene 1 protein [Triticum
  misc_feature (19)..(239): Homolog of NCBI NO: 16151819 NR Description: VER2 [Triticum aestivum]
  misc_feature (97)..(241): Homolog of NCBI NO: 34915016 NR Description: putative Mannose-Binding Rice Lectin [Oryza
  misc_feature (96)..(240): Homolog of NCBI NO: 38344523 NR Description: OSJNBa0016N04.16 [Oryza sativa (japonica
  misc_feature (97)..(240): Homolog of NCBI NO: 134190 NR Description: Salt-stress induced protein (Salt protein)
LIAFPAVRLALHMRLSAARLKGSTLVTNGVITAGSDEWAIYGGTGVFAMARGVIRRRYLADRAGGNTDELNMDVFCRPFGSQSELQDKMQVQGQGSSVTKIGLWGGPGGSAQDITAERPPQRLHSVTVRAGVALDSIEFTYTDSAWQRRAAGRWGGLGGNVRTIDLGDAEDVREVSGTYGAFEGATTLTSLRLVTSSRTWGPWGVENGTRFSVTAPIGSSIVGFYARAGTRLVDAIGVYLRQI

SEQ ID NO: 7263 - protein, 231 aa, Zea mays subsp. mays
  peptide (1)..(231): Ceres Seq. ID no. 12351204
  misc_feature (97)..(229): Pfam Name: Jacalin-like lectin domain Pfam Description: Jacalin-like lectin domain
  misc_feature (7)..(231): Homolog of NCBI NO: 9313027 NR Description: beta-glucosidase aggregating factor precursor
  misc_feature (7)..(231): Homolog of NCBI NO: 7489385 NR Description: jakalin homolog - barley
  misc_feature (7)..(231): Homolog of NCBI NO: 7489383 NR Description: jacalin homolog - barley
  misc_feature (7)..(217): Homolog of NCBI NO: 7489384 NR Description: jacalin homolog - barley
  misc_feature (7)..(228): Homolog of NCBI NO: 7489661 NR Description: benzothiadiazole-induced protein (clone WCI-1) -
  misc_feature (7)..(229): Homolog of NCBI NO: 21311647 NR Description: hessian fly response gene 1 protein [Triticum
  misc_feature (7)..(227): Homolog of NCBI NO: 16151819 NR Description: VER2 [Triticum aestivum]
  misc_feature (85)..(229): Homolog of NCBI NO: 34915016 NR Description: putative Mannose-Binding Rice Lectin [Oryza
  misc_feature (84)..(228): Homolog of NCBI NO: 38344523 NR Description: OSJNBa0016N04.16 [Oryza sativa (japonica
  misc_feature (85)..(228): Homolog of NCBI NO: 134190 NR Description: Salt-stress induced protein (Salt protein)
MRLSAARLKGSTLVTNGVITAGSDEWAIYGGTGVFAMARGVIRRRYLADRAGGNTDELNMDVFCRPFGSQSELQDKMQVQGQGSSVTKIGLWGGPGGSAQDITAERPPQRLHSVTVRAGVALDSIEFTYTDSAWQRRAAGRWGGLGGNVRTIDLGDAEDVREVSGTYGAFEGATTLTSLRLVTSSRTWGPWGVENGTRFSVTAPIGSSIVGFYARAGTRLVDAIGVYLRQI

SEQ ID NO: 7264 - protein, 195 aa, Zea mays subsp. mays
  peptide (1)..(195): Ceres Seq. ID no. 12351205
  misc_feature (61)..(193): Pfam Name: Jacalin-like lectin domain Pfam Description: Jacalin-like lectin domain
  misc_feature (1)..(195): Homolog of NCBI NO: 9313027 NR Description: beta-glucosidase aggregating factor precursor
  misc_feature (1)..(195): Homolog of NCBI NO: 7489385 NR Description: jakalin homolog - barley
  misc_feature (1)..(195): Homolog of NCBI NO: 7489383 NR Description: jacalin homolog - barley
  misc_feature (1)..(181): Homolog of NCBI NO: 7489384 NR Description: jacalin homolog - barley
  misc_feature (1)..(192): Homolog of NCBI NO: 7489661 NR Description: benzothiadiazole-induced protein (clone WCI-1) -
  misc_feature (1)..(193): Homolog of NCBI NO: 21311647 NR Description: hessian fly response gene 1 protein [Triticum
  misc_feature (1)..(191): Homolog of NCBI NO: 16151819 NR Description: VER2 [Triticum aestivum]
  misc_feature (49)..(193): Homolog of NCBI NO: 34915016 NR Description: putative Mannose-Binding Rice Lectin [Oryza
  misc_feature (48)..(192): Homolog of NCBI NO: 38344523 NR Description: OSJNBa0016N04.16 [Oryza sativa (japonica
  misc_feature (49)..(192): Homolog of NCBI NO: 134190 NR Description: Salt-stress induced protein (Salt protein)
MARGVIRRRYLADRAGGNTDELNMDVFCRPFGSQSELQDKMQVQGQGSSVTKIGLWGGPGGSAQDITAERPPQRLHSVTVRAGVALDSIEFTYTDSAWQRRAAGRWGGLGGNVRTIDLGDAEDVREVSGTYGAFEGATTLTSLRLVTSSRTWGPWGVENGTRFSVTAPIGSSIVGFYARAGTRLVDAIGVYLRQI

SEQ ID NO: 7265 - DNA, 1251 bp, Zea mays subsp. mays
  misc_feature (1)..(1251): Ceres Seq. ID no. 12403316
  misc_feature: MA Experiment ID: 108523 Result: Up-regulated in Transcription
  misc_feature: MA Experiment 108523 PARAMETER Experiment Name: Zm_42deg_Heat_P Parameter: Age (day) Value: 8
  misc_feature: MA Experiment 108523 PARAMETER Experiment Name: Zm_42deg_Heat_P Parameter: Organism Value: Zea mays
  misc_feature: MA Experiment 108523 PARAMETER Experiment Name: Zm_42deg_Heat_P Parameter: Plant Line Value: 35A19
  misc_feature: MA Experiment 108523 PARAMETER Experiment Name: Zm_42deg_Heat_P Parameter: Temperature (deg C) Value: 42 vs. 22
  misc_feature: MA Experiment 108523 PARAMETER Experiment Name: Zm_42deg_Heat_P Parameter: Timepoint (hr) Value: 6
  misc_feature: MA Experiment 108523 PARAMETER Experiment Name: Zm_42deg_Heat_P Parameter: Tissue Value: Aerial
  misc_feature: MA Experiment ID: 108535 Result: Up-regulated in Transcription
  misc_feature: MA Experiment 108535 PARAMETER Experiment Name: Zm_Meristem_P Parameter: Age (day) Value: 8
  misc_feature: MA Experiment 108535 PARAMETER Experiment Name: Zm_Meristem_P Parameter: Organism Value: Zea mays
  misc_feature: MA Experiment 108535 PARAMETER Experiment Name: Zm_Meristem_P Parameter: Plant Line Value: 35A19
  misc_feature: MA Experiment 108535 PARAMETER Experiment Name: Zm_Meristem_P Parameter: Tissue Value: Root Meristem vs. Above Root Meristem
  misc_feature: MA Experiment ID: 108543 Result: Up-regulated in Transcription
  misc_feature: MA Experiment ID: 20000479 Result: Down-regulated in Transcription
  misc_feature: MA Experiment 20000479 PARAMETER Experiment Name: Zm_Drought_P Parameter: Age (day) Value: 10
  misc_feature: MA Experiment 20000479 PARAMETER Experiment Name: Zm_Drought_P Parameter: Organism Value: Zea mays
  misc_feature: MA Experiment 20000479 PARAMETER Experiment Name: Zm_Drought_P Parameter: Plant Line Value: 35A19
  misc_feature: MA Experiment 20000479 PARAMETER Experiment Name: Zm_Drought_P Parameter: Timepoint (hr) Value: 48
  misc_feature: MA Experiment 20000479 PARAMETER Experiment Name: Zm_Drought_P Parameter: Tissue Value: Aerial
  misc_feature: MA Experiment 20000479 PARAMETER Experiment Name: Zm_Drought_P Parameter: Treatment Value: Drought vs. No Drought
actgacagctcgccgaggggccgcgccgcgctcgagacccgtcgatggcgaggcggagcctggcggtcgacgcaaccgcaggcgccgcatcccgggttcggttcgcgcccacctccaataacctgctcgtctcctcatgggattcggggctgcggttgtacgatgccgacgagggcacgctcagggtcaacgtggagtcagaggcggcattcctcgactgctgcttcgaggatgagtctgcagcgtttgcctgcggctctgatggatctgtgagaaggtacgacttccactcaggttcgcaggatacggtggggctccatgaagatgcactagcctgcattgagttctcttcactgaccggtcagattatgacaggcagccttgacaagaagctaaagctttgggattcaaaaacaagaaatgtaagcccgagcggcaccataaccttaaattcagatgtggcctcaatttctatatgcggcatttacatattagctgcagttgagagaaatgtttatctttatgacatgaggaatctaacaagaccagttgatgaaaaagactgtcctctggattatcaaattcgatgccttcatacttctctagagtggaatgcttatgttgctggctctgtggatggagttgttgcattgaagtatcttgatcgtggaacagatagagatttgggatatgcatttcgttgtcatccaaattccagaaacggaaaatggaatctggtccctgtaaattgcatctcagttcatccctgcaacagaactttcgttacgggagatgataaaggatgcactattgtttgggatgctcaattgaaaaagaagctgattgagcttccaatgtatttgggcagtgtggcgtcagtggcatacaaccataatggccaacttctggcggttgcctcaaactattttttagaagtggataaagaggagcaacaccaccaggtattcattgaaactgtggagaacttcaaaggcaagtcccgtgtgggatagagccttctaacaaaacatgttctgttcatctgttgtattgtattttgtctaccatacatgttaaaggtcaccaagatgtgacagcatgttgtattatgttgtatgactaagcattttttttaggaaacgacataatatggctaagcaatacttgtatatattggttacatctagtctgagacagctgtggtgtgttgtaactcttttgagcttttgcaaccagtattgctgttctggt

SEQ ID NO: 7266 - protein, 322 aa, Zea mays subsp. mays
  peptide (1)..(322): Ceres Seq. ID no. 12403317
  misc_feature (14)..(309): Homolog of NCBI NO: 12597795 NR Description: mitotic checkpoint protein, putative [Arabidopsis
  misc_feature (14)..(309): Homolog of NCBI NO: 21593642 NR Description: mitotic checkpoint protein, putative [Arabidopsis
  misc_feature (16)..(320): Homolog of NCBI NO: 15222841 NR Description: mitotic checkpoint protein, putative; protein id: [Arabidopsis thaliana] >gi|12597855|gb|AAG60165.1|AC074110_3
  misc_feature (1)..(320): Homolog of NCBI NO: 18402300 NR Description: mitotic checkpoint protein, putative; protein id:
  misc_feature (16)..(320): Homolog of NCBI NO: 28564814 NR Description: putative mitotic checkpoint protein [Oryza sativa
  misc_feature (14)..(320): Homolog of NCBI NO: 37362190 NR Description: BUB3 budding uninhibited by benzimidazoles 3-like
  misc_feature (16)..(320): Homolog of NCBI NO: 4757880 NR Description: BUB3 budding uninhibited by benzimidazoles 3 mitotic checkpoint component; BUB3 (budding uninhibited by
  misc_feature (16)..(320): Homolog of NCBI NO: 3986296 NR Description: mitotic checkpoint [Xenopus laevis]
  misc_feature (1)..(294): Homolog of NCBI NO: 6320954 NR Description: Nuclear pore protein required for poly(A)+ RNA
  misc_feature (14)..(309): Homolog of NCBI NO: 18409261 NR Description: mitotic checkpoint protein, putative; protein id:
MARRSLAVDATAGAASRVRFAPTSNNLLVSSWDSGLRLYDADEGTLRVNVESEAAFLDCCFEDESAAFACGSDGSVRRYDFHSGSQDTVGLHEDALACIEFSSLTGQIMTGSLDKKLKLWDSKTRNVSPSGTITLNSDVASISICGIYILAAVERNVYLYDMRNLTRPVDEKDCPLDYQIRCLHTSLEWNAYVAGSVDGVVALKYLDRGTDRDLGYAFRCHPNSRNGKWNLVPVNCISVHPCNRTFVTGDDKGCTIVWDAQLKKKLIELPMYLGSVASVAYNHNGQLLAVASNYFLEVDKEEQHHQVFIETVENFKGKSRVG

SEQ ID NO: 7267 - protein, 214 aa, Zea mays subsp. mays
  peptide (1)..(214): Ceres Seq. ID no. 12403318
  misc_feature (1)..(201): Homolog of NCBI NO: 18409261 NR Description: mitotic checkpoint protein, putative; protein id:
  misc_feature (1)..(201): Homolog of NCBI NO: 12597795 NR Description: mitotic checkpoint protein, putative [Arabidopsis
  misc_feature (1)..(201): Homolog of NCBI NO: 21593642 NR Description: mitotic checkpoint protein, putative [Arabidopsis
  misc_feature (1)..(212): Homolog of NCBI NO: 15222841 NR Description: mitotic checkpoint protein, putative; protein id: [Arabidopsis thaliana] >gi|12597855|gb|AAG60165.1|AC074110_3
  misc_feature (1)..(212): Homolog of NCBI NO: 18402300 NR Description: mitotic checkpoint protein, putative; protein id:
  misc_feature (1)..(212): Homolog of NCBI NO: 28564814 NR Description: putative mitotic checkpoint protein [Oryza sativa
  misc_feature (1)..(212): Homolog of NCBI NO: 37362190 NR Description: BUB3 budding uninhibited by benzimidazoles 3-like
  misc_feature (1)..(212): Homolog of NCBI NO: 4757880 NR Description: BUB3 budding uninhibited by benzimidazoles 3 mitotic checkpoint component; BUB3 (budding uninhibited by
  misc_feature (1)..(212): Homolog of NCBI NO: 3986296 NR Description: mitotic checkpoint [Xenopus laevis]
  misc_feature (1)..(186): Homolog of NCBI NO: 6320954 NR Description: Nuclear pore protein required for poly(A)+ RNA
MTGSLDKKLKLWDSKTRNVSPSGTITLNSDVASISICGIYILAAVERNVYLYDMRNLTRPVDEKDCPLDYQIRCLHTSLEWNAYVAGSVDGVVALKYLDRGTDRDLGYAFRCHPNSRNGKWNLVPVNCISVHPCNRTFVTGDDKGCTIVWDAQLKKKLIELPMYLGSVASVAYNHNGQLLAVASNYFLEVDKEEQHHQVFIETVENFKGKSRVG

SEQ ID NO: 7268 - protein, 161 aa, Zea mays subsp. mays
  peptide (1)..(161): Ceres Seq. ID no. 12403319
  misc_feature (1)..(148): Homolog of NCBI NO: 18409261 NR Description: mitotic checkpoint protein, putative; protein id:
  misc_feature (1)..(148): Homolog of NCBI NO: 12597795 NR Description: mitotic checkpoint protein, putative [Arabidopsis
  misc_feature (1)..(148): Homolog of NCBI NO: 21593642 NR Description: mitotic checkpoint protein, putative [Arabidopsis
  misc_feature (1)..(159): Homolog of NCBI NO: 15222841 NR Description: mitotic checkpoint protein, putative; protein id: [Arabidopsis thaliana] >gi|12597855|gb|AAG60165.1|AC074110_3
  misc_feature (1)..(159): Homolog of NCBI NO: 18402300 NR Description: mitotic checkpoint protein, putative; protein id:
  misc_feature (1)..(159): Homolog of NCBI NO: 28564814 NR Description: putative mitotic checkpoint protein [Oryza sativa
  misc_feature (1)..(159): Homolog of NCBI NO: 37362190 NR Description: BUB3 budding uninhibited by benzimidazoles 3-like
  misc_feature (1)..(159): Homolog of NCBI NO: 4757880 NR Description: BUB3 budding uninhibited by benzimidazoles 3 mitotic checkpoint component; BUB3 (budding uninhibited by
  misc_feature (1)..(159): Homolog of NCBI NO: 3986296 NR Description: mitotic checkpoint [Xenopus laevis]
  misc_feature (1)..(133): Homolog of NCBI NO: 6320954 NR Description: Nuclear pore protein required for poly(A)+ RNA
MRNLTRPVDEKDCPLDYQIRCLHTSLEWNAYVAGSVDGVVALKYLDRGTDRDLGYAFRCHPNSRNGKWNLVPVNCISVHPCNRTFVTGDDKGCTIVWDAQLKKKLIELPMYLGSVASVAYNHNGQLLAVASNYFLEVDKEEQHHQVFIETVENFKGKSRVG

SEQ ID NO: 7269 - DNA, 1178 bp, Zea mays subsp. mays
  misc_feature (1)..(1178): Ceres Seq. ID no. 12352502
  misc_feature: MA Experiment ID: 108515 Result: Down-regulated in Transcription
  misc_feature: MA Experiment 108515 PARAMETER Experiment Name: Zm_2mM_SA_P Parameter: Age (day) Value: 8
  misc_feature: MA Experiment 108515 PARAMETER Experiment Name: Zm_2mM_SA_P Parameter: Organism Value: Zea mays
  misc_feature: MA Experiment 108515 PARAMETER Experiment Name: Zm_2mM_SA_P Parameter: Plant Line Value: 35A19
  misc_feature: MA Experiment 108515 PARAMETER Experiment Name: Zm_2mM_SA_P Parameter: Timepoint (hr) Value: 12
  misc_feature: MA Experiment 108515 PARAMETER Experiment Name: Zm_2mM_SA_P Parameter: Tissue Value: Aerial
  misc_feature: MA Experiment 108515 PARAMETER Experiment Name: Zm_2mM_SA_P Parameter: Treatment Value: 2mM SA vs. No Treatment
  misc_feature: MA Experiment ID: 108522 Result: Up-regulated in Transcription
  misc_feature: MA Experiment 108522 PARAMETER Experiment Name: Zm_42deg_Heat_P Parameter: Age (day) Value: 8
  misc_feature: MA Experiment 108522 PARAMETER Experiment Name: Zm_42deg_Heat_P Parameter: Organism Value: Zea mays
  misc_feature: MA Experiment 108522 PARAMETER Experiment Name: Zm_42deg_Heat_P Parameter: Plant Line Value: 35A19
  misc_feature: MA Experiment 108522 PARAMETER Experiment Name: Zm_42deg_Heat_P Parameter: Temperature (deg C) Value: 42 vs. 22
  misc_feature: MA Experiment 108522 PARAMETER Experiment Name: Zm_42deg_Heat_P Parameter: Timepoint (hr) Value: 1
  misc_feature: MA Experiment 108522 PARAMETER Experiment Name: Zm_42deg_Heat_P Parameter: Tissue Value: Aerial
  misc_feature: MA Experiment ID: 108528 Result: Up-regulated in Transcription
  misc_feature: MA Experiment 108528 PARAMETER Experiment Name: Zm_Imbibed_Seeds_P Parameter: Age (day) Value: 5 vs. 2
  misc_feature: MA Experiment 108528 PARAMETER Experiment Name: Zm_Imbibed_Seeds_P Parameter: Organism Value: Zea mays
  misc_feature: MA Experiment 108528 PARAMETER Experiment Name: Zm_Imbibed_Seeds_P Parameter: Plant Line Value: 35A19
  misc_feature: MA Experiment 108528 PARAMETER Experiment Name: Zm_Imbibed_Seeds_P Parameter: Tissue Value: Aerial vs. Embryo
  misc_feature: MA Experiment ID: 108530 Result: Up-regulated in Transcription
  misc_feature: MA Experiment 108530 PARAMETER Experiment Name: Zm_Imbibed_Seeds_P Parameter: Age (day) Value: 6 vs. 2
  misc_feature: MA Experiment 108530 PARAMETER Experiment Name: Zm_Imbibed_Seeds_P Parameter: Organism Value: Zea mays
  misc_feature: MA Experiment 108530 PARAMETER Experiment Name: Zm_Imbibed_Seeds_P Parameter: Plant Line Value: 35A19
  misc_feature: MA Experiment 108530 PARAMETER Experiment Name: Zm_Imbibed_Seeds_P Parameter: Tissue Value: Aerial vs. Embryo
  misc_feature: MA Experiment ID: 108536 Result: Down-regulated in Transcription
  misc_feature: MA Experiment 108536 PARAMETER Experiment Name: Zm_Meristem_P Parameter: Age (day) Value: 8
  misc_feature: MA Experiment 108536 PARAMETER Experiment Name: Zm_Meristem_P Parameter: Organism Value: Zea mays
  misc_feature: MA Experiment 108536 PARAMETER Experiment Name: Zm_Meristem_P Parameter: Plant Line Value: 35A19
  misc_feature: MA Experiment 108536 PARAMETER Experiment Name: Zm_Meristem_P Parameter: Tissue Value: Shoot Meristem vs. Above Shoot Meristem
  misc_feature: MA Experiment ID: 108543 Result: Up-regulated in Transcription
  misc_feature: MA Experiment ID: 108545 Result: Up-regulated in Transcription
  misc_feature: MA Experiment 108545 PARAMETER Experiment Name: Zm_Imbibed_Seeds_P Parameter: Age (day) Value: 3 vs. 2
  misc_feature: MA Experiment 108545 PARAMETER Experiment Name: Zm_Imbibed_Seeds_P Parameter: Organism Value: Zea mays
  misc_feature: MA Experiment 108545 PARAMETER Experiment Name: Zm_Imbibed_Seeds_P Parameter: Plant Line Value: 35A19
  misc_feature: MA Experiment 108545 PARAMETER Experiment Name: Zm_Imbibed_Seeds_P Parameter: Tissue Value: Aerial vs. Embryo
  misc_feature: MA Experiment ID: 108546 Result: Down-regulated in Transcription
  misc_feature: MA Experiment 108546 PARAMETER Experiment Name: Zm_Imbibed_Seeds_P Parameter: Age (day) Value: 3 vs. 2
  misc_feature: MA Experiment 108546 PARAMETER Experiment Name: Zm_Imbibed_Seeds_P Parameter: Organism Value: Zea mays
  misc_feature: MA Experiment 108546 PARAMETER Experiment Name: Zm_Imbibed_Seeds_P Parameter: Plant Line Value: 35A19
  misc_feature: MA Experiment 108546 PARAMETER Experiment Name: Zm_Imbibed_Seeds_P Parameter: Tissue Value: Roots vs. Embryo
  misc_feature: MA Experiment ID: 108547 Result: Up-regulated in Transcription
  misc_feature: MA Experiment 108547 PARAMETER Experiment Name: Zm_Imbibed_Seeds_P Parameter: Age (day) Value: 4 vs. 2
  misc_feature: MA Experiment 108547 PARAMETER Experiment Name: Zm_Imbibed_Seeds_P Parameter: Organism Value: Zea mays
  misc_feature: MA Experiment 108547 PARAMETER Experiment Name: Zm_Imbibed_Seeds_P Parameter: Plant Line Value: 35A19
  misc_feature: MA Experiment 108547 PARAMETER Experiment Name: Zm_Imbibed_Seeds_P Parameter: Tissue Value: Aerial vs. Embryo
  misc_feature: MA Experiment ID: 108687 Result: Down-regulated in Transcription
  misc_feature: MA Experiment 108687 PARAMETER Experiment Name: Zm_Embryos-Flowers__P Parameter: Tissue Value: Embryo vs. Aerial+
  misc_feature: MA Experiment ID: 20000492 Result: Down-regulated in Transcription
  misc_feature: MA Experiment 20000492 PARAMETER Experiment Name: Zm_Hybrid_Seed_Dev_P Parameter: DAP Value: 12
  misc_feature: MA Experiment 20000492 PARAMETER Experiment Name: Zm_Hybrid_Seed_Dev_P Parameter: Organism Value: Zea mays
  misc_feature: MA Experiment 20000492 PARAMETER Experiment Name: Zm_Hybrid_Seed_Dev_P Parameter: Plant Line Value: 35A19
  misc_feature: MA Experiment 20000492 PARAMETER Experiment Name: Zm_Hybrid_Seed_Dev_P Parameter: Tissue Value: Fert Kernel vs. Unfert Floret
  misc_feature: MA Experiment ID: 20000535 Result: Down-regulated in Transcription
  misc_feature: MA Experiment 20000535 PARAMETER Experiment Name: Zm_Hybrid_Seed_Dev_P Parameter: DAP Value: 30 vs. 12
  misc_feature: MA Experiment 20000535 PARAMETER Experiment Name: Zm_Hybrid_Seed_Dev_P Parameter: Organism Value: Zea mays
  misc_feature: MA Experiment 20000535 PARAMETER Experiment Name: Zm_Hybrid_Seed_Dev_P Parameter: Plant Line Value: 35A19
  misc_feature: MA Experiment 20000535 PARAMETER Experiment Name: Zm_Hybrid_Seed_Dev_P Parameter: Tissue Value: Embryo vs. Unfert Floret
agtttaatacaaaccaggcttgctcgtggcggcaaaaaaccaacgtgcttgatctccctccgccactccatccatctcctcgctcccagtccccgggaagcatggcgtccgtcaccgcccgcgccccggtagcggcccttcgcccgtcgtcggcatcgctcaagtcgtcgtcggccttccttggccactctagccgcctcggccgcaccgcgtctcccacgaggcgcagcctcaaggcggaggccaagggcgagtggctccccggccttccctccccctcctacctcgacggcagcctggcgggtgacaatggcttcgacccgttgggcctggcggaggaccccgagaacctgcggtggttcgtgcaggcggagctggtgaacggccggtgggccatgcttggcgtggccgggatgctcatcccggaggtgctgaccaaagccgggctgatcaacgcgccgcagtggtacgacgccagcaagtcggagtacttcgcgtcgtcgtccacgctgttcgtggtcgagttcatcctgttccactacgtggagatccggcggtggcaggacatcaagaaccccggcagcgtcaaccaggaccccatcttcaagagctacagcctgccgccgcacgagtgcggctacccgggcagcgtcttcaacccgctcaacttcgcgcccacgctcgaggccaaggagaaggagctcgccaacgggaggctggcgatgctggcgttcctgggcttcctgatccagcacaacgtcaccggcaaggggcccttcgacaacctgctgcagcacctgtctgacccatggcacaacaccatcatccagaccttctccggttgagtcgaggtcgaggagggatacgatccatcgctggtgagctgatatggactggaaggcaaacattgaaaccttaagttcctttctggatcagtttgtgtgtgttgttaatctatctggagggtacagattcgggccgtgttgcaatgcatgcatggtctgaagggagcgagggctgaggagtgactggtatgtacattagctgaaggggatattaagggtagagatcgtttgatcagtatcatctgtatatccccatgcatggggtttcgttttgtgcgcttacttctggcttgccagcgtatggttcaatgtggaaacacatgtattagtacg

SEQ ID NO: 7270 - protein, 280 aa, Zea mays subsp. mays
  peptide (1)..(280): Ceres Seq. ID no. 12352503
  misc_feature (91)..(252): Pfam Name: Chlorophyll A-B binding protein Pfam Description: Chlorophyll A-B binding protein
  misc_feature (34)..(280): Homolog of NCBI NO: 3789952 NR Description: chlorophyll a/b-binding protein presursor [Oryza
  misc_feature (55)..(280): Homolog of NCBI NO: 9624495 NR Description: chlorophyll a/b-binding protein precursor
  misc_feature (34)..(279): Homolog of NCBI NO: 100197 NR Description: chlorophyll a/b-binding protein (cab-12) - tomato
  misc_feature (34)..(279): Homolog of NCBI NO: 100196 NR Description: chlorophyll a/b-binding protein (cab-11) - tomato
  misc_feature (34)..(280): Homolog of NCBI NO: 13385204 NR Description: cDNA sequence BC002118; hypothetical protein, [Mus musculus] >gi|12805303|gb|AAH02118.1| Unknown (protein for
  misc_feature (34)..(280): Homolog of NCBI NO: 322392 NR Description: chlorophyll a/b-binding protein type 4,
  misc_feature (44)..(280): Homolog of NCBI NO: 322393 NR Description: chlorophyll a/b-binding protein type 4, I - Scotch pine (fragment) >gi|829287|emb|CAA78901.1| Lhca4
  misc_feature (34)..(279): Homolog of NCBI NO: 30692874 NR Description: light-harvesting chlorophyll a/b binding protein
  misc_feature (34)..(280): Homolog of NCBI NO: 20218813 NR Description: putative chlorophyll a/b-binding protein type 4
  misc_feature (34)..(280): Homolog of NCBI NO: 11277626 NR Description: chlorophyll a/b-binding protein [imported] -
FNTNQACSWRQKTNVLDLPPPLHPSPRSQSPGSMASVTARAPVAALRPSSASLKSSSAFLGHSSRLGRTASPTRRSLKAEAKGEWLPGLPSPSYLDGSLAGDNGFDPLGLAEDPENLRWFVQAELVNGRWAMLGVAGMLIPEVLTKAGLINAPQWYDASKSEYFASSSTLFVVEFILFHYVEIRRWQDIKNPGSVNQDPIFKSYSLPPHECGYPGSVFNPLNFAPTLEAKEKELANGRLAMLAFLGFLIQHNVTGKGPFDNLLQHLSDPWHNTIIQTFSG

SEQ ID NO: 7271 - protein, 247 aa, Zea mays subsp. mays
  peptide (1)..(247): Ceres Seq. ID no. 12352504
  misc_feature (58)..(219): Pfam Name: Chlorophyll A-B binding protein Pfam Description: Chlorophyll A-B binding protein
  misc_feature (1)..(247): Homolog of NCBI NO: 3789952 NR Description: chlorophyll a/b-binding protein presursor [Oryza
  misc_feature (22)..(247): Homolog of NCBI NO: 9624495 NR Description: chlorophyll a/b-binding protein precursor
  misc_feature (1)..(246): Homolog of NCBI NO: 100197 NR Description: chlorophyll a/b-binding protein (cab-12) - tomato
  misc_feature (1)..(246): Homolog of NCBI NO: 100196 NR Description: chlorophyll a/b-binding protein (cab-11) - tomato
  misc_feature (1)..(247): Homolog of NCBI NO: 13385204 NR Description: cDNA sequence BC002118; hypothetical protein, [Mus musculus] >gi|12805303|gb|AAH02118.1| Unknown (protein for
  misc_feature (1)..(247): Homolog of NCBI NO: 322392 NR Description: chlorophyll a/b-binding protein type 4,
  misc_feature (11)..(247): Homolog of NCBI NO: 322393 NR Description: chlorophyll a/b-binding protein type 4, I - Scotch pine (fragment) >gi|829287|emb|CAA78901.1| Lhca4
  misc_feature (1)..(246): Homolog of NCBI NO: 30692874 NR Description: light-harvesting chlorophyll a/b binding protein
  misc_feature (1)..(247): Homolog of NCBI NO: 20218813 NR Description: putative chlorophyll a/b-binding protein type 4
  misc_feature (1)..(247): Homolog of NCBI NO: 11277626 NR Description: chlorophyll a/b-binding protein [imported] -
MASVTARAPVAALRPSSASLKSSSAFLGHSSRLGRTASPTRRSLKAEAKGEWLPGLPSPSYLDGSLAGDNGFDPLGLAEDPENLRWFVQAELVNGRWAMLGVAGMLIPEVLTKAGLINAPQWYDASKSEYFASSSTLFVVEFILFHYVEIRRWQDIKNPGSVNQDPIFKSYSLPPHECGYPGSVFNPLNFAPTLEAKEKELANGRLAMLAFLGFLIQHNVTGKGPFDNLLQHLSDPWHNTIIQTFSG

SEQ ID NO: 7272 - protein, 149 aa, Zea mays subsp. mays
  peptide (1)..(149): Ceres Seq. ID no. 12352505
  misc_feature (1)..(121): Pfam Name: Chlorophyll A-B binding protein Pfam Description: Chlorophyll A-B binding protein
  misc_feature (1)..(149): Homolog of NCBI NO: 3789952 NR Description: chlorophyll a/b-binding protein presursor [Oryza
  misc_feature (1)..(149): Homolog of NCBI NO: 9624495 NR Description: chlorophyll a/b-binding protein precursor
  misc_feature (1)..(148): Homolog of NCBI NO: 100197 NR Description: chlorophyll a/b-binding protein (cab-12) - tomato
  misc_feature (1)..(148): Homolog of NCBI NO: 100196 NR Description: chlorophyll a/b-binding protein (cab-11) - tomato
  misc_feature (1)..(149): Homolog of NCBI NO: 13385204 NR Description: cDNA sequence BC002118; hypothetical protein, [Mus musculus] >gi|12805303|gb|AAH02118.1| Unknown (protein for
  misc_feature (1)..(149): Homolog of NCBI NO: 322392 NR Description: chlorophyll a/b-binding protein type 4,
  misc_feature (1)..(149): Homolog of NCBI NO: 322393 NR Description: chlorophyll a/b-binding protein type 4, I - Scotch pine (fragment) >gi|829287|emb|CAA78901.1| Lhca4
  misc_feature (1)..(148): Homolog of NCBI NO: 30692874 NR Description: light-harvesting chlorophyll a/b binding protein
  misc_feature (1)..(149): Homolog of NCBI NO: 20218813 NR Description: putative chlorophyll a/b-binding protein type 4
  misc_feature (1)..(149): Homolog of NCBI NO: 11277626 NR Description: chlorophyll a/b-binding protein [imported] -
MLGVAGMLIPEVLTKAGLINAPQWYDASKSEYFASSSTLFVVEFILFHYVEIRRWQDIKNPGSVNQDPIFKSYSLPPHECGYPGSVFNPLNFAPTLEAKEKELANGRLAMLAFLGFLIQHNVTGKGPFDNLLQHLSDPWHNTIIQTFSG

SEQ ID NO: 7273 - DNA, 1696 bp, Zea mays subsp. mays
  misc_feature (1)..(1696): Ceres Seq. ID no. 12352506
  misc_feature: MA Experiment ID: 108522 Result: Down-regulated in Transcription
  misc_feature: MA Experiment 108522 PARAMETER Experiment Name: Zm_42deg_Heat_P Parameter: Age (day) Value: 8
  misc_feature: MA Experiment 108522 PARAMETER Experiment Name: Zm_42deg_Heat_P Parameter: Organism Value: Zea mays
  misc_feature: MA Experiment 108522 PARAMETER Experiment Name: Zm_42deg_Heat_P Parameter: Plant Line Value: 35A19
  misc_feature: MA Experiment 108522 PARAMETER Experiment Name: Zm_42deg_Heat_P Parameter: Temperature (deg C) Value: 42 vs. 22
  misc_feature: MA Experiment 108522 PARAMETER Experiment Name: Zm_42deg_Heat_P Parameter: Timepoint (hr) Value: 1
  misc_feature: MA Experiment 108522 PARAMETER Experiment Name: Zm_42deg_Heat_P Parameter: Tissue Value: Aerial
  misc_feature: MA Experiment ID: 108523 Result: Down-regulated in Transcription
  misc_feature: MA Experiment 108523 PARAMETER Experiment Name: Zm_42deg_Heat_P Parameter: Age (day) Value: 8
  misc_feature: MA Experiment 108523 PARAMETER Experiment Name: Zm_42deg_Heat_P Parameter: Organism Value: Zea mays
  misc_feature: MA Experiment 108523 PARAMETER Experiment Name: Zm_42deg_Heat_P Parameter: Plant Line Value: 35A19
  misc_feature: MA Experiment 108523 PARAMETER Experiment Name: Zm_42deg_Heat_P Parameter: Temperature (deg C) Value: 42 vs. 22
  misc_feature: MA Experiment 108523 PARAMETER Experiment Name: Zm_42deg_Heat_P Parameter: Timepoint (hr) Value: 6
  misc_feature: MA Experiment 108523 PARAMETER Experiment Name: Zm_42deg_Heat_P Parameter: Tissue Value: Aerial
  misc_feature: MA Experiment ID: 108535 Result: Down-regulated in Transcription
  misc_feature: MA Experiment 108535 PARAMETER Experiment Name: Zm_Meristem_P Parameter: Age (day) Value: 8
  misc_feature: MA Experiment 108535 PARAMETER Experiment Name: Zm_Meristem_P Parameter: Organism Value: Zea mays
  misc_feature: MA Experiment 108535 PARAMETER Experiment Name: Zm_Meristem_P Parameter: Plant Line Value: 35A19
  misc_feature: MA Experiment 108535 PARAMETER Experiment Name: Zm_Meristem_P Parameter: Tissue Value: Root Meristem vs. Above Root Meristem
  misc_feature: MA Experiment ID: 108556 Result: Down-regulated in Transcription
  misc_feature: MA Experiment 108556 PARAMETER Experiment Name: Zm_Drought_P Parameter: Age (day) Value: 9
  misc_feature: MA Experiment 108556 PARAMETER Experiment Name: Zm_Drought_P Parameter: Organism Value: Zea mays
  misc_feature: MA Experiment 108556 PARAMETER Experiment Name: Zm_Drought_P Parameter: Plant Line Value: 35A19
  misc_feature: MA Experiment 108556 PARAMETER Experiment Name: Zm_Drought_P Parameter: Timepoint (hr) Value: 24
  misc_feature: MA Experiment 108556 PARAMETER Experiment Name: Zm_Drought_P Parameter: Tissue Value: Aerial
  misc_feature: MA Experiment 108556 PARAMETER Experiment Name: Zm_Drought_P Parameter: Treatment Value: Drought vs. No Drought
  misc_feature: MA Experiment ID: 108559 Result: Down-regulated in Transcription
  misc_feature: MA Experiment 108559 PARAMETER Experiment Name: Zm_5mM_NO_P Parameter: Age (day) Value: 8
  misc_feature: MA Experiment 108559 PARAMETER Experiment Name: Zm_5mM_NO_P Parameter: Organism Value: Zea mays
  misc_feature: MA Experiment 108559 PARAMETER Experiment Name: Zm_5mM_NO_P Parameter: Plant Line Value: 35A19
  misc_feature: MA Experiment 108559 PARAMETER Experiment Name: Zm_5mM_NO_P Parameter: Timepoint (hr) Value: 12
  misc_feature: MA Experiment 108559 PARAMETER Experiment Name: Zm_5mM_NO_P Parameter: Tissue Value: Aerial
  misc_feature: MA Experiment 108559 PARAMETER Experiment Name: Zm_5mM_NO_P Parameter: Treatment Value: 5mM NO vs. No Treatment
  misc_feature: MA Experiment ID: 108687 Result: Down-regulated in Transcription
  misc_feature: MA Experiment 108687 PARAMETER Experiment Name: Zm_Embryos-Flowers__P Parameter: Tissue Value: Embryo vs. Aerial+
  misc_feature: MA Experiment ID: 108688 Result: Down-regulated in Transcription
  misc_feature: MA Experiment 108688 PARAMETER Experiment Name: Zm_Embryos-Flowers__P Parameter: Tissue Value: Immature Flowers vs. Aerial+
  misc_feature: MA Experiment ID: 20000108 Result: Down-regulated in Transcription
  misc_feature: MA Experiment 20000108 PARAMETER Experiment Name: Zm_Root-Tips_P Parameter: Age (day) Value: 12
  misc_feature: MA Experiment 20000108 PARAMETER Experiment Name: Zm_Root-Tips_P Parameter: Organism Value: Zea mays
  misc_feature: MA Experiment 20000108 PARAMETER Experiment Name: Zm_Root-Tips_P Parameter: Tissue Value: Root tips vs. Root mid region    35
  misc_feature: MA Experiment 20000108 PARAMETER Experiment Name: Zm_Root-Tips_P Parameter: Tissue Value: Root tips vs. Root mid region   Sequence Listing-Misc Features (4)
  misc_feature: MA Experiment ID: 20000477 Result: Down-regulated in Transcription
  misc_feature: MA Experiment 20000477 PARAMETER Experiment Name: Zm_5mM_SA_P Parameter: Age (day) Value: 10
  misc_feature: MA Experiment 20000477 PARAMETER Experiment Name: Zm_5mM_SA_P Parameter: Organism Value: Zea mays
  misc_feature: MA Experiment 20000477 PARAMETER Experiment Name: Zm_5mM_SA_P Parameter: Plant Line Value: 35A19
  misc_feature: MA Experiment 20000477 PARAMETER Experiment Name: Zm_5mM_SA_P Parameter: Timepoint (hr) Value: 48
  misc_feature: MA Experiment 20000477 PARAMETER Experiment Name: Zm_5mM_SA_P Parameter: Tissue Value: Aerial
  misc_feature: MA Experiment 20000477 PARAMETER Experiment Name: Zm_5mM_SA_P Parameter: Treatment Value: 5mM SA vs. No Treatment
  misc_feature: MA Experiment ID: 20000478 Result: Down-regulated in Transcription
  misc_feature: MA Experiment 20000478 PARAMETER Experiment Name: Zm_5mM_SA_P Parameter: Age (day) Value: 11
  misc_feature: MA Experiment 20000478 PARAMETER Experiment Name: Zm_5mM_SA_P Parameter: Organism Value: Zea mays
  misc_feature: MA Experiment 20000478 PARAMETER Experiment Name: Zm_5mM_SA_P Parameter: Plant Line Value: 35A19
  misc_feature: MA Experiment 20000478 PARAMETER Experiment Name: Zm_5mM_SA_P Parameter: Timepoint (hr) Value: 72
  misc_feature: MA Experiment 20000478 PARAMETER Experiment Name: Zm_5mM_SA_P Parameter: Tissue Value: Aerial
  misc_feature: MA Experiment 20000478 PARAMETER Experiment Name: Zm_5mM_SA_P Parameter: Treatment Value: 5mM SA vs. No Treatment
  misc_feature: MA Experiment ID: 20000479 Result: Down-regulated in Transcription
  misc_feature: MA Experiment 20000479 PARAMETER Experiment Name: Zm_Drought_P Parameter: Age (day) Value: 10
  misc_feature: MA Experiment 20000479 PARAMETER Experiment Name: Zm_Drought_P Parameter: Organism Value: Zea mays
  misc_feature: MA Experiment 20000479 PARAMETER Experiment Name: Zm_Drought_P Parameter: Plant Line Value: 35A19
  misc_feature: MA Experiment 20000479 PARAMETER Experiment Name: Zm_Drought_P Parameter: Timepoint (hr) Value: 48
  misc_feature: MA Experiment 20000479 PARAMETER Experiment Name: Zm_Drought_P Parameter: Tissue Value: Aerial
  misc_feature: MA Experiment 20000479 PARAMETER Experiment Name: Zm_Drought_P Parameter: Treatment Value: Drought vs. No Drought
  misc_feature: MA Experiment ID: 20000534 Result: Down-regulated in Transcription
  misc_feature: MA Experiment 20000534 PARAMETER Experiment Name: Zm_Hybrid_Pollen_P Parameter: Age (day) Value: 8
  misc_feature: MA Experiment 20000534 PARAMETER Experiment Name: Zm_Hybrid_Pollen_P Parameter: Organism Value: Zea mays
  misc_feature: MA Experiment 20000534 PARAMETER Experiment Name: Zm_Hybrid_Pollen_P Parameter: Plant Line Value: 35A19
  misc_feature: MA Experiment 20000534 PARAMETER Experiment Name: Zm_Hybrid_Pollen_P Parameter: Tissue Value: Pollen vs. Aerial
  misc_feature: MA Experiment ID: 20000535 Result: Down-regulated in Transcription
  misc_feature: MA Experiment 20000535 PARAMETER Experiment Name: Zm_Hybrid_Seed_Dev_P Parameter: DAP Value: 30 vs. 12
  misc_feature: MA Experiment 20000535 PARAMETER Experiment Name: Zm_Hybrid_Seed_Dev_P Parameter: Organism Value: Zea mays
  misc_feature: MA Experiment 20000535 PARAMETER Experiment Name: Zm_Hybrid_Seed_Dev_P Parameter: Plant Line Value: 35A19
  misc_feature: MA Experiment 20000535 PARAMETER Experiment Name: Zm_Hybrid_Seed_Dev_P Parameter: Tissue Value: Embryo vs. Unfert Floret
atagagagagccactggccacaggtaggcaggcaggaggacgagtcggcaaggaagctgcctgctttcagaaagagtcatagagatagttattaagatggcgttgcttcggctgcttgccctctccctgctcttcgcagtggccactcctgtcagggacatcgcccacgatgcctgctcgtcagaagtgaaggatttccagcacctgaacaacagctcggggctccacctgacgctgcaccacccgcagagcccctgctccccggcgccgctgcccgccgacctccccttctccgcggtgctcgcccacgacggcgcgcgcatcgcgtcgctcgccgcgcgcctcgccaagacgccgtcctctcggcccaccttgcttgacgagagccgcgcggggtcgtcgtcgtcgtcccccgatgacgagtccctcgcgtccgtgccgctcggcccgggcacgtccgtcggcgtcggcaactacgtcacccgcatgggcctcggcacgccggccaagtcgtacgtcatggtcgtggacacggggtcctcgctcacctggctccagtgctccccctgcgtcgtgtcgtgccaccgccagtccggcccggtgttcaaccccaaggcgtccagctcctacgcctccgtgtcctgctccgcgcagcagtgcagcgacctcaccaccgccacgctcaaccccgcctcctgctccacctccaacgtctgcatctaccaggccagctacggcgacagctccttctcggtcgggtatctgagcaaggacaccgtgtcgttcggctccaccagcgtgcccaacttctactacggctgcggacaagacaacgagggcctcttcgggcagtcggcggggctcatcggcctggcgcgtaacaagctgtcgctgctgtaccagctggcgccgagcatgggctactccttctcctactgcctcccgacgtcgtcgtcgtcctcctcggggtacctgtccatcggctcctacaacccggggcagtactcgtacacgcccatggcgtcgagctcgctggacgactcgctctacttcatcaagatgaccgggatcaaggtcgcgggcaagccgctgtccgtgtcgtcgtcggcctactccagcctgccgacgatcatcgactccggcacggtgatcacgcgcctgcctacgggcgtgtactcggcgctcagcaaggcggtggcgggcgccatgaaggggacgccccgcgcgtcggcgttctccatcctggacacgtgcttccagggccaggcggcgcggctgcgcgtgcccgaggtcaccatggccttcgccggcggcgcggcgctcaagctggccgccaggaacctgctggtggacgtggacagcgccaccacgtgcctggccttcgcgcccgcccggagcgccgccatcatcgggaacacgcagcagcagacgttcagcgtcgtctacgacgtcaagaacagcaagatcgggttcgccgccgccggctgcagctgagaagcgacacctacatacacgcgcatgcacagaccgactcggcaactaaaactaaaacgagcagcgcatgcatgcatctaccgtccggtttcgtctgaaaccatcattaatttcgatcgtccactccacgcacagcaagttctttacggaccttgccgcatatgatatgtacatggtgacaagataaggtacaggagaattg

SEQ ID NO: 7274 - protein, 465 aa, Zea mays subsp. mays
  peptide (1)..(465): Ceres Seq. ID no. 12352507
  misc_feature (96)..(459): Pfam Name: Eukaryotic aspartyl protease Pfam Description: Eukaryotic aspartyl protease
  misc_feature (42)..(465): Homolog of NCBI NO: 24430421 NR Description: 41 kD chloroplast nucleoid DNA binding protein
  misc_feature (42)..(465): Homolog of NCBI NO: 7489168 NR Description: nucleoid DNA-binding protein cnd41, chloroplast - tobacco >gi|2541876|dbj|BAA22813.1| CND41, chloroplast nucleoid
  misc_feature (19)..(465): Homolog of NCBI NO: 22326716 NR Description: nucleoid DNA-binding protein cnd41 - like protein id: At5g10770.1, supported by cDNA: gi_18700102 thaliana] >gi|18700103|gb|AAL77663.1| AT5g10770/T30N20_40
  misc_feature (41)..(465): Homolog of NCBI NO: 11358588 NR Description: nucleoid DNA-binding protein cnd41-like protein -
  misc_feature (1)..(464): Homolog of NCBI NO: 34895664 NR Description: nucleoid DNA-binding protein cnd41-like protein
  misc_feature (46)..(464): Homolog of NCBI NO: 24417232 NR Description: unknown [Arabidopsis thaliana]
  misc_feature (18)..(464): Homolog of NCBI NO: 15229656 NR Description: putative chloroplast nucleoid DNA-binding protein id: At3g18490.1 [Arabidopsis thaliana]
  misc_feature (18)..(464): Homolog of NCBI NO: 19424106 NR Description: putative chloroplast nucleoid DNA-binding protein
  misc_feature (46)..(464): Homolog of NCBI NO: 15238250 NR Description: nucleoid DNA-binding protein cnd41 - like protein id: At5g10760.1, supported by cDNA: gi_18176135
  misc_feature (67)..(464): Homolog of NCBI NO: 15222611 NR Description: hypothetical protein; protein id: At1g25510.1, by cDNA: gi_20466515 [Arabidopsis thaliana]
MALLRLLALSLLFAVATPVRDIAHDACSSEVKDFQHLNNSSGLHLTLHHPQSPCSPAPLPADLPFSAVLAHDGARIASLAARLAKTPSSRPTLLDESRAGSSSSSPDDESLASVPLGPGTSVGVGNYVTRMGLGTPAKSYVMVVDTGSSLTWLQCSPCVVSCHRQSGPVFNPKASSSYASVSCSAQQCSDLTTATLNPASCSTSNVCIYQASYGDSSFSVGYLSKDTVSFGSTSVPNFYYGCGQDNEGLFGQSAGLIGLARNKLSLLYQLAPSMGYSFSYCLPTSSSSSSGYLSIGSYNPGQYSYTPMASSSLDDSLYFIKMTGIKVAGKPLSVSSSAYSSLPTIIDSGTVITRLPTGVYSALSKAVAGAMKGTPRASAFSILDTCFQGQAARLRVPEVTMAFAGGAALKLAARNLLVDVDSATTCLAFAPARSAAIIGNTQQQTFSVVYDVKNSKIGFAAAGCS

SEQ ID NO: 7275 - protein, 335 aa, Zea mays subsp. mays
  peptide (1)..(335): Ceres Seq. ID no. 12352508
  misc_feature (1)..(329): Pfam Name: Eukaryotic aspartyl protease Pfam Description: Eukaryotic aspartyl protease
  misc_feature (1)..(335): Homolog of NCBI NO: 24430421 NR Description: 41 kD chloroplast nucleoid DNA binding protein
  misc_feature (1)..(335): Homolog of NCBI NO: 7489168 NR Description: nucleoid DNA-binding protein cnd41, chloroplast - tobacco >gi|2541876|dbj|BAA22813.1| CND41, chloroplast nucleoid
  misc_feature (1)..(335): Homolog of NCBI NO: 22326716 NR Description: nucleoid DNA-binding protein cnd41 - like protein id: At5g10770.1, supported by cDNA: gi_18700102 thaliana] >gi|18700103|gb|AAL77663.1| AT5g10770/T30N20_40
  misc_feature (1)..(335): Homolog of NCBI NO: 11358588 NR Description: nucleoid DNA-binding protein cnd41-like protein -
  misc_feature (1)..(334): Homolog of NCBI NO: 34895664 NR Description: nucleoid DNA-binding protein cnd41-like protein
  misc_feature (1)..(334): Homolog of NCBI NO: 24417232 NR Description: unknown [Arabidopsis thaliana]
  misc_feature (1)..(334): Homolog of NCBI NO: 15229656 NR Description: putative chloroplast nucleoid DNA-binding protein id: At3g18490.1 [Arabidopsis thaliana]
  misc_feature (1)..(334): Homolog of NCBI NO: 19424106 NR Description: putative chloroplast nucleoid DNA-binding protein
  misc_feature (1)..(334): Homolog of NCBI NO: 15238250 NR Description: nucleoid DNA-binding protein cnd41 - like protein id: At5g10760.1, supported by cDNA: gi_18176135
  misc_feature (1)..(334): Homolog of NCBI NO: 15222611 NR Description: hypothetical protein; protein id: At1g25510.1, by cDNA: gi_20466515 [Arabidopsis thaliana]
MGLGTPAKSYVMVVDTGSSLTWLQCSPCVVSCHRQSGPVFNPKASSSYASVSCSAQQCSDLTTATLNPASCSTSNVCIYQASYGDSSFSVGYLSKDTVSFGSTSVPNFYYGCGQDNEGLFGQSAGLIGLARNKLSLLYQLAPSMGYSFSYCLPTSSSSSSGYLSIGSYNPGQYSYTPMASSSLDDSLYFIKMTGIKVAGKPLSVSSSAYSSLPTIIDSGTVITRLPTGVYSALSKAVAGAMKGTPRASAFSILDTCFQGQAARLRVPEVTMAFAGGAALKLAARNLLVDVDSATTCLAFAPARSAAIIGNTQQQTFSVVYDVKNSKIGFAAAGCS

SEQ ID NO: 7276 - protein, 324 aa, Zea mays subsp. mays
  peptide (1)..(324): Ceres Seq. ID no. 12352509
  misc_feature (1)..(318): Pfam Name: Eukaryotic aspartyl protease Pfam Description: Eukaryotic aspartyl protease
  misc_feature (1)..(324): Homolog of NCBI NO: 24430421 NR Description: 41 kD chloroplast nucleoid DNA binding protein
  misc_feature (1)..(324): Homolog of NCBI NO: 7489168 NR Description: nucleoid DNA-binding protein cnd41, chloroplast - tobacco >gi|2541876|dbj|BAA22813.1| CND41, chloroplast nucleoid
  misc_feature (1)..(324): Homolog of NCBI NO: 22326716 NR Description: nucleoid DNA-binding protein cnd41 - like protein id: At5g10770.1, supported by cDNA: gi_18700102 thaliana] >gi|18700103|gb|AAL77663.1| AT5g10770/T30N20_40
  misc_feature (1)..(324): Homolog of NCBI NO: 11358588 NR Description: nucleoid DNA-binding protein cnd41-like protein -
  misc_feature (1)..(323): Homolog of NCBI NO: 34895664 NR Description: nucleoid DNA-binding protein cnd41-like protein
  misc_feature (1)..(323): Homolog of NCBI NO: 24417232 NR Description: unknown [Arabidopsis thaliana]
  misc_feature (1)..(323): Homolog of NCBI NO: 15229656 NR Description: putative chloroplast nucleoid DNA-binding protein id: At3g18490.1 [Arabidopsis thaliana]
  misc_feature (1)..(323): Homolog of NCBI NO: 19424106 NR Description: putative chloroplast nucleoid DNA-binding protein
  misc_feature (1)..(323): Homolog of NCBI NO: 15238250 NR Description: nucleoid DNA-binding protein cnd41 - like protein id: At5g10760.1, supported by cDNA: gi_18176135
  misc_feature (1)..(323): Homolog of NCBI NO: 15222611 NR Description: hypothetical protein; protein id: At1g25510.1, by cDNA: gi_20466515 [Arabidopsis thaliana]
MVVDTGSSLTWLQCSPCVVSCHRQSGPVFNPKASSSYASVSCSAQQCSDLTTATLNPASCSTSNVCIYQASYGDSSFSVGYLSKDTVSFGSTSVPNFYYGCGQDNEGLFGQSAGLIGLARNKLSLLYQLAPSMGYSFSYCLPTSSSSSSGYLSIGSYNPGQYSYTPMASSSLDDSLYFIKMTGIKVAGKPLSVSSSAYSSLPTIIDSGTVITRLPTGVYSALSKAVAGAMKGTPRASAFSILDTCFQGQAARLRVPEVTMAFAGGAALKLAARNLLVDVDSATTCLAFAPARSAAIIGNTQQQTFSVVYDVKNSKIGFAAAGCS

SEQ ID NO: 7277 - DNA, 930 bp, Zea mays subsp. mays
  misc_feature (1)..(930): Ceres Seq. ID no. 12402182
  misc_feature: MA Experiment ID: 20000534 Result: Down-regulated in Transcription
  misc_feature: MA Experiment 20000534 PARAMETER Experiment Name: Zm_Hybrid_Pollen_P Parameter: Age (day) Value: 8
  misc_feature: MA Experiment 20000534 PARAMETER Experiment Name: Zm_Hybrid_Pollen_P Parameter: Organism Value: Zea mays
  misc_feature: MA Experiment 20000534 PARAMETER Experiment Name: Zm_Hybrid_Pollen_P Parameter: Plant Line Value: 35A19
  misc_feature: MA Experiment 20000534 PARAMETER Experiment Name: Zm_Hybrid_Pollen_P Parameter: Tissue Value: Pollen vs. Aerial
atcagcaagaacacgtctgcctctcaccaaccgcggcttgccaaccttctaattagcctttgacccacccccccgccgcccgccgccgcagaccatggaacacgcgtccgccttcctcgcgcgcgcgctcaccactccgctcccggcacccgccgccctcccgcgccgccgcccggctcgcgtggccgtcgccgccgcggcgccggagcgcaggccgccgggcgcggtggcgtccaccaccaantacgtcgtgccgctcgacgcggcgccgtccgggatcacgcgcccgctcgtcgagatcctccgcgacctcaacaagcgcgtcccggacgccatcgtgcggccctcctcccggcgcgcctccgcctccgaccccgtcatcccctggtaccatgccaataggatgctcagcttttatggtccaggttggtgtggggaagttcgtgatgttatttacactgacagtggaaaggtaacggtcatataccgcgtgactgtgcgcggaacagatggagaggttcacagggaggctgctggaacagcatcgctgagcgatgaacggttcgacgaccccgtgtctgcggcagaagaggcagcgttctgcaaagcctgcgcgaggttcggtttcggcctttacctgtaccatgaagacgagacaccatagaagaccaacaatttctccacatcgtctatgccggccctgttctgttcagatttgcgcttgaggggctgtgctctactgttgttgatcagtaagtctatcagatacccatcccattgctgctaggtccttgagctgttgtaacgctggtactatatgttgtttgctcgttttggtagctttgtcttgcaaaaaaatgttgtcagctacaattggtatggattatggaactattagtatatatgcaatacttttttgttgcttacctc

SEQ ID NO: 7278 - protein, 189 aa, Zea mays subsp. mays
  peptide (1)..(189): Ceres Seq. ID no. 12402183
  misc_feature (5)..(142): Homolog of NCBI NO: 27573357 NR Description: hypothetical protein [Oryza sativa (japonica
  misc_feature (51)..(185): Homolog of NCBI NO: 15238827 NR Description: putative protein; protein id: At5g47870.1, by cDNA: 38345. [Arabidopsis thaliana] gb|AAF26028.1~gene_id:MCA23.21~similar to unknown protein
  misc_feature (51)..(185): Homolog of NCBI NO: 21593360 NR Description: unknown [Arabidopsis thaliana]
  misc_feature (10)..(186): Homolog of NCBI NO: 34907336 NR Description: putative SnRK1-interacting protein 1 [Oryza
  misc_feature (56)..(186): Homolog of NCBI NO: 15224018 NR Description: hypothetical protein; protein id: At1g71310.1
  misc_feature (20)..(186): Homolog of NCBI NO: 9367245 NR Description: SnRK1-interacting protein 1 [Hordeum vulgare
  misc_feature (50)..(50): Xaa is any aa, unknown or other
MEHASAFLARALTTPLPAPAALPRRRPARVAVAAAAPERRPPGAVASTTXYVVPLDAAPSGITRPLVEILRDLNKRVPDAIVRPSSRRASASDPVIPWYHANRMLSFYGPGWCGEVRDVIYTDSGKVTVIYRVTVRGTDGEVHREAAGTASLSDERFDDPVSAAEEAAFCKACARFGFGLYLYHEDETP

SEQ ID NO: 7279 - DNA, 857 bp, Zea mays subsp. mays
  misc_feature (1)..(857): Ceres Seq. ID no. 12351562
  misc_feature: MA Experiment ID: 108504 Result: Down-regulated in Transcription
  misc_feature: MA Experiment 108504 PARAMETER Experiment Name: Zm_Drought_P Parameter: Age (day) Value: 8
  misc_feature: MA Experiment 108504 PARAMETER Experiment Name: Zm_Drought_P Parameter: Organism Value: Zea mays
  misc_feature: MA Experiment 108504 PARAMETER Experiment Name: Zm_Drought_P Parameter: Plant Line Value: 35A19
  misc_feature: MA Experiment 108504 PARAMETER Experiment Name: Zm_Drought_P Parameter: Timepoint (hr) Value: 12
  misc_feature: MA Experiment 108504 PARAMETER Experiment Name: Zm_Drought_P Parameter: Tissue Value: Aerial
  misc_feature: MA Experiment 108504 PARAMETER Experiment Name: Zm_Drought_P Parameter: Treatment Value: Drought vs. No Drought
  misc_feature: MA Experiment ID: 108513 Result: Down-regulated in Transcription
  misc_feature: MA Experiment 108513 PARAMETER Experiment Name: Zm_100uM_ABA_P Parameter: Age (day) Value: 8
  misc_feature: MA Experiment 108513 PARAMETER Experiment Name: Zm_100uM_ABA_P Parameter: Organism Value: Zea mays
  misc_feature: MA Experiment 108513 PARAMETER Experiment Name: Zm_100uM_ABA_P Parameter: Plant Line Value: 35A19
  misc_feature: MA Experiment 108513 PARAMETER Experiment Name: Zm_100uM_ABA_P Parameter: Timepoint (hr) Value: 6
  misc_feature: MA Experiment 108513 PARAMETER Experiment Name: Zm_100uM_ABA_P Parameter: Tissue Value: Aerial
  misc_feature: MA Experiment 108513 PARAMETER Experiment Name: Zm_100uM_ABA_P Parameter: Treatment Value: 100uM ABA vs. No Treatment
  misc_feature: MA Experiment ID: 108515 Result: Down-regulated in Transcription
  misc_feature: MA Experiment 108515 PARAMETER Experiment Name: Zm_2mM_SA_P Parameter: Age (day) Value: 8
  misc_feature: MA Experiment 108515 PARAMETER Experiment Name: Zm_2mM_SA_P Parameter: Organism Value: Zea mays
  misc_feature: MA Experiment 108515 PARAMETER Experiment Name: Zm_2mM_SA_P Parameter: Plant Line Value: 35A19
  misc_feature: MA Experiment 108515 PARAMETER Experiment Name: Zm_2mM_SA_P Parameter: Timepoint (hr) Value: 12
  misc_feature: MA Experiment 108515 PARAMETER Experiment Name: Zm_2mM_SA_P Parameter: Tissue Value: Aerial
  misc_feature: MA Experiment 108515 PARAMETER Experiment Name: Zm_2mM_SA_P Parameter: Treatment Value: 2mM SA vs. No Treatment
  misc_feature: MA Experiment ID: 108523 Result: Down-regulated in Transcription
  misc_feature: MA Experiment 108523 PARAMETER Experiment Name: Zm_42deg_Heat_P Parameter: Age (day) Value: 8
  misc_feature: MA Experiment 108523 PARAMETER Experiment Name: Zm_42deg_Heat_P Parameter: Organism Value: Zea mays
  misc_feature: MA Experiment 108523 PARAMETER Experiment Name: Zm_42deg_Heat_P Parameter: Plant Line Value: 35A19
  misc_feature: MA Experiment 108523 PARAMETER Experiment Name: Zm_42deg_Heat_P Parameter: Temperature (deg C) Value: 42 vs. 22
  misc_feature: MA Experiment 108523 PARAMETER Experiment Name: Zm_42deg_Heat_P Parameter: Timepoint (hr) Value: 6
  misc_feature: MA Experiment 108523 PARAMETER Experiment Name: Zm_42deg_Heat_P Parameter: Tissue Value: Aerial
  misc_feature: MA Experiment ID: 108535 Result: Up-regulated in Transcription
  misc_feature: MA Experiment 108535 PARAMETER Experiment Name: Zm_Meristem_P Parameter: Age (day) Value: 8
  misc_feature: MA Experiment 108535 PARAMETER Experiment Name: Zm_Meristem_P Parameter: Organism Value: Zea mays
  misc_feature: MA Experiment 108535 PARAMETER Experiment Name: Zm_Meristem_P Parameter: Plant Line Value: 35A19
  misc_feature: MA Experiment 108535 PARAMETER Experiment Name: Zm_Meristem_P Parameter: Tissue Value: Root Meristem vs. Above Root Meristem
  misc_feature: MA Experiment ID: 108540 Result: Down-regulated in Transcription
  misc_feature: MA Experiment 108540 PARAMETER Experiment Name: Zm_20percent_PEG_P Parameter: Age (day) Value: 8
  misc_feature: MA Experiment 108540 PARAMETER Experiment Name: Zm_20percent_PEG_P Parameter: Organism Value: Zea mays
  misc_feature: MA Experiment 108540 PARAMETER Experiment Name: Zm_20percent_PEG_P Parameter: Plant Line Value: 35A19
  misc_feature: MA Experiment 108540 PARAMETER Experiment Name: Zm_20percent_PEG_P Parameter: Timepoint (hr) Value: 6
  misc_feature: MA Experiment 108540 PARAMETER Experiment Name: Zm_20percent_PEG_P Parameter: Tissue Value: Aerial
  misc_feature: MA Experiment 108540 PARAMETER Experiment Name: Zm_20percent_PEG_P Parameter: Treatment Value: 20percent PEG vs. No Treatment
  misc_feature: MA Experiment ID: 108543 Result: Up-regulated in Transcription
  misc_feature: MA Experiment ID: 108544 Result: Down-regulated in Transcription
  misc_feature: MA Experiment ID: 108556 Result: Down-regulated in Transcription
  misc_feature: MA Experiment 108556 PARAMETER Experiment Name: Zm_Drought_P Parameter: Age (day) Value: 9
  misc_feature: MA Experiment 108556 PARAMETER Experiment Name: Zm_Drought_P Parameter: Organism Value: Zea mays
  misc_feature: MA Experiment 108556 PARAMETER Experiment Name: Zm_Drought_P Parameter: Plant Line Value: 35A19
  misc_feature: MA Experiment 108556 PARAMETER Experiment Name: Zm_Drought_P Parameter: Timepoint (hr) Value: 24
  misc_feature: MA Experiment 108556 PARAMETER Experiment Name: Zm_Drought_P Parameter: Tissue Value: Aerial
  misc_feature: MA Experiment 108556 PARAMETER Experiment Name: Zm_Drought_P Parameter: Treatment Value: Drought vs. No Drought
  misc_feature: MA Experiment ID: 108597 Result: Down-regulated in Transcription
  misc_feature: MA Experiment 108597 PARAMETER Experiment Name: Zm_100uM_ABA_P Parameter: Age (day) Value: 9
  misc_feature: MA Experiment 108597 PARAMETER Experiment Name: Zm_100uM_ABA_P Parameter: Organism Value: Zea mays
  misc_feature: MA Experiment 108597 PARAMETER Experiment Name: Zm_100uM_ABA_P Parameter: Plant Line Value: 35A19
  misc_feature: MA Experiment 108597 PARAMETER Experiment Name: Zm_100uM_ABA_P Parameter: Timepoint (hr) Value: 24
  misc_feature: MA Experiment 108597 PARAMETER Experiment Name: Zm_100uM_ABA_P Parameter: Tissue Value: Aerial
  misc_feature: MA Experiment 108597 PARAMETER Experiment Name: Zm_100uM_ABA_P Parameter: Treatment Value: 100uM ABA vs. No Treatment
  misc_feature: MA Experiment ID: 20000477 Result: Down-regulated in Transcription
  misc_feature: MA Experiment 20000477 PARAMETER Experiment Name: Zm_5mM_SA_P Parameter: Age (day) Value: 10
  misc_feature: MA Experiment 20000477 PARAMETER Experiment Name: Zm_5mM_SA_P Parameter: Organism Value: Zea mays
  misc_feature: MA Experiment 20000477 PARAMETER Experiment Name: Zm_5mM_SA_P Parameter: Plant Line Value: 35A19
  misc_feature: MA Experiment 20000477 PARAMETER Experiment Name: Zm_5mM_SA_P Parameter: Timepoint (hr) Value: 48
  misc_feature: MA Experiment 20000477 PARAMETER Experiment Name: Zm_5mM_SA_P Parameter: Tissue Value: Aerial
  misc_feature: MA Experiment 20000477 PARAMETER Experiment Name: Zm_5mM_SA_P Parameter: Treatment Value: 5mM SA vs. No Treatment
  misc_feature: MA Experiment ID: 20000478 Result: Down-regulated in Transcription
  misc_feature: MA Experiment 20000478 PARAMETER Experiment Name: Zm_5mM_SA_P Parameter: Age (day) Value: 11
  misc_feature: MA Experiment 20000478 PARAMETER Experiment Name: Zm_5mM_SA_P Parameter: Organism Value: Zea mays
  misc_feature: MA Experiment 20000478 PARAMETER Experiment Name: Zm_5mM_SA_P Parameter: Plant Line Value: 35A19
  misc_feature: MA Experiment 20000478 PARAMETER Experiment Name: Zm_5mM_SA_P Parameter: Timepoint (hr) Value: 72
  misc_feature: MA Experiment 20000478 PARAMETER Experiment Name: Zm_5mM_SA_P Parameter: Tissue Value: Aerial
  misc_feature: MA Experiment 20000478 PARAMETER Experiment Name: Zm_5mM_SA_P Parameter: Treatment Value: 5mM SA vs. No Treatment
  misc_feature: MA Experiment ID: 20000480 Result: Down-regulated in Transcription
  misc_feature: MA Experiment 20000480 PARAMETER Experiment Name: Zm_Drought_P Parameter: Age (day) Value: 11
  misc_feature: MA Experiment 20000480 PARAMETER Experiment Name: Zm_Drought_P Parameter: Organism Value: Zea mays
  misc_feature: MA Experiment 20000480 PARAMETER Experiment Name: Zm_Drought_P Parameter: Plant Line Value: 35A19
  misc_feature: MA Experiment 20000480 PARAMETER Experiment Name: Zm_Drought_P Parameter: Timepoint (hr) Value: 72
  misc_feature: MA Experiment 20000480 PARAMETER Experiment Name: Zm_Drought_P Parameter: Tissue Value: Aerial
  misc_feature: MA Experiment 20000480 PARAMETER Experiment Name: Zm_Drought_P Parameter: Treatment Value: Drought vs. No Drought
  misc_feature: MA Experiment ID: 20000535 Result: Up-regulated in Transcription
  misc_feature: MA Experiment 20000535 PARAMETER Experiment Name: Zm_Hybrid_Seed_Dev_P Parameter: DAP Value: 30 vs. 12
  misc_feature: MA Experiment 20000535 PARAMETER Experiment Name: Zm_Hybrid_Seed_Dev_P Parameter: Organism Value: Zea mays
  misc_feature: MA Experiment 20000535 PARAMETER Experiment Name: Zm_Hybrid_Seed_Dev_P Parameter: Plant Line Value: 35A19
  misc_feature: MA Experiment 20000535 PARAMETER Experiment Name: Zm_Hybrid_Seed_Dev_P Parameter: Tissue Value: Embryo vs. Unfert Floret
  misc_feature: MA Experiment ID: 20000626 Result: Down-regulated in Transcription
  misc_feature: MA Experiment 20000626 PARAMETER Experiment Name: Zm_Herbicide-Treatments_P Parameter: Timepoint (hr) Value: 12
  misc_feature: MA Experiment 20000626 PARAMETER Experiment Name: Zm_Herbicide-Treatments_P Parameter: Tissue Value: Aerial
  misc_feature: MA Experiment 20000626 PARAMETER Experiment Name: Zm_Herbicide-Treatments_P Parameter: Treatment Value: Roundup vs. No Treatment
  misc_feature: MA Experiment ID: 20000627 Result: Down-regulated in Transcription
  misc_feature: MA Experiment 20000627 PARAMETER Experiment Name: Zm_Herbicide-Treatments_P Parameter: Timepoint (hr) Value: 12
  misc_feature: MA Experiment 20000627 PARAMETER Experiment Name: Zm_Herbicide-Treatments_P Parameter: Tissue Value: Aerial
  misc_feature: MA Experiment 20000627 PARAMETER Experiment Name: Zm_Herbicide-Treatments_P Parameter: Treatment Value: Finale vs. No Treatment
  misc_feature: MA Experiment ID: 20000629 Result: Down-regulated in Transcription
  misc_feature: MA Experiment 20000629 PARAMETER Experiment Name: Zm_Herbicide-Treatments_P Parameter: Timepoint (hr) Value: 12
  misc_feature: MA Experiment 20000629 PARAMETER Experiment Name: Zm_Herbicide-Treatments_P Parameter: Tissue Value: Aerial
  misc_feature: MA Experiment 20000629 PARAMETER Experiment Name: Zm_Herbicide-Treatments_P Parameter: Treatment Value: Trimec vs. No Treatment
  misc_feature: MA Experiment ID: 20000632 Result: Down-regulated in Transcription
  misc_feature: MA Experiment 20000632 PARAMETER Experiment Name: Zm_Herbicide-Treatments_P Parameter: Timepoint (hr) Value: 4
  misc_feature: MA Experiment 20000632 PARAMETER Experiment Name: Zm_Herbicide-Treatments_P Parameter: Tissue Value: Aerial
  misc_feature: MA Experiment 20000632 PARAMETER Experiment Name: Zm_Herbicide-Treatments_P Parameter: Treatment Value: Glean vs. No Treatment
  misc_feature: MA Experiment ID: 20000633 Result: Down-regulated in Transcription
  misc_feature: MA Experiment 20000633 PARAMETER Experiment Name: Zm_Herbicide-Treatments_P Parameter: Timepoint (hr) Value: 4
  misc_feature: MA Experiment 20000633 PARAMETER Experiment Name: Zm_Herbicide-Treatments_P Parameter: Tissue Value: Aerial
  misc_feature: MA Experiment 20000633 PARAMETER Experiment Name: Zm_Herbicide-Treatments_P Parameter: Treatment Value: Trimec vs. No Treatment
  misc_feature: MA Experiment ID: 20001614 Result: Up-regulated in Transcription
  misc_feature: MA Experiment 20001614 PARAMETER Experiment Name: Zm_50ppm_KNO3_L-to-H_P Parameter: Age (day) Value: 21
  misc_feature: MA Experiment 20001614 PARAMETER Experiment Name: Zm_50ppm_KNO3_L-to-H_P Parameter: Organism Value: Zea mays
  misc_feature: MA Experiment 20001614 PARAMETER Experiment Name: Zm_50ppm_KNO3_L-to-H_P Parameter: Plant Line Value: 35A19
  misc_feature: MA Experiment 20001614 PARAMETER Experiment Name: Zm_50ppm_KNO3_L-to-H_P Parameter: Timepoint (hr) Value: 48
  misc_feature: MA Experiment 20001614 PARAMETER Experiment Name: Zm_50ppm_KNO3_L-to-H_P Parameter: Tissue Value: Roots
  misc_feature: MA Experiment 20001614 PARAMETER Experiment Name: Zm_50ppm_KNO3_L-to-H_P Parameter: Treatment Value: 50ppm KNO3 vs. 50ppm KCl
aacttccgcccaaatccaccaccgccataccagcgtgtccgcgattccgtcgagtagactgggcgagagagtagtctcggacgagaagaggcgaatatgagttccggcggcggcaggggcaagcccaaggggtccaaggctgtgtcgcggtcgaccaaggccgggctgcagttccccgtcggccgcatcgcgcgctacctcaaggccggcaagtacgccgagcgcgtcggcggtggtgcgcccgtctacctctccgccgtcctcgagtatctcgcggcagaggtaactgcctccctcttcttttccctgccctccatttctctccccccctccctttagcgaatccgtttggatgtttgttgaatctttgcggtacgctcataatcgtttgcctgcaggtgttggaactggcgggcaacgcggcgcgcgacaacaagaagaaccgcatcgtgccgcgtcacatccagctcgccgtgcgcaacgacgaggaactcagcaagctgctcggagctgtcaccatcgccgccggaggtgtgttgcccaacattcatcagacgctgctgcccaagaaggccggtgggaagggcaaggccgacatcggttccgcatcccaggagttctaagcggccgcggcggcggttgcaggtttctctgacttgttcgaactggagctccaacatgcatgaagtccccccgttgctcaagtttcgtcgattagtagtgttagggtgttttctatctttggttaggtttaggttgtctgatggatggtttatcagacgaaagtttggtgatcgagggcttcctgtatgtatcaatcaatcttgctggaatggaacaaatcgttggttgcagtt

SEQ ID NO: 7280 - protein, 100 aa, Zea mays subsp. mays
  peptide (1)..(100): Ceres Seq. ID no. 12351563
MFVESLRYAHNRLPAGVGTGGQRGARQQEEPHRAASHPARRAQRRGTQQAARSCHHRRRRCVAQHSSDAAAQEGRWEGQGRHRFRIPGVLSGRGGGCRFL

SEQ ID NO: 7281 - protein, 80 aa, Zea mays subsp. mays
  peptide (1)..(80): Ceres Seq. ID no. 12351564
  misc_feature (5)..(63): Pfam Name: Core histone H2A/H2B/H3/H4 Pfam Description: Core histone H2A/H2B/H3/H4
  misc_feature (1)..(63): Homolog of NCBI NO: 29612542 NR Description: Unknown (protein for IMAGE:6033710) [Danio rerio]
  misc_feature (5)..(63): Homolog of NCBI NO: 12856110 NR Description: unnamed protein product [Mus musculus]
  misc_feature (3)..(63): Homolog of NCBI NO: 21703314 NR Description: histone 2A Z variant [Boltenia villosa]
  misc_feature (3)..(63): Homolog of NCBI NO: 4504255 NR Description: H2A histone family, member Z; H2AZ histone [Homo >gi|7949045|ref|NP_058030.1| H2A histone family, member Z; H2A.Z [Mus musculus] >gi|12083611|ref|NP_073165.1| H2A histone
  misc_feature (3)..(63): Homolog of NCBI NO: 17738227 NR Description: Histone H2A variant CG5499-PA
  misc_feature (3)..(63): Homolog of NCBI NO: 6912616 NR Description: histone H2A.F/Z variant, isoform 1; purine-rich element protein B [Homo sapiens] >gi|20853431|ref|XP_126043.1| cDNA C530002L11 [Mus musculus] >gi|23619899|ref|XP_181324.1|
  misc_feature (1)..(63): Homolog of NCBI NO: 20514361 NR Description: histone H2A.F/Z [Toxoplasma gondii]
  misc_feature (5)..(63): Homolog of NCBI NO: 13385734 NR Description: RIKEN cDNA 4933432H23 [Mus musculus]
  misc_feature (1)..(63): Homolog of NCBI NO: 21321778 NR Description: unknown protein [Oryza sativa (japonica
  misc_feature (5)..(63): Homolog of NCBI NO: 15214035 NR Description: Histone H2A >gi|3204129|emb|CAA07234.1| histone
MSSGGGRGKPKGSKAVSRSTKAGLQFPVGRIARYLKAGKYAERVGGGAPVYLSAVLEYLAAEVTASLFFSLPSISLPPSL

SEQ ID NO: 7282 - protein, 59 aa, Zea mays subsp. mays
  peptide (1)..(59): Ceres Seq. ID no. 12351565
MHEVPPLLKFRRLVVLGCFLSLVRFRLSDGWFIRRKFGDRGLPVCINQSCWNGTNRWLQ

SEQ ID NO: 7283 - DNA, 765 bp, Zea mays subsp. mays
  misc_feature (1)..(765): Ceres Seq. ID no. 12403404
  misc_feature: MA Experiment ID: 108523 Result: Down-regulated in Transcription
  misc_feature: MA Experiment 108523 PARAMETER Experiment Name: Zm_42deg_Heat_P Parameter: Age (day) Value: 8
  misc_feature: MA Experiment 108523 PARAMETER Experiment Name: Zm_42deg_Heat_P Parameter: Organism Value: Zea mays
  misc_feature: MA Experiment 108523 PARAMETER Experiment Name: Zm_42deg_Heat_P Parameter: Plant Line Value: 35A19
  misc_feature: MA Experiment 108523 PARAMETER Experiment Name: Zm_42deg_Heat_P Parameter: Temperature (deg C) Value: 42 vs. 22
  misc_feature: MA Experiment 108523 PARAMETER Experiment Name: Zm_42deg_Heat_P Parameter: Timepoint (hr) Value: 6
  misc_feature: MA Experiment 108523 PARAMETER Experiment Name: Zm_42deg_Heat_P Parameter: Tissue Value: Aerial
  misc_feature: MA Experiment ID: 108528 Result: Up-regulated in Transcription
  misc_feature: MA Experiment 108528 PARAMETER Experiment Name: Zm_Imbibed_Seeds_P Parameter: Age (day) Value: 5 vs. 2
  misc_feature: MA Experiment 108528 PARAMETER Experiment Name: Zm_Imbibed_Seeds_P Parameter: Organism Value: Zea mays
  misc_feature: MA Experiment 108528 PARAMETER Experiment Name: Zm_Imbibed_Seeds_P Parameter: Plant Line Value: 35A19
  misc_feature: MA Experiment 108528 PARAMETER Experiment Name: Zm_Imbibed_Seeds_P Parameter: Tissue Value: Aerial vs. Embryo
  misc_feature: MA Experiment ID: 108529 Result: Down-regulated in Transcription
  misc_feature: MA Experiment 108529 PARAMETER Experiment Name: Zm_Imbibed_Seeds_P Parameter: Age (day) Value: 5 vs. 2
  misc_feature: MA Experiment 108529 PARAMETER Experiment Name: Zm_Imbibed_Seeds_P Parameter: Organism Value: Zea mays
  misc_feature: MA Experiment 108529 PARAMETER Experiment Name: Zm_Imbibed_Seeds_P Parameter: Plant Line Value: 35A19
  misc_feature: MA Experiment 108529 PARAMETER Experiment Name: Zm_Imbibed_Seeds_P Parameter: Tissue Value: Roots vs. Embryo
  misc_feature: MA Experiment ID: 108530 Result: Up-regulated in Transcription
  misc_feature: MA Experiment 108530 PARAMETER Experiment Name: Zm_Imbibed_Seeds_P Parameter: Age (day) Value: 6 vs. 2
  misc_feature: MA Experiment 108530 PARAMETER Experiment Name: Zm_Imbibed_Seeds_P Parameter: Organism Value: Zea mays
  misc_feature: MA Experiment 108530 PARAMETER Experiment Name: Zm_Imbibed_Seeds_P Parameter: Plant Line Value: 35A19
  misc_feature: MA Experiment 108530 PARAMETER Experiment Name: Zm_Imbibed_Seeds_P Parameter: Tissue Value: Aerial vs. Embryo
  misc_feature: MA Experiment ID: 108536 Result: Down-regulated in Transcription
  misc_feature: MA Experiment 108536 PARAMETER Experiment Name: Zm_Meristem_P Parameter: Age (day) Value: 8
  misc_feature: MA Experiment 108536 PARAMETER Experiment Name: Zm_Meristem_P Parameter: Organism Value: Zea mays
  misc_feature: MA Experiment 108536 PARAMETER Experiment Name: Zm_Meristem_P Parameter: Plant Line Value: 35A19
  misc_feature: MA Experiment 108536 PARAMETER Experiment Name: Zm_Meristem_P Parameter: Tissue Value: Shoot Meristem vs. Above Shoot Meristem
  misc_feature: MA Experiment ID: 108543 Result: Up-regulated in Transcription
  misc_feature: MA Experiment ID: 108545 Result: Up-regulated in Transcription
  misc_feature: MA Experiment 108545 PARAMETER Experiment Name: Zm_Imbibed_Seeds_P Parameter: Age (day) Value: 3 vs. 2
  misc_feature: MA Experiment 108545 PARAMETER Experiment Name: Zm_Imbibed_Seeds_P Parameter: Organism Value: Zea mays
  misc_feature: MA Experiment 108545 PARAMETER Experiment Name: Zm_Imbibed_Seeds_P Parameter: Plant Line Value: 35A19
  misc_feature: MA Experiment 108545 PARAMETER Experiment Name: Zm_Imbibed_Seeds_P Parameter: Tissue Value: Aerial vs. Embryo
  misc_feature: MA Experiment ID: 108546 Result: Down-regulated in Transcription
  misc_feature: MA Experiment 108546 PARAMETER Experiment Name: Zm_Imbibed_Seeds_P Parameter: Age (day) Value: 3 vs. 2
  misc_feature: MA Experiment 108546 PARAMETER Experiment Name: Zm_Imbibed_Seeds_P Parameter: Organism Value: Zea mays
  misc_feature: MA Experiment 108546 PARAMETER Experiment Name: Zm_Imbibed_Seeds_P Parameter: Plant Line Value: 35A19
  misc_feature: MA Experiment 108546 PARAMETER Experiment Name: Zm_Imbibed_Seeds_P Parameter: Tissue Value: Roots vs. Embryo
  misc_feature: MA Experiment ID: 108547 Result: Up-regulated in Transcription
  misc_feature: MA Experiment 108547 PARAMETER Experiment Name: Zm_Imbibed_Seeds_P Parameter: Age (day) Value: 4 vs. 2
  misc_feature: MA Experiment 108547 PARAMETER Experiment Name: Zm_Imbibed_Seeds_P Parameter: Organism Value: Zea mays
  misc_feature: MA Experiment 108547 PARAMETER Experiment Name: Zm_Imbibed_Seeds_P Parameter: Plant Line Value: 35A19
  misc_feature: MA Experiment 108547 PARAMETER Experiment Name: Zm_Imbibed_Seeds_P Parameter: Tissue Value: Aerial vs. Embryo
  misc_feature: MA Experiment ID: 108687 Result: Down-regulated in Transcription
  misc_feature: MA Experiment 108687 PARAMETER Experiment Name: Zm_Embryos-Flowers__P Parameter: Tissue Value: Embryo vs. Aerial+
  misc_feature: MA Experiment ID: 20000480 Result: Down-regulated in Transcription
  misc_feature: MA Experiment 20000480 PARAMETER Experiment Name: Zm_Drought_P Parameter: Age (day) Value: 11
  misc_feature: MA Experiment 20000480 PARAMETER Experiment Name: Zm_Drought_P Parameter: Organism Value: Zea mays
  misc_feature: MA Experiment 20000480 PARAMETER Experiment Name: Zm_Drought_P Parameter: Plant Line Value: 35A19
  misc_feature: MA Experiment 20000480 PARAMETER Experiment Name: Zm_Drought_P Parameter: Timepoint (hr) Value: 72
  misc_feature: MA Experiment 20000480 PARAMETER Experiment Name: Zm_Drought_P Parameter: Tissue Value: Aerial
  misc_feature: MA Experiment 20000480 PARAMETER Experiment Name: Zm_Drought_P Parameter: Treatment Value: Drought vs. No Drought
  misc_feature: MA Experiment ID: 20000626 Result: Down-regulated in Transcription
  misc_feature: MA Experiment 20000626 PARAMETER Experiment Name: Zm_Herbicide-Treatments_P Parameter: Timepoint (hr) Value: 12
  misc_feature: MA Experiment 20000626 PARAMETER Experiment Name: Zm_Herbicide-Treatments_P Parameter: Tissue Value: Aerial
  misc_feature: MA Experiment 20000626 PARAMETER Experiment Name: Zm_Herbicide-Treatments_P Parameter: Treatment Value: Roundup vs. No Treatment
ttccaaaacccaacgcggcaaacggcttcctcatccccctcccctcgccatggccgtccccacctccacctcctccccgctccccctcctcttcctccatcgctgcaccgcaaactctagcccctcggttctctccttcccgtcctccctccgcggcgcgtccctccgctcccgggccgcggccgcaccgcccgcagagaccctctctgccgacggcatccccgacgcgccaccggaaggggcgggaacgggaattccgttgccatcgtcgattggggatgatggggagcagcttgcacccaagcagaagatcagaatcaagctgcggtcctactgggtgccgttgatagaggactcgtgcaagaagataaccgaagctgccaaaacaaccaacgcaaagaccatgggtcccgttcctctgcccactaagaggagagtctattgtgtgcttaactctcctcacgtgcacaaggactcacggttccatttcgagatccggacgcatcagcggctgattgatatcatgtatccaactgcccaaacaattgattcgttgatgcaactccagctccctgccggtgtggatgttgaggttaagctatgattctgttggagctgaacttttcgaagtttgatgtaatgaggtattcattttctgcagcttttctctgggactgaaagaaatgtagtgcctgtactaggaaagaagatgttcagaattgaatgtacttgatttgaagtatatcagatgatatggttcatgcc

SEQ ID NO: 7284 - protein, 200 aa, Zea mays subsp. mays
  peptide (1)..(200): Ceres Seq. ID no. 12403405
  misc_feature (103)..(198): Pfam Name: Ribosomal protein S10p/S20e Pfam Description: Ribosomal protein S10p/S20e
  misc_feature (14)..(200): Homolog of NCBI NO: 7578929 NR Description: plastid ribosomal protein S10 precursor
  misc_feature (103)..(200): Homolog of NCBI NO: 11465752 NR Description: ribosomal protein S10 [Porphyra purpurea]
  misc_feature (103)..(200): Homolog of NCBI NO: 11467349 NR Description: ribosomal protein S10 [Cyanophora paradoxa]
  misc_feature (101)..(200): Homolog of NCBI NO: 23125142 NR Description: hypothetical protein [Nostoc punctiforme]
  misc_feature (101)..(200): Homolog of NCBI NO: 1350919 NR Description: 30S ribosomal protein S10 >gi|480901|pir||S37489
  misc_feature (17)..(200): Homolog of NCBI NO: 15231154 NR Description: 30S ribosomal protein S10, putative; protein id: supported by cDNA: 23372., supported by cDNA: gi_14326494, by cDNA: gi_16226586, supported by cDNA: gi_19548032 similarity
  misc_feature (101)..(200): Homolog of NCBI NO: 16330912 NR Description: 30S ribosomal protein S10 [Synechocystis sp. PCC
  misc_feature (100)..(200): Homolog of NCBI NO: 15644249 NR Description: ribosomal protein S10 [Thermotoga maritima]
  misc_feature (101)..(200): Homolog of NCBI NO: 11467745 NR Description: ribosomal protein S10 [Guillardia theta] Chloroplast 30S ribosomal protein S10 >gi|3603070|gb|AAC35731.1|
  misc_feature (101)..(200): Homolog of NCBI NO: 17231828 NR Description: 30S ribosomal protein S10 [Nostoc sp. PCC 7120]
SKTQRGKRLPHPPPLAMAVPTSTSSPLPLLFLHRCTANSSPSVLSFPSSLRGASLRSRAAAAPPAETLSADGIPDAPPEGAGTGIPLPSSIGDDGEQLAPKQKIRIKLRSYWVPLIEDSCKKITEAAKTTNAKTMGPVPLPTKRRVYCVLNSPHVHKDSRFHFEIRTHQRLIDIMYPTAQTIDSLMQLQLPAGVDVEVKL

SEQ ID NO: 7285 - protein, 184 aa, Zea mays subsp. mays
  peptide (1)..(184): Ceres Seq. ID no. 12403406
  misc_feature (87)..(182): Pfam Name: Ribosomal protein S10p/S20e Pfam Description: Ribosomal protein S10p/S20e
  misc_feature (1)..(184): Homolog of NCBI NO: 15231154 NR Description: 30S ribosomal protein S10, putative; protein id: supported by cDNA: 23372., supported by cDNA: gi_14326494, by cDNA: gi_16226586, supported by cDNA: gi_19548032 similarity
  misc_feature (1)..(184): Homolog of NCBI NO: 7578929 NR Description: plastid ribosomal protein S10 precursor
  misc_feature (87)..(184): Homolog of NCBI NO: 11465752 NR Description: ribosomal protein S10 [Porphyra purpurea]
  misc_feature (87)..(184): Homolog of NCBI NO: 11467349 NR Description: ribosomal protein S10 [Cyanophora paradoxa]
  misc_feature (85)..(184): Homolog of NCBI NO: 23125142 NR Description: hypothetical protein [Nostoc punctiforme]
  misc_feature (85)..(184): Homolog of NCBI NO: 1350919 NR Description: 30S ribosomal protein S10 >gi|480901|pir||S37489
  misc_feature (85)..(184): Homolog of NCBI NO: 16330912 NR Description: 30S ribosomal protein S10 [Synechocystis sp. PCC
  misc_feature (84)..(184): Homolog of NCBI NO: 15644249 NR Description: ribosomal protein S10 [Thermotoga maritima]
  misc_feature (85)..(184): Homolog of NCBI NO: 11467745 NR Description: ribosomal protein S10 [Guillardia theta] Chloroplast 30S ribosomal protein S10 >gi|3603070|gb|AAC35731.1|
  misc_feature (85)..(184): Homolog of NCBI NO: 17231828 NR Description: 30S ribosomal protein S10 [Nostoc sp. PCC 7120]
MAVPTSTSSPLPLLFLHRCTANSSPSVLSFPSSLRGASLRSRAAAAPPAETLSADGIPDAPPEGAGTGIPLPSSIGDDGEQLAPKQKIRIKLRSYWVPLIEDSCKKITEAAKTTNAKTMGPVPLPTKRRVYCVLNSPHVHKDSRFHFEIRTHQRLIDIMYPTAQTIDSLMQLQLPAGVDVEVKL

SEQ ID NO: 7286 - protein, 114 aa, Zea mays subsp. mays
  peptide (1)..(114): Ceres Seq. ID no. 12403407
  misc_feature (1)..(74): Pfam Name: Extensin-like region Pfam Description: Extensin-like region
  misc_feature (12)..(79): Homolog of NCBI NO: 38346367 NR Description: OSJNBa0011E07.13 [Oryza sativa (japonica
PKPNAANGFLIPLPSPWPSPPPPPPRSPSSSSIAAPQTLAPRFSPSRPPSAARPSAPGPRPHRPQRPSLPTASPTRHRKGREREFRCHRRLGMMGSSLHPSRRSESSCGPTGCR

SEQ ID NO: 7287 - DNA, 479 bp, Zea mays subsp. mays
  misc_feature (1)..(479): Ceres Seq. ID no. 6403897
  misc_feature: MA Experiment ID: 108527 Result: Up-regulated in Transcription
  misc_feature: MA Experiment 108527 PARAMETER Experiment Name: Zm_5mM_NO_P Parameter: Age (day) Value: 8
  misc_feature: MA Experiment 108527 PARAMETER Experiment Name: Zm_5mM_NO_P Parameter: Organism Value: Zea mays
  misc_feature: MA Experiment 108527 PARAMETER Experiment Name: Zm_5mM_NO_P Parameter: Plant Line Value: 35A19
  misc_feature: MA Experiment 108527 PARAMETER Experiment Name: Zm_5mM_NO_P Parameter: Timepoint (hr) Value: 6
  misc_feature: MA Experiment 108527 PARAMETER Experiment Name: Zm_5mM_NO_P Parameter: Tissue Value: Aerial
  misc_feature: MA Experiment 108527 PARAMETER Experiment Name: Zm_5mM_NO_P Parameter: Treatment Value: 5mM NO vs. No Treatment
atatatccagtcccgtggagtagcgacggtatcgtgggtagcttccttctcgcatcgactagcagtgtttcacgcggttttgtttggcctaggagctgctggatctgcacgtttagcccggttacgtacatatgaatgttgaaaagctcaagaagatggcaggtgctgtgcgcaccggnggggaagggtagcgtgcgcaggaagaagaaggcagtccacaagactacaaccacagatgacaaacggcttcaaagcaccttgaaaagaataggagtgaacagcattcctggtattgaagaggtcaacatctttaaggatgatgttgttattcagtttgtaaatcctaaagtgcaagcgtcaattggtgctaatacatgggtggtcagtggaactccacagacaaagaagctgcaagatctgcttccgtcgattatcaaccagcttggtcctgacaacctggacaatctgcggaggctcgc

SEQ ID NO: 7288 - protein, 114 aa, Zea mays subsp. mays
  peptide (1)..(114): Ceres Seq. ID no. 6403898
  misc_feature (33)..(91): Pfam Name: NAC domain Pfam Description: NAC domain
  misc_feature (16)..(113): Homolog of NCBI NO: 37535464 NR Description: putative transcription factor [Oryza sativa
  misc_feature (16)..(113): Homolog of NCBI NO: 24431603 NR Description: Putative transcription factor [Oryza sativa
  misc_feature (16)..(113): Homolog of NCBI NO: 29367567 NR Description: putative transcription factor BTF3 [Oryza sativa
  misc_feature (16)..(105): Homolog of NCBI NO: 29367579 NR Description: putative transcription factor BTF3 [Oryza sativa
  misc_feature (16)..(113): Homolog of NCBI NO: 27573340 NR Description: putative transcription factor [Oryza sativa
  misc_feature (16)..(113): Homolog of NCBI NO: 33945882 NR Description: transcription factor homolog BTF3-like protein
  misc_feature (16)..(112): Homolog of NCBI NO: 7441988 NR Description: transcription factor homolog BTF3 - curled-leaved >gi|1666173|emb|CAA70323.1| transcription factor [Nicotiana
  misc_feature (16)..(113): Homolog of NCBI NO: 15219413 NR Description: putative transcription factor BTF3 (RNA B transcription factor 3); protein id: At1g73230.1, supported by
  misc_feature (16)..(113): Homolog of NCBI NO: 21537065 NR Description: putative transcription factor BTF3 (RNA
  misc_feature (16)..(113): Homolog of NCBI NO: 15220876 NR Description: transcription factor, putative; protein id: supported by cDNA: 1105., supported by cDNA: gi_12083221, by cDNA: gi_15027872, supported by cDNA: gi_16323126, supported
  misc_feature (15)..(15): Xaa is any aa, unknown or other
MLKSSRRWQVLCAPXGKGSVRRKKKAVHKTTTTDDKRLQSTLKRIGVNSIPGIEEVNIFKDDVVIQFVNPKVQASIGANTWVVSGTPQTKKLQDLLPSIINQLGPDNLDNLRRL

SEQ ID NO: 7289 - DNA, 1147 bp, Zea mays subsp. mays
  misc_feature (1)..(1147): Ceres Seq. ID no. 13628192
  misc_feature: MA Experiment ID: 108527 Result: Up-regulated in Transcription
  misc_feature: MA Experiment 108527 PARAMETER Experiment Name: Zm_5mM_NO_P Parameter: Age (day) Value: 8
  misc_feature: MA Experiment 108527 PARAMETER Experiment Name: Zm_5mM_NO_P Parameter: Organism Value: Zea mays
  misc_feature: MA Experiment 108527 PARAMETER Experiment Name: Zm_5mM_NO_P Parameter: Plant Line Value: 35A19
  misc_feature: MA Experiment 108527 PARAMETER Experiment Name: Zm_5mM_NO_P Parameter: Timepoint (hr) Value: 6
  misc_feature: MA Experiment 108527 PARAMETER Experiment Name: Zm_5mM_NO_P Parameter: Tissue Value: Aerial
  misc_feature: MA Experiment 108527 PARAMETER Experiment Name: Zm_5mM_NO_P Parameter: Treatment Value: 5mM NO vs. No Treatment
  misc_feature: MA Experiment ID: 108535 Result: Up-regulated in Transcription
  misc_feature: MA Experiment 108535 PARAMETER Experiment Name: Zm_Meristem_P Parameter: Age (day) Value: 8
  misc_feature: MA Experiment 108535 PARAMETER Experiment Name: Zm_Meristem_P Parameter: Organism Value: Zea mays
  misc_feature: MA Experiment 108535 PARAMETER Experiment Name: Zm_Meristem_P Parameter: Plant Line Value: 35A19
  misc_feature: MA Experiment 108535 PARAMETER Experiment Name: Zm_Meristem_P Parameter: Tissue Value: Root Meristem vs. Above Root Meristem
  misc_feature: MA Experiment ID: 108544 Result: Down-regulated in Transcription
  misc_feature: MA Experiment ID: 108556 Result: Down-regulated in Transcription
  misc_feature: MA Experiment 108556 PARAMETER Experiment Name: Zm_Drought_P Parameter: Age (day) Value: 9
  misc_feature: MA Experiment 108556 PARAMETER Experiment Name: Zm_Drought_P Parameter: Organism Value: Zea mays
  misc_feature: MA Experiment 108556 PARAMETER Experiment Name: Zm_Drought_P Parameter: Plant Line Value: 35A19
  misc_feature: MA Experiment 108556 PARAMETER Experiment Name: Zm_Drought_P Parameter: Timepoint (hr) Value: 24
  misc_feature: MA Experiment 108556 PARAMETER Experiment Name: Zm_Drought_P Parameter: Tissue Value: Aerial
  misc_feature: MA Experiment 108556 PARAMETER Experiment Name: Zm_Drought_P Parameter: Treatment Value: Drought vs. No Drought
  misc_feature: MA Experiment ID: 108559 Result: Up-regulated in Transcription
  misc_feature: MA Experiment 108559 PARAMETER Experiment Name: Zm_5mM_NO_P Parameter: Age (day) Value: 8
  misc_feature: MA Experiment 108559 PARAMETER Experiment Name: Zm_5mM_NO_P Parameter: Organism Value: Zea mays
  misc_feature: MA Experiment 108559 PARAMETER Experiment Name: Zm_5mM_NO_P Parameter: Plant Line Value: 35A19
  misc_feature: MA Experiment 108559 PARAMETER Experiment Name: Zm_5mM_NO_P Parameter: Timepoint (hr) Value: 12
  misc_feature: MA Experiment 108559 PARAMETER Experiment Name: Zm_5mM_NO_P Parameter: Tissue Value: Aerial
  misc_feature: MA Experiment 108559 PARAMETER Experiment Name: Zm_5mM_NO_P Parameter: Treatment Value: 5mM NO vs. No Treatment
  misc_feature: MA Experiment ID: 20000488 Result: Up-regulated in Transcription
  misc_feature: MA Experiment 20000488 PARAMETER Experiment Name: Zm_50mM_NH4NO3_L_to_H_P Parameter: Organism Value: Zea mays
  misc_feature: MA Experiment 20000488 PARAMETER Experiment Name: Zm_50mM_NH4NO3_L_to_H_P Parameter: Timepoint (hr) Value: 8
  misc_feature: MA Experiment 20000488 PARAMETER Experiment Name: Zm_50mM_NH4NO3_L_to_H_P Parameter: Tissue Value: Leaves
  misc_feature: MA Experiment 20000488 PARAMETER Experiment Name: Zm_50mM_NH4NO3_L_to_H_P Parameter: Treatment Value: 50mM NH4NO3 vs. 100mM Mannitol
aacccctgcaaaaacccgccactctcagatccgcacagcgacgcccgccagccagacccgatcccctccctcgctagggttttcgtccccgcgccgccgcgctcccggatcccaccgaaacaaccatggccggcggtcccgcggcggtgtcgttcctgaccaacatcgcgaaggtggctgcggggctcggagccgcggcctcgctcgcctccgcgtcgctctacaccgtcgacggcggcgagcgcgccgtcatcttcgaccgtttccgcggggtgctcccggagaccgtcggcgagggcacccatttcctcgtgccctggctgcagaagcccttcatcttcgacatccgcacgcgcccgcacaacttctcctccaactcggggaccaaggacctgcagatggtcaacctcacgctccgtctcctctcccgccccgacgtccagcacctccccaccatcttcacctccctcggactcgagtacgacgacaaagtgctcccctccatcggcaacgaggtgctcaaggccgtcgtcgcccagttcaatgccgaccagctcctcaccgaccgcccccacgtctccgccctcgtccgcgacgctctcatccgccgcgcccgcgagttcaacatcatcctcgacgacgtcgccatcacccacctctcctatggtatcgagttctcgctggccgttgagaagaagcaggtcgcgcagcaggaggccgagcgctccaagttcctcgtcgccaaggcggagcaggagaggcgggcggccatcgtgcgcgctgagggagagagcgagtccgcgcgcctcatctctgaggccacggcgatggctgggacagggctgatcgagctcaggaggatcgaggcggccaaggagattgccgcagagctggctcgctcaccgaatgtggcatacattccttctggggaaaacggaaagatgctgcttggtctcaatgctactggatttggccggtgattcactgtttttttagtctgcttgtgctatgtgctgatgcatgactaaaacggaggttcgaactttgaaggacagtgatatctgctatccttgcttatgttaagttttccttgtcttggaactaaatgtgtctgttgtgctccaaataagttttggtttttgactgc

SEQ ID NO: 7290 - protein, 284 aa, Zea mays subsp. mays
  peptide (1)..(284): Ceres Seq. ID no. 13628193
  misc_feature (1)..(284): Homolog of NCBI NO: 7716458 NR Description: prohibitin [Zea mays]
  misc_feature (1)..(284): Homolog of NCBI NO: 38567717 NR Description: B1358B12.15 [Oryza sativa (japonica
  misc_feature (3)..(279): Homolog of NCBI NO: 7716460 NR Description: prohibitin [Zea mays]
  misc_feature (1)..(280): Homolog of NCBI NO: 7489185 NR Description: prohibitin - common tobacco
  misc_feature (1)..(278): Homolog of NCBI NO: 15237488 NR Description: prohibitin (gb|AAC49691.1) [Arabidopsis thaliana] prohibitin [Arabidopsis thaliana] >gi|4097692|gb|AAD00157.1|
  misc_feature (1)..(278): Homolog of NCBI NO: 15232129 NR Description: prohibitin -related [Arabidopsis thaliana]
  misc_feature (1)..(278): Homolog of NCBI NO: 21592895 NR Description: prohibitin, putative [Arabidopsis thaliana]
  misc_feature (1)..(278): Homolog of NCBI NO: 27765032 NR Description: At3g27280 [Arabidopsis thaliana]
  misc_feature (130)..(278): Homolog of NCBI NO: 15241367 NR Description: prohibitin - like protein [Arabidopsis thaliana]
  misc_feature (12)..(105): Homolog of NCBI NO: 15241367 NR Description: prohibitin - like protein [Arabidopsis thaliana]
MAGGPAAVSFLTNIAKVAAGLGAAASLASASLYTVDGGERAVIFDRFRGVLPETVGEGTHFLVPWLQKPFIFDIRTRPHNFSSNSGTKDLQMVNLTLRLLSRPDVQHLPTIFTSLGLEYDDKVLPSIGNEVLKAVVAQFNADQLLTDRPHVSALVRDALIRRAREFNIILDDVAITHLSYGIEFSLAVEKKQVAQQEAERSKFLVAKAEQERRAAIVRAEGESESARLISEATAMAGTGLIELRRIEAAKEIAAELARSPNVAYIPSGENGKMLLGLNATGFGR

SEQ ID NO: 7291 - protein, 229 aa, Zea mays subsp. mays
  peptide (1)..(229): Ceres Seq. ID no. 13628194
TPAKTRHSQIRTATPASQTRSPPSLGFSSPRRRAPGSHRNNHGRRSRGGVVPDQHREGGCGARSRGLARLRVALHRRRRRARRHLRPFPRGAPGDRRRGHPFPRALAAEALHLRHPHAPAQLLLQLGDQGPADGQPHAPSPLPPRRPAPPHHLHLPRTRVRRQSAPLHRQRGAQGRRRPVQCRPAPHRPPPRLRPRPRRSHPPRPRVQHHPRRRRHHPPLLWYRVLAGR

SEQ ID NO: 7292 - protein, 193 aa, Zea mays subsp. mays
  peptide (1)..(193): Ceres Seq. ID no. 13628195
  misc_feature (1)..(193): Homolog of NCBI NO: 7716458 NR Description: prohibitin [Zea mays]
  misc_feature (1)..(193): Homolog of NCBI NO: 38567717 NR Description: B1358B12.15 [Oryza sativa (japonica
  misc_feature (1)..(188): Homolog of NCBI NO: 7716460 NR Description: prohibitin [Zea mays]
  misc_feature (1)..(189): Homolog of NCBI NO: 7489185 NR Description: prohibitin - common tobacco
  misc_feature (1)..(187): Homolog of NCBI NO: 15237488 NR Description: prohibitin (gb|AAC49691.1) [Arabidopsis thaliana] prohibitin [Arabidopsis thaliana] >gi|4097692|gb|AAD00157.1|
  misc_feature (1)..(187): Homolog of NCBI NO: 15232129 NR Description: prohibitin -related [Arabidopsis thaliana]
  misc_feature (1)..(187): Homolog of NCBI NO: 21592895 NR Description: prohibitin, putative [Arabidopsis thaliana]
  misc_feature (1)..(187): Homolog of NCBI NO: 27765032 NR Description: At3g27280 [Arabidopsis thaliana]
  misc_feature (39)..(187): Homolog of NCBI NO: 15241367 NR Description: prohibitin - like protein [Arabidopsis thaliana]
  misc_feature (1)..(14): Homolog of NCBI NO: 15241367 NR Description: prohibitin - like protein [Arabidopsis thaliana]
MVNLTLRLLSRPDVQHLPTIFTSLGLEYDDKVLPSIGNEVLKAVVAQFNADQLLTDRPHVSALVRDALIRRAREFNIILDDVAITHLSYGIEFSLAVEKKQVAQQEAERSKFLVAKAEQERRAAIVRAEGESESARLISEATAMAGTGLIELRRIEAAKEIAAELARSPNVAYIPSGENGKMLLGLNATGFGR

SEQ ID NO: 7293 - DNA, 734 bp, Zea mays subsp. mays
  misc_feature (1)..(734): Ceres Seq. ID no. 12401914
  misc_feature: MA Experiment ID: 108504 Result: Up-regulated in Transcription
  misc_feature: MA Experiment 108504 PARAMETER Experiment Name: Zm_Drought_P Parameter: Age (day) Value: 8
  misc_feature: MA Experiment 108504 PARAMETER Experiment Name: Zm_Drought_P Parameter: Organism Value: Zea mays
  misc_feature: MA Experiment 108504 PARAMETER Experiment Name: Zm_Drought_P Parameter: Plant Line Value: 35A19
  misc_feature: MA Experiment 108504 PARAMETER Experiment Name: Zm_Drought_P Parameter: Timepoint (hr) Value: 12
  misc_feature: MA Experiment 108504 PARAMETER Experiment Name: Zm_Drought_P Parameter: Tissue Value: Aerial
  misc_feature: MA Experiment 108504 PARAMETER Experiment Name: Zm_Drought_P Parameter: Treatment Value: Drought vs. No Drought
  misc_feature: MA Experiment ID: 108534 Result: Up-regulated in Transcription
  misc_feature: MA Experiment 108534 PARAMETER Experiment Name: Zm_4deg_Cold_P Parameter: Age (hr) Value: 8
  misc_feature: MA Experiment 108534 PARAMETER Experiment Name: Zm_4deg_Cold_P Parameter: Organism Value: Zea mays
  misc_feature: MA Experiment 108534 PARAMETER Experiment Name: Zm_4deg_Cold_P Parameter: Plant Line Value: 35A19
  misc_feature: MA Experiment 108534 PARAMETER Experiment Name: Zm_4deg_Cold_P Parameter: Temperature (deg C) Value: 4 vs. 22
  misc_feature: MA Experiment 108534 PARAMETER Experiment Name: Zm_4deg_Cold_P Parameter: Timepoint (hr) Value: 6
  misc_feature: MA Experiment 108534 PARAMETER Experiment Name: Zm_4deg_Cold_P Parameter: Tissue Value: Aerial
  misc_feature: MA Experiment ID: 108536 Result: Up-regulated in Transcription
  misc_feature: MA Experiment 108536 PARAMETER Experiment Name: Zm_Meristem_P Parameter: Age (day) Value: 8
  misc_feature: MA Experiment 108536 PARAMETER Experiment Name: Zm_Meristem_P Parameter: Organism Value: Zea mays
  misc_feature: MA Experiment 108536 PARAMETER Experiment Name: Zm_Meristem_P Parameter: Plant Line Value: 35A19
  misc_feature: MA Experiment 108536 PARAMETER Experiment Name: Zm_Meristem_P Parameter: Tissue Value: Shoot Meristem vs. Above Shoot Meristem
  misc_feature: MA Experiment ID: 108543 Result: Up-regulated in Transcription
  misc_feature: MA Experiment ID: 108544 Result: Up-regulated in Transcription
  misc_feature: MA Experiment ID: 20000477 Result: Up-regulated in Transcription
  misc_feature: MA Experiment 20000477 PARAMETER Experiment Name: Zm_5mM_SA_P Parameter: Age (day) Value: 10
  misc_feature: MA Experiment 20000477 PARAMETER Experiment Name: Zm_5mM_SA_P Parameter: Organism Value: Zea mays
  misc_feature: MA Experiment 20000477 PARAMETER Experiment Name: Zm_5mM_SA_P Parameter: Plant Line Value: 35A19
  misc_feature: MA Experiment 20000477 PARAMETER Experiment Name: Zm_5mM_SA_P Parameter: Timepoint (hr) Value: 48
  misc_feature: MA Experiment 20000477 PARAMETER Experiment Name: Zm_5mM_SA_P Parameter: Tissue Value: Aerial
  misc_feature: MA Experiment 20000477 PARAMETER Experiment Name: Zm_5mM_SA_P Parameter: Treatment Value: 5mM SA vs. No Treatment
  misc_feature: MA Experiment ID: 20000478 Result: Up-regulated in Transcription
  misc_feature: MA Experiment 20000478 PARAMETER Experiment Name: Zm_5mM_SA_P Parameter: Age (day) Value: 11
  misc_feature: MA Experiment 20000478 PARAMETER Experiment Name: Zm_5mM_SA_P Parameter: Organism Value: Zea mays
  misc_feature: MA Experiment 20000478 PARAMETER Experiment Name: Zm_5mM_SA_P Parameter: Plant Line Value: 35A19
  misc_feature: MA Experiment 20000478 PARAMETER Experiment Name: Zm_5mM_SA_P Parameter: Timepoint (hr) Value: 72
  misc_feature: MA Experiment 20000478 PARAMETER Experiment Name: Zm_5mM_SA_P Parameter: Tissue Value: Aerial
  misc_feature: MA Experiment 20000478 PARAMETER Experiment Name: Zm_5mM_SA_P Parameter: Treatment Value: 5mM SA vs. No Treatment
  misc_feature: MA Experiment ID: 20000534 Result: Down-regulated in Transcription
  misc_feature: MA Experiment 20000534 PARAMETER Experiment Name: Zm_Hybrid_Pollen_P Parameter: Age (day) Value: 8
  misc_feature: MA Experiment 20000534 PARAMETER Experiment Name: Zm_Hybrid_Pollen_P Parameter: Organism Value: Zea mays
  misc_feature: MA Experiment 20000534 PARAMETER Experiment Name: Zm_Hybrid_Pollen_P Parameter: Plant Line Value: 35A19
  misc_feature: MA Experiment 20000534 PARAMETER Experiment Name: Zm_Hybrid_Pollen_P Parameter: Tissue Value: Pollen vs. Aerial
acccacccacccaccgagctgcctgctacacccctgccaagatccatctttccggttccgccgcctgatcgaagtgaacaagcaagtaagagccatggcgagcgagcacgcggcggggggcgatgctaagcatcaccagaagcagagcctgatggacaaggcgaaggggttcgtcgcggagaagatcgcgcacatccccaagcccgaggccacgctggacggcgtgacgttcaagggcctgagccgggagtgcatcacgctgcacagcancgtgaacgtgtccaacccctacgaccaccgcctccccatctgcgaggtgacctacacgctccggtgcgccggcaaggaggtggcgtccggcaccatgccggaccccggctggatcgccgccagcggctccaccgcgctggagatccccgccaaggtgccctacgacttcctcgtctccctcgtcagggacgtcggccgggactgggacatcgactacgagctccaggtcgggctcaccgtngacctccccatngtcggcaacttcaccatcccgctntccacctctggcgagttcaagctccccaccctcaaggacttgttctgatctagtagtagctcgcttgccttgtgttctgtgcgggcgcgcaccagcgatctgtacgacgagcttttgcaaataaacgacgcagctcctctgttctatatatctcagtgaatgcctaagctaaggggatggatggttt

SEQ ID NO: 7294 - protein, 197 aa, Zea mays subsp. mays
  peptide (1)..(197): Ceres Seq. ID no. 12401915
  misc_feature (50)..(196): Pfam Name: Late embryogenesis abundant protein Pfam Description: Late embryogenesis abundant protein
  misc_feature (39)..(196): Homolog of NCBI NO: 34912834 NR Description: putative embryogenesis-abundant protein [Oryza
  misc_feature (50)..(197): Homolog of NCBI NO: 34904186 NR Description: putative late embryogenesis abundant protein
  misc_feature (50)..(197): Homolog of NCBI NO: 1170745 NR Description: Late embryogenesis abundant protein Lea14-A
  misc_feature (51)..(197): Homolog of NCBI NO: 7595792 NR Description: late-embryogenesis abundant protein [Euphorbia
  misc_feature (50)..(197): Homolog of NCBI NO: 1170746 NR Description: Desiccation protectant protein Lea14 homolog
  misc_feature (32)..(197): Homolog of NCBI NO: 15225930 NR Description: putative desiccation related protein; protein id:
  misc_feature (32)..(197): Homolog of NCBI NO: 21555248 NR Description: putative desiccation related protein [Arabidopsis
  misc_feature (49)..(197): Homolog of NCBI NO: 15223413 NR Description: hypothetical protein; protein id: At1g01470.1, by cDNA: gi_18650613 [Arabidopsis thaliana]
  misc_feature (49)..(197): Homolog of NCBI NO: 3850842 NR Description: Lea protein [Pseudotsuga menziesii]
  misc_feature (50)..(197): Homolog of NCBI NO: 7489027 NR Description: late embryogenesis (Lea)-like protein - tomato
  misc_feature (90)..(90): Xaa is any aa, unknown or other
  misc_feature (170)..(170): Xaa is any aa, unknown or other
  misc_feature (174)..(174): Xaa is any aa, unknown or other
  misc_feature (182)..(182): Xaa is any aa, unknown or other
PTHPPSCLLHPCQDPSFRFRRLIEVNKQVRAMASEHAAGGDAKHHQKQSLMDKAKGFVAEKIAHIPKPEATLDGVTFKGLSRECITLHSXVNVSNPYDHRLPICEVTYTLRCAGKEVASGTMPDPGWIAASGSTALEIPAKVPYDFLVSLVRDVGRDWDIDYELQVGLTXDLPXVGNFTIPXSTSGEFKLPTLKDLF

SEQ ID NO: 7295 - protein, 166 aa, Zea mays subsp. mays
  peptide (1)..(166): Ceres Seq. ID no. 12401916
  misc_feature (19)..(165): Pfam Name: Late embryogenesis abundant protein Pfam Description: Late embryogenesis abundant protein
  misc_feature (8)..(165): Homolog of NCBI NO: 34912834 NR Description: putative embryogenesis-abundant protein [Oryza
  misc_feature (19)..(166): Homolog of NCBI NO: 34904186 NR Description: putative late embryogenesis abundant protein
  misc_feature (19)..(166): Homolog of NCBI NO: 1170745 NR Description: Late embryogenesis abundant protein Lea14-A
  misc_feature (20)..(166): Homolog of NCBI NO: 7595792 NR Description: late-embryogenesis abundant protein [Euphorbia
  misc_feature (19)..(166): Homolog of NCBI NO: 1170746 NR Description: Desiccation protectant protein Lea14 homolog
  misc_feature (1)..(166): Homolog of NCBI NO: 15225930 NR Description: putative desiccation related protein; protein id:
  misc_feature (1)..(166): Homolog of NCBI NO: 21555248 NR Description: putative desiccation related protein [Arabidopsis
  misc_feature (18)..(166): Homolog of NCBI NO: 15223413 NR Description: hypothetical protein; protein id: At1g01470.1, by cDNA: gi_18650613 [Arabidopsis thaliana]
  misc_feature (18)..(166): Homolog of NCBI NO: 3850842 NR Description: Lea protein [Pseudotsuga menziesii]
  misc_feature (19)..(166): Homolog of NCBI NO: 7489027 NR Description: late embryogenesis (Lea)-like protein - tomato
  misc_feature (59)..(59): Xaa is any aa, unknown or other
  misc_feature (139)..(139): Xaa is any aa, unknown or other
  misc_feature (143)..(143): Xaa is any aa, unknown or other
  misc_feature (151)..(151): Xaa is any aa, unknown or other
MASEHAAGGDAKHHQKQSLMDKAKGFVAEKIAHIPKPEATLDGVTFKGLSRECITLHSXVNVSNPYDHRLPICEVTYTLRCAGKEVASGTMPDPGWIAASGSTALEIPAKVPYDFLVSLVRDVGRDWDIDYELQVGLTXDLPXVGNFTIPXSTSGEFKLPTLKDLF

SEQ ID NO: 7296 - protein, 147 aa, Zea mays subsp. mays
  peptide (1)..(147): Ceres Seq. ID no. 12401917
  misc_feature (1)..(146): Pfam Name: Late embryogenesis abundant protein Pfam Description: Late embryogenesis abundant protein
  misc_feature (1)..(146): Homolog of NCBI NO: 34912834 NR Description: putative embryogenesis-abundant protein [Oryza
  misc_feature (1)..(147): Homolog of NCBI NO: 34904186 NR Description: putative late embryogenesis abundant protein
  misc_feature (1)..(147): Homolog of NCBI NO: 1170745 NR Description: Late embryogenesis abundant protein Lea14-A
  misc_feature (1)..(147): Homolog of NCBI NO: 7595792 NR Description: late-embryogenesis abundant protein [Euphorbia
  misc_feature (1)..(147): Homolog of NCBI NO: 1170746 NR Description: Desiccation protectant protein Lea14 homolog
  misc_feature (1)..(147): Homolog of NCBI NO: 15225930 NR Description: putative desiccation related protein; protein id:
  misc_feature (1)..(147): Homolog of NCBI NO: 21555248 NR Description: putative desiccation related protein [Arabidopsis
  misc_feature (1)..(147): Homolog of NCBI NO: 15223413 NR Description: hypothetical protein; protein id: At1g01470.1, by cDNA: gi_18650613 [Arabidopsis thaliana]
  misc_feature (1)..(147): Homolog of NCBI NO: 3850842 NR Description: Lea protein [Pseudotsuga menziesii]
  misc_feature (1)..(147): Homolog of NCBI NO: 7489027 NR Description: late embryogenesis (Lea)-like protein - tomato
  misc_feature (40)..(40): Xaa is any aa, unknown or other
  misc_feature (120)..(120): Xaa is any aa, unknown or other
  misc_feature (124)..(124): Xaa is any aa, unknown or other
  misc_feature (132)..(132): Xaa is any aa, unknown or other
MDKAKGFVAEKIAHIPKPEATLDGVTFKGLSRECITLHSXVNVSNPYDHRLPICEVTYTLRCAGKEVASGTMPDPGWIAASGSTALEIPAKVPYDFLVSLVRDVGRDWDIDYELQVGLTXDLPXVGNFTIPXSTSGEFKLPTLKDLF

SEQ ID NO: 7297 - DNA, 1017 bp, Zea mays subsp. mays; identical to SEQ ID NO: 2776
  misc_feature (1)..(1017): Ceres Seq. ID no. 12402465
  misc_feature: MA Experiment ID: 108528 Result: Up-regulated in Transcription
  misc_feature: MA Experiment 108528 PARAMETER Experiment Name: Zm_Imbibed_Seeds_P Parameter: Age (day) Value: 5 vs. 2
  misc_feature: MA Experiment 108528 PARAMETER Experiment Name: Zm_Imbibed_Seeds_P Parameter: Organism Value: Zea mays
  misc_feature: MA Experiment 108528 PARAMETER Experiment Name: Zm_Imbibed_Seeds_P Parameter: Plant Line Value: 35A19
  misc_feature: MA Experiment 108528 PARAMETER Experiment Name: Zm_Imbibed_Seeds_P Parameter: Tissue Value: Aerial vs. Embryo
  misc_feature: MA Experiment ID: 108530 Result: Up-regulated in Transcription
  misc_feature: MA Experiment 108530 PARAMETER Experiment Name: Zm_Imbibed_Seeds_P Parameter: Age (day) Value: 6 vs. 2
  misc_feature: MA Experiment 108530 PARAMETER Experiment Name: Zm_Imbibed_Seeds_P Parameter: Organism Value: Zea mays
  misc_feature: MA Experiment 108530 PARAMETER Experiment Name: Zm_Imbibed_Seeds_P Parameter: Plant Line Value: 35A19
  misc_feature: MA Experiment 108530 PARAMETER Experiment Name: Zm_Imbibed_Seeds_P Parameter: Tissue Value: Aerial vs. Embryo
  misc_feature: MA Experiment ID: 108536 Result: Down-regulated in Transcription
  misc_feature: MA Experiment 108536 PARAMETER Experiment Name: Zm_Meristem_P Parameter: Age (day) Value: 8
  misc_feature: MA Experiment 108536 PARAMETER Experiment Name: Zm_Meristem_P Parameter: Organism Value: Zea mays
  misc_feature: MA Experiment 108536 PARAMETER Experiment Name: Zm_Meristem_P Parameter: Plant Line Value: 35A19
  misc_feature: MA Experiment 108536 PARAMETER Experiment Name: Zm_Meristem_P Parameter: Tissue Value: Shoot Meristem vs. Above Shoot Meristem
  misc_feature: MA Experiment ID: 108543 Result: Up-regulated in Transcription
  misc_feature: MA Experiment ID: 108544 Result: Up-regulated in Transcription
  misc_feature: MA Experiment ID: 108545 Result: Up-regulated in Transcription
  misc_feature: MA Experiment 108545 PARAMETER Experiment Name: Zm_Imbibed_Seeds_P Parameter: Age (day) Value: 3 vs. 2
  misc_feature: MA Experiment 108545 PARAMETER Experiment Name: Zm_Imbibed_Seeds_P Parameter: Organism Value: Zea mays
  misc_feature: MA Experiment 108545 PARAMETER Experiment Name: Zm_Imbibed_Seeds_P Parameter: Plant Line Value: 35A19
  misc_feature: MA Experiment 108545 PARAMETER Experiment Name: Zm_Imbibed_Seeds_P Parameter: Tissue Value: Aerial vs. Embryo
  misc_feature: MA Experiment ID: 108547 Result: Up-regulated in Transcription
  misc_feature: MA Experiment 108547 PARAMETER Experiment Name: Zm_Imbibed_Seeds_P Parameter: Age (day) Value: 4 vs. 2
  misc_feature: MA Experiment 108547 PARAMETER Experiment Name: Zm_Imbibed_Seeds_P Parameter: Organism Value: Zea mays
  misc_feature: MA Experiment 108547 PARAMETER Experiment Name: Zm_Imbibed_Seeds_P Parameter: Plant Line Value: 35A19
  misc_feature: MA Experiment 108547 PARAMETER Experiment Name: Zm_Imbibed_Seeds_P Parameter: Tissue Value: Aerial vs. Embryo
  misc_feature: MA Experiment ID: 108556 Result: Down-regulated in Transcription
  misc_feature: MA Experiment 108556 PARAMETER Experiment Name: Zm_Drought_P Parameter: Age (day) Value: 9
  misc_feature: MA Experiment 108556 PARAMETER Experiment Name: Zm_Drought_P Parameter: Organism Value: Zea mays
  misc_feature: MA Experiment 108556 PARAMETER Experiment Name: Zm_Drought_P Parameter: Plant Line Value: 35A19
  misc_feature: MA Experiment 108556 PARAMETER Experiment Name: Zm_Drought_P Parameter: Timepoint (hr) Value: 24
  misc_feature: MA Experiment 108556 PARAMETER Experiment Name: Zm_Drought_P Parameter: Tissue Value: Aerial
  misc_feature: MA Experiment 108556 PARAMETER Experiment Name: Zm_Drought_P Parameter: Treatment Value: Drought vs. No Drought
  misc_feature: MA Experiment ID: 108559 Result: Down-regulated in Transcription
  misc_feature: MA Experiment 108559 PARAMETER Experiment Name: Zm_5mM_NO_P Parameter: Age (day) Value: 8
  misc_feature: MA Experiment 108559 PARAMETER Experiment Name: Zm_5mM_NO_P Parameter: Organism Value: Zea mays
  misc_feature: MA Experiment 108559 PARAMETER Experiment Name: Zm_5mM_NO_P Parameter: Plant Line Value: 35A19
  misc_feature: MA Experiment 108559 PARAMETER Experiment Name: Zm_5mM_NO_P Parameter: Timepoint (hr) Value: 12
  misc_feature: MA Experiment 108559 PARAMETER Experiment Name: Zm_5mM_NO_P Parameter: Tissue Value: Aerial
  misc_feature: MA Experiment 108559 PARAMETER Experiment Name: Zm_5mM_NO_P Parameter: Treatment Value: 5mM NO vs. No Treatment
  misc_feature: MA Experiment ID: 108687 Result: Down-regulated in Transcription
  misc_feature: MA Experiment 108687 PARAMETER Experiment Name: Zm_Embryos-Flowers__P Parameter: Tissue Value: Embryo vs. Aerial+
  misc_feature: MA Experiment ID: 20000477 Result: Down-regulated in Transcription
  misc_feature: MA Experiment 20000477 PARAMETER Experiment Name: Zm_5mM_SA_P Parameter: Age (day) Value: 10
  misc_feature: MA Experiment 20000477 PARAMETER Experiment Name: Zm_5mM_SA_P Parameter: Organism Value: Zea mays
  misc_feature: MA Experiment 20000477 PARAMETER Experiment Name: Zm_5mM_SA_P Parameter: Plant Line Value: 35A19
  misc_feature: MA Experiment 20000477 PARAMETER Experiment Name: Zm_5mM_SA_P Parameter: Timepoint (hr) Value: 48
  misc_feature: MA Experiment 20000477 PARAMETER Experiment Name: Zm_5mM_SA_P Parameter: Tissue Value: Aerial
  misc_feature: MA Experiment 20000477 PARAMETER Experiment Name: Zm_5mM_SA_P Parameter: Treatment Value: 5mM SA vs. No Treatment
  misc_feature: MA Experiment ID: 20000535 Result: Down-regulated in Transcription
  misc_feature: MA Experiment 20000535 PARAMETER Experiment Name: Zm_Hybrid_Seed_Dev_P Parameter: DAP Value: 30 vs. 12
  misc_feature: MA Experiment 20000535 PARAMETER Experiment Name: Zm_Hybrid_Seed_Dev_P Parameter: Organism Value: Zea mays
  misc_feature: MA Experiment 20000535 PARAMETER Experiment Name: Zm_Hybrid_Seed_Dev_P Parameter: Plant Line Value: 35A19
  misc_feature: MA Experiment 20000535 PARAMETER Experiment Name: Zm_Hybrid_Seed_Dev_P Parameter: Tissue Value: Embryo vs. Unfert Floret

SEQ ID NO: 7298 - protein, 255 aa, Zea mays subsp. mays; identical to SEQ ID NO: 2777
  peptide (1)..(255): Ceres Seq. ID no. 12402466
  misc_feature (90)..(243): Pfam Name: CRAL/TRIO domain Pfam Description: CRAL/TRIO domain
  misc_feature (3)..(248): Homolog of NCBI NO: 27573358 NR Description: putative phosphatidylinositol/phosphatidylcholine

SEQ ID NO: 7299 - protein, 220 aa, Zea mays subsp. mays; identical to SEQ ID NO: 2778
  peptide (1)..(220): Ceres Seq. ID no. 12402467
  misc_feature (3)..(220): Pfam Name: Equine herpesvirus glycoprotein gp2 Pfam Description: Equine herpesvirus glycoprotein gp2
  misc_feature (1)..(215): Homolog of NCBI NO: 13592175 NR Description: ppg3 [Leishmania major]
  misc_feature (1)..(220): Homolog of NCBI NO: 13592175 NR Description: ppg3 [Leishmania major]
  misc_feature (1)..(215): Homolog of NCBI NO: 13592175 NR Description: ppg3 [Leishmania major]
  misc_feature (1)..(210): Homolog of NCBI NO: 13592175 NR Description: ppg3 [Leishmania major]
  misc_feature (1)..(210): Homolog of NCBI NO: 13592175 NR Description: ppg3 [Leishmania major]
  misc_feature (1)..(220): Homolog of NCBI NO: 13592175 NR Description: ppg3 [Leishmania major]
  misc_feature (1)..(220): Homolog of NCBI NO: 13592175 NR Description: ppg3 [Leishmania major]
  misc_feature (1)..(210): Homolog of NCBI NO: 13592175 NR Description: ppg3 [Leishmania major]
  misc_feature (1)..(215): Homolog of NCBI NO: 13592175 NR Description: ppg3 [Leishmania major]
  misc_feature (1)..(210): Homolog of NCBI NO: 13592175 NR Description: ppg3 [Leishmania major]

SEQ ID NO: 7300 - protein, 196 aa, Zea mays subsp. mays; identical to SEQ ID NO: 2779
  peptide (1)..(196): Ceres Seq. ID no. 12402468
  misc_feature (31)..(184): Pfam Name: CRAL/TRIO domain Pfam Description: CRAL/TRIO domain
  misc_feature (1)..(189): Homolog of NCBI NO: 27573358 NR Description: putative phosphatidylinositol/phosphatidylcholine

SEQ ID NO: 7301 - DNA, 1053 bp, Zea mays subsp. mays
  misc_feature (1)..(1053): Ceres Seq. ID no. 12365672
  misc_feature: MA Experiment ID: 108504 Result: Down-regulated in Transcription
  misc_feature: MA Experiment 108504 PARAMETER Experiment Name: Zm_Drought_P Parameter: Age (day) Value: 8
  misc_feature: MA Experiment 108504 PARAMETER Experiment Name: Zm_Drought_P Parameter: Organism Value: Zea mays
  misc_feature: MA Experiment 108504 PARAMETER Experiment Name: Zm_Drought_P Parameter: Plant Line Value: 35A19
  misc_feature: MA Experiment 108504 PARAMETER Experiment Name: Zm_Drought_P Parameter: Timepoint (hr) Value: 12
  misc_feature: MA Experiment 108504 PARAMETER Experiment Name: Zm_Drought_P Parameter: Tissue Value: Aerial
  misc_feature: MA Experiment 108504 PARAMETER Experiment Name: Zm_Drought_P Parameter: Treatment Value: Drought vs. No Drought
  misc_feature: MA Experiment ID: 108515 Result: Down-regulated in Transcription
  misc_feature: MA Experiment 108515 PARAMETER Experiment Name: Zm_2mM_SA_P Parameter: Age (day) Value: 8
  misc_feature: MA Experiment 108515 PARAMETER Experiment Name: Zm_2mM_SA_P Parameter: Organism Value: Zea mays
  misc_feature: MA Experiment 108515 PARAMETER Experiment Name: Zm_2mM_SA_P Parameter: Plant Line Value: 35A19
  misc_feature: MA Experiment 108515 PARAMETER Experiment Name: Zm_2mM_SA_P Parameter: Timepoint (hr) Value: 12
  misc_feature: MA Experiment 108515 PARAMETER Experiment Name: Zm_2mM_SA_P Parameter: Tissue Value: Aerial
  misc_feature: MA Experiment 108515 PARAMETER Experiment Name: Zm_2mM_SA_P Parameter: Treatment Value: 2mM SA vs. No Treatment
  misc_feature: MA Experiment ID: 108528 Result: Up-regulated in Transcription
  misc_feature: MA Experiment 108528 PARAMETER Experiment Name: Zm_Imbibed_Seeds_P Parameter: Age (day) Value: 5 vs. 2
  misc_feature: MA Experiment 108528 PARAMETER Experiment Name: Zm_Imbibed_Seeds_P Parameter: Organism Value: Zea mays
  misc_feature: MA Experiment 108528 PARAMETER Experiment Name: Zm_Imbibed_Seeds_P Parameter: Plant Line Value: 35A19
  misc_feature: MA Experiment 108528 PARAMETER Experiment Name: Zm_Imbibed_Seeds_P Parameter: Tissue Value: Aerial vs. Embryo
  misc_feature: MA Experiment ID: 108534 Result: Up-regulated in Transcription
  misc_feature: MA Experiment 108534 PARAMETER Experiment Name: Zm_4deg_Cold_P Parameter: Age (hr) Value: 8
  misc_feature: MA Experiment 108534 PARAMETER Experiment Name: Zm_4deg_Cold_P Parameter: Organism Value: Zea mays
  misc_feature: MA Experiment 108534 PARAMETER Experiment Name: Zm_4deg_Cold_P Parameter: Plant Line Value: 35A19
  misc_feature: MA Experiment 108534 PARAMETER Experiment Name: Zm_4deg_Cold_P Parameter: Temperature (deg C) Value: 4 vs. 22
  misc_feature: MA Experiment 108534 PARAMETER Experiment Name: Zm_4deg_Cold_P Parameter: Timepoint (hr) Value: 6
  misc_feature: MA Experiment 108534 PARAMETER Experiment Name: Zm_4deg_Cold_P Parameter: Tissue Value: Aerial
  misc_feature: MA Experiment ID: 108535 Result: Down-regulated in Transcription
  misc_feature: MA Experiment 108535 PARAMETER Experiment Name: Zm_Meristem_P Parameter: Age (day) Value: 8
  misc_feature: MA Experiment 108535 PARAMETER Experiment Name: Zm_Meristem_P Parameter: Organism Value: Zea mays
  misc_feature: MA Experiment 108535 PARAMETER Experiment Name: Zm_Meristem_P Parameter: Plant Line Value: 35A19
  misc_feature: MA Experiment 108535 PARAMETER Experiment Name: Zm_Meristem_P Parameter: Tissue Value: Root Meristem vs. Above Root Meristem
  misc_feature: MA Experiment ID: 108536 Result: Down-regulated in Transcription
  misc_feature: MA Experiment 108536 PARAMETER Experiment Name: Zm_Meristem_P Parameter: Age (day) Value: 8
  misc_feature: MA Experiment 108536 PARAMETER Experiment Name: Zm_Meristem_P Parameter: Organism Value: Zea mays
  misc_feature: MA Experiment 108536 PARAMETER Experiment Name: Zm_Meristem_P Parameter: Plant Line Value: 35A19
  misc_feature: MA Experiment 108536 PARAMETER Experiment Name: Zm_Meristem_P Parameter: Tissue Value: Shoot Meristem vs. Above Shoot Meristem
  misc_feature: MA Experiment ID: 108540 Result: Down-regulated in Transcription
  misc_feature: MA Experiment 108540 PARAMETER Experiment Name: Zm_20percent_PEG_P Parameter: Age (day) Value: 8
  misc_feature: MA Experiment 108540 PARAMETER Experiment Name: Zm_20percent_PEG_P Parameter: Organism Value: Zea mays
  misc_feature: MA Experiment 108540 PARAMETER Experiment Name: Zm_20percent_PEG_P Parameter: Plant Line Value: 35A19
  misc_feature: MA Experiment 108540 PARAMETER Experiment Name: Zm_20percent_PEG_P Parameter: Timepoint (hr) Value: 6
  misc_feature: MA Experiment 108540 PARAMETER Experiment Name: Zm_20percent_PEG_P Parameter: Tissue Value: Aerial
  misc_feature: MA Experiment 108540 PARAMETER Experiment Name: Zm_20percent_PEG_P Parameter: Treatment Value: 20percent PEG vs. No Treatment
  misc_feature: MA Experiment ID: 108542 Result: Down-regulated in Transcription
  misc_feature: MA Experiment 108542 PARAMETER Experiment Name: Zm_150mM_NaCl_P Parameter: Age (day) Value: 8
  misc_feature: MA Experiment 108542 PARAMETER Experiment Name: Zm_150mM_NaCl_P Parameter: Organism Value: Zea mays
  misc_feature: MA Experiment 108542 PARAMETER Experiment Name: Zm_150mM_NaCl_P Parameter: Plant Line Value: 35A19
  misc_feature: MA Experiment 108542 PARAMETER Experiment Name: Zm_150mM_NaCl_P Parameter: Timepoint (hr) Value: 6
  misc_feature: MA Experiment 108542 PARAMETER Experiment Name: Zm_150mM_NaCl_P Parameter: Tissue Value: Aerial
  misc_feature: MA Experiment 108542 PARAMETER Experiment Name: Zm_150mM_NaCl_P Parameter: Treatment Value: 150mM NaCl vs. No Treatment
  misc_feature: MA Experiment ID: 108546 Result: Up-regulated in Transcription
  misc_feature: MA Experiment 108546 PARAMETER Experiment Name: Zm_Imbibed_Seeds_P Parameter: Age (day) Value: 3 vs. 2
  misc_feature: MA Experiment 108546 PARAMETER Experiment Name: Zm_Imbibed_Seeds_P Parameter: Organism Value: Zea mays
  misc_feature: MA Experiment 108546 PARAMETER Experiment Name: Zm_Imbibed_Seeds_P Parameter: Plant Line Value: 35A19
  misc_feature: MA Experiment 108546 PARAMETER Experiment Name: Zm_Imbibed_Seeds_P Parameter: Tissue Value: Roots vs. Embryo
  misc_feature: MA Experiment ID: 108556 Result: Down-regulated in Transcription
  misc_feature: MA Experiment 108556 PARAMETER Experiment Name: Zm_Drought_P Parameter: Age (day) Value: 9
  misc_feature: MA Experiment 108556 PARAMETER Experiment Name: Zm_Drought_P Parameter: Organism Value: Zea mays
  misc_feature: MA Experiment 108556 PARAMETER Experiment Name: Zm_Drought_P Parameter: Plant Line Value: 35A19
  misc_feature: MA Experiment 108556 PARAMETER Experiment Name: Zm_Drought_P Parameter: Timepoint (hr) Value: 24
  misc_feature: MA Experiment 108556 PARAMETER Experiment Name: Zm_Drought_P Parameter: Tissue Value: Aerial
  misc_feature: MA Experiment 108556 PARAMETER Experiment Name: Zm_Drought_P Parameter: Treatment Value: Drought vs. No Drought
  misc_feature: MA Experiment ID: 108559 Result: Down-regulated in Transcription
  misc_feature: MA Experiment 108559 PARAMETER Experiment Name: Zm_5mM_NO_P Parameter: Age (day) Value: 8
  misc_feature: MA Experiment 108559 PARAMETER Experiment Name: Zm_5mM_NO_P Parameter: Organism Value: Zea mays
  misc_feature: MA Experiment 108559 PARAMETER Experiment Name: Zm_5mM_NO_P Parameter: Plant Line Value: 35A19
  misc_feature: MA Experiment 108559 PARAMETER Experiment Name: Zm_5mM_NO_P Parameter: Timepoint (hr) Value: 12
  misc_feature: MA Experiment 108559 PARAMETER Experiment Name: Zm_5mM_NO_P Parameter: Tissue Value: Aerial
  misc_feature: MA Experiment 108559 PARAMETER Experiment Name: Zm_5mM_NO_P Parameter: Treatment Value: 5mM NO vs. No Treatment
  misc_feature: MA Experiment ID: 108687 Result: Down-regulated in Transcription
  misc_feature: MA Experiment 108687 PARAMETER Experiment Name: Zm_Embryos-Flowers__P Parameter: Tissue Value: Embryo vs. Aerial+
  misc_feature: MA Experiment ID: 20000477 Result: Down-regulated in Transcription
  misc_feature: MA Experiment 20000477 PARAMETER Experiment Name: Zm_5mM_SA_P Parameter: Age (day) Value: 10
  misc_feature: MA Experiment 20000477 PARAMETER Experiment Name: Zm_5mM_SA_P Parameter: Organism Value: Zea mays
  misc_feature: MA Experiment 20000477 PARAMETER Experiment Name: Zm_5mM_SA_P Parameter: Plant Line Value: 35A19
  misc_feature: MA Experiment 20000477 PARAMETER Experiment Name: Zm_5mM_SA_P Parameter: Timepoint (hr) Value: 48
  misc_feature: MA Experiment 20000477 PARAMETER Experiment Name: Zm_5mM_SA_P Parameter: Tissue Value: Aerial
  misc_feature: MA Experiment 20000477 PARAMETER Experiment Name: Zm_5mM_SA_P Parameter: Treatment Value: 5mM SA vs. No Treatment
  misc_feature: MA Experiment ID: 20000478 Result: Down-regulated in Transcription
  misc_feature: MA Experiment 20000478 PARAMETER Experiment Name: Zm_5mM_SA_P Parameter: Age (day) Value: 11
  misc_feature: MA Experiment 20000478 PARAMETER Experiment Name: Zm_5mM_SA_P Parameter: Organism Value: Zea mays
  misc_feature: MA Experiment 20000478 PARAMETER Experiment Name: Zm_5mM_SA_P Parameter: Plant Line Value: 35A19
  misc_feature: MA Experiment 20000478 PARAMETER Experiment Name: Zm_5mM_SA_P Parameter: Timepoint (hr) Value: 72
  misc_feature: MA Experiment 20000478 PARAMETER Experiment Name: Zm_5mM_SA_P Parameter: Tissue Value: Aerial
  misc_feature: MA Experiment 20000478 PARAMETER Experiment Name: Zm_5mM_SA_P Parameter: Treatment Value: 5mM SA vs. No Treatment
  misc_feature: MA Experiment ID: 20000535 Result: Down-regulated in Transcription
  misc_feature: MA Experiment 20000535 PARAMETER Experiment Name: Zm_Hybrid_Seed_Dev_P Parameter: DAP Value: 30 vs. 12
  misc_feature: MA Experiment 20000535 PARAMETER Experiment Name: Zm_Hybrid_Seed_Dev_P Parameter: Organism Value: Zea mays
  misc_feature: MA Experiment 20000535 PARAMETER Experiment Name: Zm_Hybrid_Seed_Dev_P Parameter: Plant Line Value: 35A19
  misc_feature: MA Experiment 20000535 PARAMETER Experiment Name: Zm_Hybrid_Seed_Dev_P Parameter: Tissue Value: Embryo vs. Unfert Floret
  misc_feature: MA Experiment ID: 20001608 Result: Down-regulated in Transcription
  misc_feature: MA Experiment 20001608 PARAMETER Experiment Name: Zm_50ppm_KNO3_L-to-H_P Parameter: Age (day) Value: 21
  misc_feature: MA Experiment 20001608 PARAMETER Experiment Name: Zm_50ppm_KNO3_L-to-H_P Parameter: Organism Value: Zea mays
  misc_feature: MA Experiment 20001608 PARAMETER Experiment Name: Zm_50ppm_KNO3_L-to-H_P Parameter: Plant Line Value: 35A19
  misc_feature: MA Experiment 20001608 PARAMETER Experiment Name: Zm_50ppm_KNO3_L-to-H_P Parameter: Timepoint (hr) Value: 48
  misc_feature: MA Experiment 20001608 PARAMETER Experiment Name: Zm_50ppm_KNO3_L-to-H_P Parameter: Tissue Value: Shoots
  misc_feature: MA Experiment 20001608 PARAMETER Experiment Name: Zm_50ppm_KNO3_L-to-H_P Parameter: Treatment Value: 50ppm KNO3 vs. 50ppm KCl
atccatccgcgcgctcttaatttagcttcctcctccgatcctcacctactagcaggcacagacagcagcatcgatcggatcggagcagcacagcgcgcgtcaccgcaagctcaagtgtcttcttccttgcttgcttgcctgcttacctctcagttccccactcacgtctcttgccgtacgtacgtgcgtccaacacaccaggtgaaaatgggctcggagacggagacggtcaacgtggaaggcatcccgttcccggcggagatcaccgtcggcaaccctctctccctcctaggcacaggcatcacggacatcgagatccacttcctgcagatcaagtacaacgccatcggagtctatctccacaacgccggcggcggcgacagcaccacgctgctgggccacctcggggcctggaagggcaagacggcggaggagctcctagcggacgccgccttctgggccgcgctggtggcggcccccgtcgagaagctgttccgcgtcgtggtcatcaaggagatcaagggctcgcagtacggcgtgcagcttgagagctccgtccgcgaccgcctcgccgccgccgacctctacgaggacgacgaagaggaggcgctcgagaaggtcgccgacttcttccagtccaagtacttcaagccgggctccgtcgtcaccttccacttcccggcaccggcctccgcctccccgggacccgcggcggagatcaccttcgcgacggagggcaagggcgacgccaggatcgcggtggagaacgggaacgtcgccgggatgatccagacctggtacctcggcggcgactccgcggtgtcccccagcaccgtccgcagcctggccgaccgtttcgccgcgctgctcgccgtcgcagcgtgatttatatgatgctcagtctgctttaatctaatttccggccggttggtcgagttgcgttggatttgagttcgtgaatgtccgttctgtacgcgtcttgtctcgtgtgtgttgtcgtttgcagcgaatttgcaagtaataataataaaaagtatgtcctgtaggttgtgc

SEQ ID NO: 7302 - protein, 294 aa, Zea mays subsp. mays
  peptide (1)..(294): Ceres Seq. ID no. 12365673
  misc_feature (74)..(290): Pfam Name: Chalcone-flavanone isomerase Pfam Description: Chalcone-flavanone isomerase
  misc_feature (74)..(290): Homolog of NCBI NO: 18414838 NR Description: putative protein; protein id: At5g05270.1 thaliana] >gi|17380812|gb|AAL36093.1| unknown protein thaliana] >gi|20465369|gb|AAM20088.1| unknown protein
  misc_feature (77)..(290): Homolog of NCBI NO: 10176739 NR Description: contains similarity to chalcone-flavonone
  misc_feature (72)..(294): Homolog of NCBI NO: 4126399 NR Description: chalcone isomerase [Citrus sinensis]
  misc_feature (72)..(290): Homolog of NCBI NO: 68481 NR Description: chalcone isomerase (EC 5.5.1.6) A - garden
  misc_feature (70)..(290): Homolog of NCBI NO: 116134 NR Description: CHALCONE--FLAVONONE ISOMERASE 1 (CHALCONE
  misc_feature (70)..(290): Homolog of NCBI NO: 20152984 NR Description: chalcone isomerase [Oryza sativa (japonica
  misc_feature (70)..(290): Homolog of NCBI NO: 22218881 NR Description: Chain A, Chalcone Isomerase--T48a Mutant
  misc_feature (70)..(290): Homolog of NCBI NO: 29124145 NR Description: chalcone isomerase [Oryza sativa (japonica
  misc_feature (85)..(290): Homolog of NCBI NO: 116136 NR Description: CHALCONE--FLAVONONE ISOMERASE A (CHALCONE
  misc_feature (85)..(290): Homolog of NCBI NO: 228617 NR Description: chalcone flavanone isomerase
IHPRALNLASSSDPHLLAGTDSSIDRIGAAQRASPQAQVSSSLLACLLTSQFPTHVSCRTYVRPTHQVKMGSETETVNVEGIPFPAEITVGNPLSLLGTGITDIEIHFLQIKYNAIGVYLHNAGGGDSTTLLGHLGAWKGKTAEELLADAAFWAALVAAPVEKLFRVVVIKEIKGSQYGVQLESSVRDRLAAADLYEDDEEEALEKVADFFQSKYFKPGSVVTFHFPAPASASPGPAAEITFATEGKGDARIAVENGNVAGMIQTWYLGGDSAVSPSTVRSLADRFAALLAVAA

SEQ ID NO: 7303 - protein, 225 aa, Zea mays subsp. mays
  peptide (1)..(225): Ceres Seq. ID no. 12365674
  misc_feature (5)..(221): Pfam Name: Chalcone-flavanone isomerase Pfam Description: Chalcone-flavanone isomerase
  misc_feature (5)..(221): Homolog of NCBI NO: 18414838 NR Description: putative protein; protein id: At5g05270.1 thaliana] >gi|17380812|gb|AAL36093.1| unknown protein thaliana] >gi|20465369|gb|AAM20088.1| unknown protein
  misc_feature (8)..(221): Homolog of NCBI NO: 10176739 NR Description: contains similarity to chalcone-flavonone
  misc_feature (3)..(225): Homolog of NCBI NO: 4126399 NR Description: chalcone isomerase [Citrus sinensis]
  misc_feature (3)..(221): Homolog of NCBI NO: 68481 NR Description: chalcone isomerase (EC 5.5.1.6) A - garden
  misc_feature (1)..(221): Homolog of NCBI NO: 116134 NR Description: CHALCONE--FLAVONONE ISOMERASE 1 (CHALCONE
  misc_feature (1)..(221): Homolog of NCBI NO: 20152984 NR Description: chalcone isomerase [Oryza sativa (japonica
  misc_feature (1)..(221): Homolog of NCBI NO: 22218881 NR Description: Chain A, Chalcone Isomerase--T48a Mutant
  misc_feature (1)..(221): Homolog of NCBI NO: 29124145 NR Description: chalcone isomerase [Oryza sativa (japonica
  misc_feature (16)..(221): Homolog of NCBI NO: 116136 NR Description: CHALCONE--FLAVONONE ISOMERASE A (CHALCONE
  misc_feature (16)..(221): Homolog of NCBI NO: 228617 NR Description: chalcone flavanone isomerase
MGSETETVNVEGIPFPAEITVGNPLSLLGTGITDIEIHFLQIKYNAIGVYLHNAGGGDSTTLLGHLGAWKGKTAEELLADAAFWAALVAAPVEKLFRVVVIKEIKGSQYGVQLESSVRDRLAAADLYEDDEEEALEKVADFFQSKYFKPGSVVTFHFPAPASASPGPAAEITFATEGKGDARIAVENGNVAGMIQTWYLGGDSAVSPSTVRSLADRFAALLAVAA

SEQ ID NO: 7304 - DNA, 1048 bp, Zea mays subsp. mays
  misc_feature (1)..(1048): Ceres Seq. ID no. 12336653
  misc_feature: MA Experiment ID: 108528 Result: Up-regulated in Transcription
  misc_feature: MA Experiment 108528 PARAMETER Experiment Name: Zm_Imbibed_Seeds_P Parameter: Age (day) Value: 5 vs. 2
  misc_feature: MA Experiment 108528 PARAMETER Experiment Name: Zm_Imbibed_Seeds_P Parameter: Organism Value: Zea mays
  misc_feature: MA Experiment 108528 PARAMETER Experiment Name: Zm_Imbibed_Seeds_P Parameter: Plant Line Value: 35A19
  misc_feature: MA Experiment 108528 PARAMETER Experiment Name: Zm_Imbibed_Seeds_P Parameter: Tissue Value: Aerial vs. Embryo
  misc_feature: MA Experiment ID: 108535 Result: Down-regulated in Transcription
  misc_feature: MA Experiment 108535 PARAMETER Experiment Name: Zm_Meristem_P Parameter: Age (day) Value: 8
  misc_feature: MA Experiment 108535 PARAMETER Experiment Name: Zm_Meristem_P Parameter: Organism Value: Zea mays
  misc_feature: MA Experiment 108535 PARAMETER Experiment Name: Zm_Meristem_P Parameter: Plant Line Value: 35A19
  misc_feature: MA Experiment 108535 PARAMETER Experiment Name: Zm_Meristem_P Parameter: Tissue Value: Root Meristem vs. Above Root Meristem
  misc_feature: MA Experiment ID: 108556 Result: Down-regulated in Transcription
  misc_feature: MA Experiment 108556 PARAMETER Experiment Name: Zm_Drought_P Parameter: Age (day) Value: 9
  misc_feature: MA Experiment 108556 PARAMETER Experiment Name: Zm_Drought_P Parameter: Organism Value: Zea mays
  misc_feature: MA Experiment 108556 PARAMETER Experiment Name: Zm_Drought_P Parameter: Plant Line Value: 35A19
  misc_feature: MA Experiment 108556 PARAMETER Experiment Name: Zm_Drought_P Parameter: Timepoint (hr) Value: 24
  misc_feature: MA Experiment 108556 PARAMETER Experiment Name: Zm_Drought_P Parameter: Tissue Value: Aerial
  misc_feature: MA Experiment 108556 PARAMETER Experiment Name: Zm_Drought_P Parameter: Treatment Value: Drought vs. No Drought
gctgtcctactccacacaccgcgctcacctactccaatccagacccctctctccctcacccacagtccccgccggcgccgcgtccgcgtcctgtgcgcctcgctcactctgcttccgccgccgccgcagcagtcgtctcgcagcggagcggacccggaggcctaccatggcagcggcaatctcgctggaggccggcggggccctggcccatgacctagggtctgcagtcgtcacaggtggtgtcgccctcgcgctcctcaaattctttgaggagctcgccaagcgcggcgtcttcgagcagaaactcagcaggaagcttgttcatataagcgttgggctggtattcatgctcttttggcctctttttagctctggatggtatactcctttccttgctgcgctagcaccaggggttaacattataaggatgcttctactggggctgggacttatgaaaaacgaggctatggttaaatcaatgagccgctctggagattacagggaacttctcaagggcccactgtattatgctgctactataacttttgccacgtctcttttatggagaacctcaccagttgctatagcacttatatgcaacttatgtgctggggatggtatagccgatgttgttgggagacgcctaggtaaagaaaagcttccatacaatcccaacaaatcatatgctggaagcatagcaatggcggtggctggttttctggcctcagttgggtatatgcattacttccacactttcggttttattgaggaaacatggtacatggctttaagcttcctcgtggtctctgtagctgcagcactcgttgaatcgcaccccatcagcacagaacttgatgacaatttgactgttcttttgacatcattcctagttggtagcctcatcttttgatgtttaggcgcaaggacgtatgagatgtttctccgtcatgctgtaatcttctgatgtttaggctcaaggacatatgagatgtttctccgtcatgctgtattttatgtaaaacgtttctaaaatactactataattgtg

SEQ ID NO: 7305 - protein, 302 aa, Zea mays subsp. mays
  peptide (1)..(302): Ceres Seq. ID no. 12336654
  misc_feature (12)..(302): Homolog of NCBI NO: 34907982 NR Description: P0446G04.23 [Oryza sativa (japonica
  misc_feature (17)..(302): Homolog of NCBI NO: 21593148 NR Description: unknown [Arabidopsis thaliana]
  misc_feature (17)..(302): Homolog of NCBI NO: 15237702 NR Description: putative protein; protein id: At5g58560.1,
  misc_feature (17)..(272): Homolog of NCBI NO: 8843778 NR Description: emb|CAB85555.1~gene_id:MZN1.2~similar to unknown
  misc_feature (31)..(302): Homolog of NCBI NO: 28393229 NR Description: unknown protein [Arabidopsis thaliana]
  misc_feature (31)..(302): Homolog of NCBI NO: 15238184 NR Description: putative protein; protein id: At5g04490.1, by cDNA: 125255. [Arabidopsis thaliana] >gi|11290068|pir||T48445
  misc_feature (31)..(302): Homolog of NCBI NO: 21537252 NR Description: unknown [Arabidopsis thaliana]
  misc_feature (10)..(302): Homolog of NCBI NO: 32488404 NR Description: OSJNBa0043A12.34 [Oryza sativa (japonica
  misc_feature (106)..(301): Homolog of NCBI NO: 28850457 NR Description: similar to Oryza sativa (japonica
  misc_feature (102)..(290): Homolog of NCBI NO: 21674801 NR Description: conserved hypothetical protein [Chlorobium TLS] >gi|21648018|gb|AAM73208.1| conserved hypothetical protein
LSYSTHRAHLLQSRPLSPSPTVPAGAASASCAPRSLCFRRRRSSRLAAERTRRPTMAAAISLEAGGALAHDLGSAVVTGGVALALLKFFEELAKRGVFEQKLSRKLVHISVGLVFMLFWPLFSSGWYTPFLAALAPGVNIIRMLLLGLGLMKNEAMVKSMSRSGDYRELLKGPLYYAATITFATSLLWRTSPVAIALICNLCAGDGIADVVGRRLGKEKLPYNPNKSYAGSIAMAVAGFLASVGYMHYFHTFGFIEETWYMALSFLVVSVAAALVESHPISTELDDNLTVLLTSFLVGSLIF

SEQ ID NO: 7306 - protein, 247 aa, Zea mays subsp. mays
  peptide (1)..(247): Ceres Seq. ID no. 12336655
  misc_feature (1)..(247): Homolog of NCBI NO: 21593148 NR Description: unknown [Arabidopsis thaliana]
  misc_feature (1)..(247): Homolog of NCBI NO: 15237702 NR Description: putative protein; protein id: At5g58560.1,
  misc_feature (1)..(217): Homolog of NCBI NO: 8843778 NR Description: emb|CAB85555.1~gene_id:MZN1.2~similar to unknown
  misc_feature (1)..(247): Homolog of NCBI NO: 28393229 NR Description: unknown protein [Arabidopsis thaliana]
  misc_feature (1)..(247): Homolog of NCBI NO: 15238184 NR Description: putative protein; protein id: At5g04490.1, by cDNA: 125255. [Arabidopsis thaliana] >gi|11290068|pir||T48445
  misc_feature (1)..(247): Homolog of NCBI NO: 21537252 NR Description: unknown [Arabidopsis thaliana]
  misc_feature (1)..(247): Homolog of NCBI NO: 32488404 NR Description: OSJNBa0043A12.34 [Oryza sativa (japonica
  misc_feature (51)..(246): Homolog of NCBI NO: 28850457 NR Description: similar to Oryza sativa (japonica
  misc_feature (47)..(235): Homolog of NCBI NO: 21674801 NR Description: conserved hypothetical protein [Chlorobium TLS] >gi|21648018|gb|AAM73208.1| conserved hypothetical protein
  misc_feature (1)..(247): Homolog of NCBI NO: 34907982 NR Description: P0446G04.23 [Oryza sativa (japonica
MAAAISLEAGGALAHDLGSAVVTGGVALALLKFFEELAKRGVFEQKLSRKLVHISVGLVFMLFWPLFSSGWYTPFLAALAPGVNIIRMLLLGLGLMKNEAMVKSMSRSGDYRELLKGPLYYAATITFATSLLWRTSPVAIALICNLCAGDGIADVVGRRLGKEKLPYNPNKSYAGSIAMAVAGFLASVGYMHYFHTFGFIEETWYMALSFLVVSVAAALVESHPISTELDDNLTVLLTSFLVGSLIF

SEQ ID NO: 7307 - protein, 187 aa, Zea mays subsp. mays
  peptide (1)..(187): Ceres Seq. ID no. 12336656
  misc_feature (1)..(187): Homolog of NCBI NO: 34907982 NR Description: P0446G04.23 [Oryza sativa (japonica
  misc_feature (1)..(187): Homolog of NCBI NO: 21593148 NR Description: unknown [Arabidopsis thaliana]
  misc_feature (1)..(187): Homolog of NCBI NO: 15237702 NR Description: putative protein; protein id: At5g58560.1,
  misc_feature (1)..(157): Homolog of NCBI NO: 8843778 NR Description: emb|CAB85555.1~gene_id:MZN1.2~similar to unknown
  misc_feature (1)..(187): Homolog of NCBI NO: 28393229 NR Description: unknown protein [Arabidopsis thaliana]
  misc_feature (1)..(187): Homolog of NCBI NO: 15238184 NR Description: putative protein; protein id: At5g04490.1, by cDNA: 125255. [Arabidopsis thaliana] >gi|11290068|pir||T48445
  misc_feature (1)..(187): Homolog of NCBI NO: 21537252 NR Description: unknown [Arabidopsis thaliana]
  misc_feature (1)..(187): Homolog of NCBI NO: 32488404 NR Description: OSJNBa0043A12.34 [Oryza sativa (japonica
  misc_feature (1)..(186): Homolog of NCBI NO: 28850457 NR Description: similar to Oryza sativa (japonica
  misc_feature (1)..(175): Homolog of NCBI NO: 21674801 NR Description: conserved hypothetical protein [Chlorobium TLS] >gi|21648018|gb|AAM73208.1| conserved hypothetical protein
MLFWPLFSSGWYTPFLAALAPGVNIIRMLLLGLGLMKNEAMVKSMSRSGDYRELLKGPLYYAATITFATSLLWRTSPVAIALICNLCAGDGIADVVGRRLGKEKLPYNPNKSYAGSIAMAVAGFLASVGYMHYFHTFGFIEETWYMALSFLVVSVAAALVESHPISTELDDNLTVLLTSFLVGSLIF

SEQ ID NO: 7308 - DNA, 1345 bp, Zea mays subsp. mays
  misc_feature (1)..(1345): Ceres Seq. ID no. 12407229
  misc_feature: MA Experiment ID: 108522 Result: Up-regulated in Transcription
  misc_feature: MA Experiment 108522 PARAMETER Experiment Name: Zm_42deg_Heat_P Parameter: Age (day) Value: 8
  misc_feature: MA Experiment 108522 PARAMETER Experiment Name: Zm_42deg_Heat_P Parameter: Organism Value: Zea mays
  misc_feature: MA Experiment 108522 PARAMETER Experiment Name: Zm_42deg_Heat_P Parameter: Plant Line Value: 35A19
  misc_feature: MA Experiment 108522 PARAMETER Experiment Name: Zm_42deg_Heat_P Parameter: Temperature (deg C) Value: 42 vs. 22
  misc_feature: MA Experiment 108522 PARAMETER Experiment Name: Zm_42deg_Heat_P Parameter: Timepoint (hr) Value: 1
  misc_feature: MA Experiment 108522 PARAMETER Experiment Name: Zm_42deg_Heat_P Parameter: Tissue Value: Aerial
  misc_feature: MA Experiment ID: 108530 Result: Down-regulated in Transcription
  misc_feature: MA Experiment 108530 PARAMETER Experiment Name: Zm_Imbibed_Seeds_P Parameter: Age (day) Value: 6 vs. 2
  misc_feature: MA Experiment 108530 PARAMETER Experiment Name: Zm_Imbibed_Seeds_P Parameter: Organism Value: Zea mays
  misc_feature: MA Experiment 108530 PARAMETER Experiment Name: Zm_Imbibed_Seeds_P Parameter: Plant Line Value: 35A19
  misc_feature: MA Experiment 108530 PARAMETER Experiment Name: Zm_Imbibed_Seeds_P Parameter: Tissue Value: Aerial vs. Embryo
  misc_feature: MA Experiment ID: 108544 Result: Down-regulated in Transcription
  misc_feature: MA Experiment ID: 108559 Result: Up-regulated in Transcription
  misc_feature: MA Experiment 108559 PARAMETER Experiment Name: Zm_5mM_NO_P Parameter: Age (day) Value: 8
  misc_feature: MA Experiment 108559 PARAMETER Experiment Name: Zm_5mM_NO_P Parameter: Organism Value: Zea mays
  misc_feature: MA Experiment 108559 PARAMETER Experiment Name: Zm_5mM_NO_P Parameter: Plant Line Value: 35A19
  misc_feature: MA Experiment 108559 PARAMETER Experiment Name: Zm_5mM_NO_P Parameter: Timepoint (hr) Value: 12
  misc_feature: MA Experiment 108559 PARAMETER Experiment Name: Zm_5mM_NO_P Parameter: Tissue Value: Aerial
  misc_feature: MA Experiment 108559 PARAMETER Experiment Name: Zm_5mM_NO_P Parameter: Treatment Value: 5mM NO vs. No Treatment
  misc_feature: MA Experiment ID: 20000492 Result: Up-regulated in Transcription
  misc_feature: MA Experiment 20000492 PARAMETER Experiment Name: Zm_Hybrid_Seed_Dev_P Parameter: DAP Value: 12
  misc_feature: MA Experiment 20000492 PARAMETER Experiment Name: Zm_Hybrid_Seed_Dev_P Parameter: Organism Value: Zea mays
  misc_feature: MA Experiment 20000492 PARAMETER Experiment Name: Zm_Hybrid_Seed_Dev_P Parameter: Plant Line Value: 35A19
  misc_feature: MA Experiment 20000492 PARAMETER Experiment Name: Zm_Hybrid_Seed_Dev_P Parameter: Tissue Value: Fert Kernel vs. Unfert Floret
  misc_feature: MA Experiment ID: 20000535 Result: Up-regulated in Transcription
  misc_feature: MA Experiment 20000535 PARAMETER Experiment Name: Zm_Hybrid_Seed_Dev_P Parameter: DAP Value: 30 vs. 12
  misc_feature: MA Experiment 20000535 PARAMETER Experiment Name: Zm_Hybrid_Seed_Dev_P Parameter: Organism Value: Zea mays
  misc_feature: MA Experiment 20000535 PARAMETER Experiment Name: Zm_Hybrid_Seed_Dev_P Parameter: Plant Line Value: 35A19
  misc_feature: MA Experiment 20000535 PARAMETER Experiment Name: Zm_Hybrid_Seed_Dev_P Parameter: Tissue Value: Embryo vs. Unfert Floret
aaaacctctagagccaaaaagacataaacaccataaaaaagagctcatttaccatccgcaggagctcccttccagacgcttccgctcttctctctctgcttccggcagaaatcaaggcagtattaggatggtgaccccgcgcctcttcgcgcgactctaccggcattgcgtcggcgcagcggctgcgtcatcagccgcggggcggcaccggggggccctggcagcggcggccgtggagcagttcgccggttcctccctgcctgtcggggttccaaaatttttgaatcatcatttcagatactcaaccagcatttttcaaaagattggtttctcgtctgtttcaccacaacaaagtgatgatgatgttaatgagctgaaagaccacgaaagggccttagatggatcaagtgaagattgtccatctggaagtattgaaggccttgatctgtcgagagatgatttggtgaagctagttcgtgagaaggatggattgttgaagtccaaagatggtgaaatcaaagatatgaaggataaggttttgcgcagctatgcagaaatggaaaatatcattgctcggacaaaacgtgaatctgagaactccaaaaaatatgcagtacagaacttctctaagagcctgctagatgttgctgacaatttggctagggcatcatctgttgtcaaggaaagcttctcgaaaattgatacctcaaaagattctgctggagctgtcccactactgaaaaccctgctggagggtgtggacatgactgagaagcaacttgcagaggtcttcaagaagtttggagtcgaaaaatttgacccgctgaatgaggaatttgatcctaacaggcattgtcagtttttcaaattcctgatccttcaaaaccaccggggaccgttgcttctgttgtaaaggtgggctacatgttacacgatcgcgtcctccgccctgccgaagtcggcgtcactgccacggagggaggtgcgcatgcaactgaagaggcagagaagccggaggagaaaacagcgagggactaaagttagccgtggtgtagtcaaggaggattgaatgccgtttctgtttagagtttgagaaacatgaatgaatgcagaaaacttttggccgtgttcgacacggggagaaagtttagcaagcaggctggcgccttttttttttttcttgtttggaacttggaatgaaatccattttggggtttggagcaaccctgcatgtcgtacaacaccttctgcctgctagtatgtgaccgttgaccttgagggatgggcatgaggcccttggccgatactaaagagctgtgctgccgtgatcggctttctgtggctc

SEQ ID NO: 7309 - protein, 303 aa, Zea mays subsp. mays
  peptide (1)..(303): Ceres Seq. ID no. 12407230
  misc_feature (135)..(289): Pfam Name: GrpE Pfam Description: GrpE
  misc_feature (47)..(289): Homolog of NCBI NO: 38636943 NR Description: putative chaperone GrpE [Oryza sativa (japonica group)] >gi|38637387|dbj|BAD03646.1| putative chaperone GrpE
  misc_feature (109)..(289): Homolog of NCBI NO: 7485329 NR Description: hypothetical protein F10M23.120 - Arabidopsis >gi|4455201|emb|CAB36524.1| grpE like protein [Arabidopsis >gi|7269530|emb|CAB79533.1| grpE like protein [Arabidopsis
  misc_feature (109)..(289): Homolog of NCBI NO: 18416821 NR Description: grpE like protein; protein id: At4g26780.1, by cDNA: 35284. [Arabidopsis thaliana] grpE like protein [Arabidopsis thaliana]
  misc_feature (100)..(289): Homolog of NCBI NO: 3851640 NR Description: chaperone GrpE type 2 [Nicotiana tabacum]
  misc_feature (103)..(289): Homolog of NCBI NO: 3851638 NR Description: chaperone GrpE type 1 [Nicotiana tabacum]
  misc_feature (88)..(289): Homolog of NCBI NO: 15240475 NR Description: chaperone GrpE-like protein; protein id: supported by cDNA: 20790., supported by cDNA: gi_14596128,
  misc_feature (43)..(289): Homolog of NCBI NO: 21554173 NR Description: chaperone GrpE-like protein [Arabidopsis thaliana]
  misc_feature (109)..(289): Homolog of NCBI NO: 1669597 NR Description: AR192 [Arabidopsis thaliana]
  misc_feature (171)..(282): Homolog of NCBI NO: 22962327 NR Description: hypothetical protein [Rhodopseudomonas palustris]
  misc_feature (171)..(289): Homolog of NCBI NO: 23012592 NR Description: hypothetical protein [Magnetospirillum
KPLEPKRHKHHKKELIYHPQELPSRRFRSSLSASGRNQGSIRMVTPRLFARLYRHCVGAAAASSAAGRHRGALAAAAVEQFAGSSLPVGVPKFLNHHFRYSTSIFQKIGFSSVSPQQSDDDVNELKDHERALDGSSEDCPSGSIEGLDLSRDDLVKLVREKDGLLKSKDGEIKDMKDKVLRSYAEMENIIARTKRESENSKKYAVQNFSKSLLDVADNLARASSVVKESFSKIDTSKDSAGAVPLLKTLLEGVDMTEKQLAEVFKKFGVEKFDPLNEEFDPNRHCQFFKFLILQNHRGPLLLL

SEQ ID NO: 7310 - protein, 261 aa, Zea mays subsp. mays
  peptide (1)..(261): Ceres Seq. ID no. 12407231
  misc_feature (93)..(247): Pfam Name: GrpE Pfam Description: GrpE
  misc_feature (5)..(247): Homolog of NCBI NO: 38636943 NR Description: putative chaperone GrpE [Oryza sativa (japonica group)] >gi|38637387|dbj|BAD03646.1| putative chaperone GrpE
  misc_feature (67)..(247): Homolog of NCBI NO: 7485329 NR Description: hypothetical protein F10M23.120 - Arabidopsis >gi|4455201|emb|CAB36524.1| grpE like protein [Arabidopsis >gi|7269530|emb|CAB79533.1| grpE like protein [Arabidopsis
  misc_feature (67)..(247): Homolog of NCBI NO: 18416821 NR Description: grpE like protein; protein id: At4g26780.1, by cDNA: 35284. [Arabidopsis thaliana] grpE like protein [Arabidopsis thaliana]
  misc_feature (58)..(247): Homolog of NCBI NO: 3851640 NR Description: chaperone GrpE type 2 [Nicotiana tabacum]
  misc_feature (61)..(247): Homolog of NCBI NO: 3851638 NR Description: chaperone GrpE type 1 [Nicotiana tabacum]
  misc_feature (46)..(247): Homolog of NCBI NO: 15240475 NR Description: chaperone GrpE-like protein; protein id: supported by cDNA: 20790., supported by cDNA: gi_14596128,
  misc_feature (1)..(247): Homolog of NCBI NO: 21554173 NR Description: chaperone GrpE-like protein [Arabidopsis thaliana]
  misc_feature (67)..(247): Homolog of NCBI NO: 1669597 NR Description: AR192 [Arabidopsis thaliana]
  misc_feature (129)..(240): Homolog of NCBI NO: 22962327 NR Description: hypothetical protein [Rhodopseudomonas palustris]
  misc_feature (129)..(247): Homolog of NCBI NO: 23012592 NR Description: hypothetical protein [Magnetospirillum
MVTPRLFARLYRHCVGAAAASSAAGRHRGALAAAAVEQFAGSSLPVGVPKFLNHHFRYSTSIFQKIGFSSVSPQQSDDDVNELKDHERALDGSSEDCPSGSIEGLDLSRDDLVKLVREKDGLLKSKDGEIKDMKDKVLRSYAEMENIIARTKRESENSKKYAVQNFSKSLLDVADNLARASSVVKESFSKIDTSKDSAGAVPLLKTLLEGVDMTEKQLAEVFKKFGVEKFDPLNEEFDPNRHCQFFKFLILQNHRGPLLLL

SEQ ID NO: 7311 - DNA, 1233 bp, Zea mays subsp. mays; identical to SEQ ID NO: 2545
  misc_feature (1)..(1233): Ceres Seq. ID no. 13564187
  misc_feature: MA Experiment ID: 108536 Result: Up-regulated in Transcription
  misc_feature: MA Experiment 108536 PARAMETER Experiment Name: Zm_Meristem_P Parameter: Age (day) Value: 8
  misc_feature: MA Experiment 108536 PARAMETER Experiment Name: Zm_Meristem_P Parameter: Organism Value: Zea mays
  misc_feature: MA Experiment 108536 PARAMETER Experiment Name: Zm_Meristem_P Parameter: Plant Line Value: 35A19
  misc_feature: MA Experiment 108536 PARAMETER Experiment Name: Zm_Meristem_P Parameter: Tissue Value: Shoot Meristem vs. Above Shoot Meristem

SEQ ID NO: 7312 - protein, 267 aa, Zea mays subsp. mays; identical to SEQ ID NO: 2546
  peptide (1)..(267): Ceres Seq. ID no. 13564188
  misc_feature (1)..(267): Homolog of NCBI NO: 11385533 NR Description: glutathione S-transferase GST 41 [Zea mays]
  misc_feature (1)..(267): Homolog of NCBI NO: 11385533 NR Description: glutathione S-transferase GST 41 [Zea mays]
  misc_feature (1)..(267): Homolog of NCBI NO: 11385533 NR Description: glutathione S-transferase GST 41 [Zea mays]

SEQ ID NO: 7313 - protein, 251 aa, Zea mays subsp. mays; identical to SEQ ID NO: 2547
  peptide (1)..(251): Ceres Seq. ID no. 13564189
  misc_feature (1)..(251): Homolog of NCBI NO: 11385533 NR Description: glutathione S-transferase GST 41 [Zea mays]
  misc_feature (1)..(251): Homolog of NCBI NO: 11385533 NR Description: glutathione S-transferase GST 41 [Zea mays]
  misc_feature (1)..(251): Homolog of NCBI NO: 11385533 NR Description: glutathione S-transferase GST 41 [Zea mays]

SEQ ID NO: 7314 - DNA, 870 bp, Zea mays subsp. mays
  misc_feature (1)..(870): Ceres Seq. ID no. 12566255
  misc_feature: MA Experiment ID: 108523 Result: Down-regulated in Transcription
  misc_feature: MA Experiment 108523 PARAMETER Experiment Name: Zm_42deg_Heat_P Parameter: Age (day) Value: 8
  misc_feature: MA Experiment 108523 PARAMETER Experiment Name: Zm_42deg_Heat_P Parameter: Organism Value: Zea mays
  misc_feature: MA Experiment 108523 PARAMETER Experiment Name: Zm_42deg_Heat_P Parameter: Plant Line Value: 35A19
  misc_feature: MA Experiment 108523 PARAMETER Experiment Name: Zm_42deg_Heat_P Parameter: Temperature (deg C) Value: 42 vs. 22
  misc_feature: MA Experiment 108523 PARAMETER Experiment Name: Zm_42deg_Heat_P Parameter: Timepoint (hr) Value: 6
  misc_feature: MA Experiment 108523 PARAMETER Experiment Name: Zm_42deg_Heat_P Parameter: Tissue Value: Aerial
  misc_feature: MA Experiment ID: 108527 Result: Down-regulated in Transcription
  misc_feature: MA Experiment 108527 PARAMETER Experiment Name: Zm_5mM_NO_P Parameter: Age (day) Value: 8
  misc_feature: MA Experiment 108527 PARAMETER Experiment Name: Zm_5mM_NO_P Parameter: Organism Value: Zea mays
  misc_feature: MA Experiment 108527 PARAMETER Experiment Name: Zm_5mM_NO_P Parameter: Plant Line Value: 35A19
  misc_feature: MA Experiment 108527 PARAMETER Experiment Name: Zm_5mM_NO_P Parameter: Timepoint (hr) Value: 6
  misc_feature: MA Experiment 108527 PARAMETER Experiment Name: Zm_5mM_NO_P Parameter: Tissue Value: Aerial
  misc_feature: MA Experiment 108527 PARAMETER Experiment Name: Zm_5mM_NO_P Parameter: Treatment Value: 5mM NO vs. No Treatment
  misc_feature: MA Experiment ID: 108536 Result: Up-regulated in Transcription
  misc_feature: MA Experiment 108536 PARAMETER Experiment Name: Zm_Meristem_P Parameter: Age (day) Value: 8
  misc_feature: MA Experiment 108536 PARAMETER Experiment Name: Zm_Meristem_P Parameter: Organism Value: Zea mays
  misc_feature: MA Experiment 108536 PARAMETER Experiment Name: Zm_Meristem_P Parameter: Plant Line Value: 35A19
  misc_feature: MA Experiment 108536 PARAMETER Experiment Name: Zm_Meristem_P Parameter: Tissue Value: Shoot Meristem vs. Above Shoot Meristem
  misc_feature: MA Experiment ID: 20000627 Result: Down-regulated in Transcription
  misc_feature: MA Experiment 20000627 PARAMETER Experiment Name: Zm_Herbicide-Treatments_P Parameter: Timepoint (hr) Value: 12
  misc_feature: MA Experiment 20000627 PARAMETER Experiment Name: Zm_Herbicide-Treatments_P Parameter: Tissue Value: Aerial
  misc_feature: MA Experiment 20000627 PARAMETER Experiment Name: Zm_Herbicide-Treatments_P Parameter: Treatment Value: Finale vs. No Treatment
taatcgaaaaagactcatcagttcagttcaatccaatccaaattccaatcccacccagccccttccaagaactccagtcgtccaacaaaagcaggagtcgcatcccagacgcccccgcaatcccgcatcagagacaggcagggagggaaccgagatctgtccgtccgtgtcgatggagtcaacggtggagcggataagctcgtcggtgcagtcctgggtgaaggaccacgagctcgcagccatcggaggcgtgtgggctgcggcggcgggcgcttcggtggcgtacagccggaggaaggcgccgcagcggggcacgggcctgcgcctcatccacgccaggatgcacgcgcaggcgctcacgctcgccgtcctcggcggcgccgccctcttccactgctacggcgacggcggccgcaggaagagggccgacgacatcgacctcgacttctactcgcagctgccgccggcaaccgacgccgacggcaacgagaaccagcggtggagctggtaggaggaggagccgaggagaaggaagaactgtagcagactagcagtgggtgcttgcagcaataataattgaggtggggcctatgacgtggcgcgcgggagggattagtctgtgctaatcctaatccatcctacgacgggcggcccgtttacttaacattatcggtccatgctgtcatggccggcaccacatccacatctactagtcatctaggagcagccgcccatagtttgctgctgctgctgcttctctcctgtatcacagtactaccaccaccaccatttgtttatctgatgaatgaacggtggcgatgatgacgatattgtttatatcacgttttcatttttttttttgcactcttc

SEQ ID NO: 7315 - protein, 169 aa, Zea mays subsp. mays
  peptide (1)..(169): Ceres Seq. ID no. 12566256
  misc_feature (69)..(129): Pfam Name: Hypoxia induced protein conserved region Pfam Description: Hypoxia induced protein conserved region
  misc_feature (62)..(102): Homolog of NCBI NO: 3282394 NR Description: anaerobically inducible early gene 2 [Oryza
  misc_feature (67)..(133): Homolog of NCBI NO: 15241035 NR Description: putative protein; protein id: At5g27760.1, by cDNA: 108472. [Arabidopsis thaliana] unknown [Arabidopsis thaliana] >gi|28393673|gb|AAO42249.1|
  misc_feature (69)..(133): Homolog of NCBI NO: 15230007 NR Description: unknown protein; protein id: At3g05550.1 thaliana] >gi|6714455|gb|AAF26142.1|AC011620_18 unknown protein
NRKRLISSVQSNPNSNPTQPLPRTPVVQQKQESHPRRPRNPASETGREGTEICPSVSMESTVERISSSVQSWVKDHELAAIGGVWAAAAGASVAYSRRKAPQRGTGLRLIHARMHAQALTLAVLGGAALFHCYGDGGRRKRADDIDLDFYSQLPPATDADGNENQRWSW

SEQ ID NO: 7316 - protein, 112 aa, Zea mays subsp. mays
  peptide (1)..(112): Ceres Seq. ID no. 12566257
  misc_feature (12)..(72): Pfam Name: Hypoxia induced protein conserved region Pfam Description: Hypoxia induced protein conserved region
  misc_feature (5)..(45): Homolog of NCBI NO: 3282394 NR Description: anaerobically inducible early gene 2 [Oryza
  misc_feature (10)..(76): Homolog of NCBI NO: 15241035 NR Description: putative protein; protein id: At5g27760.1, by cDNA: 108472. [Arabidopsis thaliana] unknown [Arabidopsis thaliana] >gi|28393673|gb|AAO42249.1|
  misc_feature (12)..(76): Homolog of NCBI NO: 15230007 NR Description: unknown protein; protein id: At3g05550.1 thaliana] >gi|6714455|gb|AAF26142.1|AC011620_18 unknown protein
MESTVERISSSVQSWVKDHELAAIGGVWAAAAGASVAYSRRKAPQRGTGLRLIHARMHAQALTLAVLGGAALFHCYGDGGRRKRADDIDLDFYSQLPPATDADGNENQRWSW

SEQ ID NO: 7317 - DNA, 1530 bp, Zea mays subsp. mays
  misc_feature (1)..(1530): Ceres Seq. ID no. 12408856
  misc_feature: MA Experiment ID: 108527 Result: Down-regulated in Transcription
  misc_feature: MA Experiment 108527 PARAMETER Experiment Name: Zm_5mM_NO_P Parameter: Age (day) Value: 8
  misc_feature: MA Experiment 108527 PARAMETER Experiment Name: Zm_5mM_NO_P Parameter: Organism Value: Zea mays
  misc_feature: MA Experiment 108527 PARAMETER Experiment Name: Zm_5mM_NO_P Parameter: Plant Line Value: 35A19
  misc_feature: MA Experiment 108527 PARAMETER Experiment Name: Zm_5mM_NO_P Parameter: Timepoint (hr) Value: 6
  misc_feature: MA Experiment 108527 PARAMETER Experiment Name: Zm_5mM_NO_P Parameter: Tissue Value: Aerial
  misc_feature: MA Experiment 108527 PARAMETER Experiment Name: Zm_5mM_NO_P Parameter: Treatment Value: 5mM NO vs. No Treatment
  misc_feature: MA Experiment ID: 108528 Result: Up-regulated in Transcription
  misc_feature: MA Experiment 108528 PARAMETER Experiment Name: Zm_Imbibed_Seeds_P Parameter: Age (day) Value: 5 vs. 2
  misc_feature: MA Experiment 108528 PARAMETER Experiment Name: Zm_Imbibed_Seeds_P Parameter: Organism Value: Zea mays
  misc_feature: MA Experiment 108528 PARAMETER Experiment Name: Zm_Imbibed_Seeds_P Parameter: Plant Line Value: 35A19
  misc_feature: MA Experiment 108528 PARAMETER Experiment Name: Zm_Imbibed_Seeds_P Parameter: Tissue Value: Aerial vs. Embryo
  misc_feature: MA Experiment ID: 108529 Result: Up-regulated in Transcription
  misc_feature: MA Experiment 108529 PARAMETER Experiment Name: Zm_Imbibed_Seeds_P Parameter: Age (day) Value: 5 vs. 2
  misc_feature: MA Experiment 108529 PARAMETER Experiment Name: Zm_Imbibed_Seeds_P Parameter: Organism Value: Zea mays
  misc_feature: MA Experiment 108529 PARAMETER Experiment Name: Zm_Imbibed_Seeds_P Parameter: Plant Line Value: 35A19
  misc_feature: MA Experiment 108529 PARAMETER Experiment Name: Zm_Imbibed_Seeds_P Parameter: Tissue Value: Roots vs. Embryo
  misc_feature: MA Experiment ID: 108530 Result: Up-regulated in Transcription
  misc_feature: MA Experiment 108530 PARAMETER Experiment Name: Zm_Imbibed_Seeds_P Parameter: Age (day) Value: 6 vs. 2
  misc_feature: MA Experiment 108530 PARAMETER Experiment Name: Zm_Imbibed_Seeds_P Parameter: Organism Value: Zea mays
  misc_feature: MA Experiment 108530 PARAMETER Experiment Name: Zm_Imbibed_Seeds_P Parameter: Plant Line Value: 35A19
  misc_feature: MA Experiment 108530 PARAMETER Experiment Name: Zm_Imbibed_Seeds_P Parameter: Tissue Value: Aerial vs. Embryo
  misc_feature: MA Experiment ID: 108535 Result: Down-regulated in Transcription
  misc_feature: MA Experiment 108535 PARAMETER Experiment Name: Zm_Meristem_P Parameter: Age (day) Value: 8
  misc_feature: MA Experiment 108535 PARAMETER Experiment Name: Zm_Meristem_P Parameter: Organism Value: Zea mays
  misc_feature: MA Experiment 108535 PARAMETER Experiment Name: Zm_Meristem_P Parameter: Plant Line Value: 35A19
  misc_feature: MA Experiment 108535 PARAMETER Experiment Name: Zm_Meristem_P Parameter: Tissue Value: Root Meristem vs. Above Root Meristem
  misc_feature: MA Experiment ID: 108546 Result: Up-regulated in Transcription
  misc_feature: MA Experiment 108546 PARAMETER Experiment Name: Zm_Imbibed_Seeds_P Parameter: Age (day) Value: 3 vs. 2
  misc_feature: MA Experiment 108546 PARAMETER Experiment Name: Zm_Imbibed_Seeds_P Parameter: Organism Value: Zea mays
  misc_feature: MA Experiment 108546 PARAMETER Experiment Name: Zm_Imbibed_Seeds_P Parameter: Plant Line Value: 35A19
  misc_feature: MA Experiment 108546 PARAMETER Experiment Name: Zm_Imbibed_Seeds_P Parameter: Tissue Value: Roots vs. Embryo
  misc_feature: MA Experiment ID: 108597 Result: Down-regulated in Transcription
  misc_feature: MA Experiment 108597 PARAMETER Experiment Name: Zm_100uM_ABA_P Parameter: Age (day) Value: 9
  misc_feature: MA Experiment 108597 PARAMETER Experiment Name: Zm_100uM_ABA_P Parameter: Organism Value: Zea mays
  misc_feature: MA Experiment 108597 PARAMETER Experiment Name: Zm_100uM_ABA_P Parameter: Plant Line Value: 35A19
  misc_feature: MA Experiment 108597 PARAMETER Experiment Name: Zm_100uM_ABA_P Parameter: Timepoint (hr) Value: 24
  misc_feature: MA Experiment 108597 PARAMETER Experiment Name: Zm_100uM_ABA_P Parameter: Tissue Value: Aerial
  misc_feature: MA Experiment 108597 PARAMETER Experiment Name: Zm_100uM_ABA_P Parameter: Treatment Value: 100uM ABA vs. No Treatment
  misc_feature: MA Experiment ID: 108689 Result: Down-regulated in Transcription
  misc_feature: MA Experiment 108689 PARAMETER Experiment Name: Zm_Drought_Roots_P Parameter: Age (day) Value: 9
  misc_feature: MA Experiment 108689 PARAMETER Experiment Name: Zm_Drought_Roots_P Parameter: Organism Value: Zea mays
  misc_feature: MA Experiment 108689 PARAMETER Experiment Name: Zm_Drought_Roots_P Parameter: Plant Line Value: 35A19
  misc_feature: MA Experiment 108689 PARAMETER Experiment Name: Zm_Drought_Roots_P Parameter: Timepoint (hr) Value: 24
  misc_feature: MA Experiment 108689 PARAMETER Experiment Name: Zm_Drought_Roots_P Parameter: Tissue Value: Roots
  misc_feature: MA Experiment 108689 PARAMETER Experiment Name: Zm_Drought_Roots_P Parameter: Treatment Value: Drought vs. No Drought
  misc_feature: MA Experiment ID: 20000630 Result: Down-regulated in Transcription
  misc_feature: MA Experiment 20000630 PARAMETER Experiment Name: Zm_Herbicide-Treatments_P Parameter: Timepoint (hr) Value: 4
  misc_feature: MA Experiment 20000630 PARAMETER Experiment Name: Zm_Herbicide-Treatments_P Parameter: Tissue Value: Aerial
  misc_feature: MA Experiment 20000630 PARAMETER Experiment Name: Zm_Herbicide-Treatments_P Parameter: Treatment Value: Roundup vs. No Treatment
acttctttctcgtcttcctctcctgtctcctcgcagcagggtgctggaagaagtttctggttaggagaatccggttgaggttgccatttcccaacttcttccagcggttcggctcggaggcgaactgagatgtcctgttcgtgatcggtttgttcttgcagctgcagacagcttgtcgattccttgcttgaggagcagccatggacagaagaaaccgaccagctccgttggttgacagctctgcatgcttttgccgagtggacagatcatccgccgcggcggcggcgaggcgaatcccagtgtcgaaggcgtgcgtgcaaccgagcctcagggcgtccatccacccgctgaagccacggccgggcgcagagcggagccgcggaggggcgtgcccgctgctcccaggccttccggacgacctcgccattgcctgtctcatccgggtgcccagagccgaccactggaagctgaggctggtgtgccggaagtggtgccgcctgctcgccggcaactacttctacggcctccgccggcggctcgggctcgcggagcagtggctgtacgccgtgaagcgcgacggcagggacgggcgcgtgtcgtgggacgtgctcgacccgtcgcgcggcgagtggcgcgcgctgccgcccgtgccgggcgagtacgcggaggccgacgggttcggctgcgccgtgctcggcggctgccacctgtacctgctcggcggcagggacccgcgcaggggcagcgccatgcggcgggtggtgttctacagcgcccggagcaaccggtggcaccgcgcgccggacatgctgcgccgccggcagttcttcgacgtgtgcgtcatgggcaaccgcctgtacgtcgcgggcggtgagggtggcggcggcgggctcaggtccgctgaggtgttcgacccggccaagaaccgctggtccttcgtggccgagatggccgcgccgatggcgccgttcgtcagcgcggtgcatggcgggcggtggttcgtgaagggtattggcgcgcagcagcaggtgctaagccaggcatactccccggtgtctgactcgtggtccatcgtcctcgacggcatggtcaccggctggcggagccccagcgcgtgcctcaacggccggctctatgctgcagagtgcatggacggatgccggttgagggcctacgacgaggccgtggacgcgtggagcacctgcgccgacagcaagcagcaccgagggagctcccaggcggctgccattgtcgccctccacggaaggctcttcgtcgtccgcaacgacatgagcgtctcggccgtccaggtggcggccgaggcgggaaagcagaggtggcagaccctcgccggcaaagcgcataccaagagctttgtcacgggcctgttgtccaacctctctggtcgcagccgcgccaagaacaacatcctccattgccaagttcttgaggtctagctgtcttgctccctgatgagctatgcttataagttactagaatcacgcaatgaaaaagtacgtgagaaatctc

SEQ ID NO: 7318 - protein, 418 aa, Zea mays subsp. mays
  peptide (1)..(418): Ceres Seq. ID no. 12408857
  misc_feature (157)..(204): Pfam Name: Kelch motif Pfam Description: Kelch motif
  misc_feature (8)..(417): Homolog of NCBI NO: 18405298 NR Description: expressed protein; protein id: At1g55270.1, by cDNA: gi_13877750, supported by cDNA: gi_15293270 [Arabidopsis >gi|13877751|gb|AAK43953.1|AF370138_1 unknown protein
  misc_feature (8)..(418): Homolog of NCBI NO: 37534254 NR Description: unknown protein [Oryza sativa (japonica
  misc_feature (8)..(384): Homolog of NCBI NO: 25405811 NR Description: unknown protein, 58496-60308 [imported] -
  misc_feature (11)..(418): Homolog of NCBI NO: 19071626 NR Description: putative Kelch motif containing protein [Oryza
  misc_feature (19)..(383): Homolog of NCBI NO: 18397351 NR Description: expressed protein; protein id: At1g30090.1, by cDNA: gi_16209716 [Arabidopsis thaliana]
  misc_feature (57)..(372): Homolog of NCBI NO: 18400571 NR Description: expressed protein; protein id: At2g24540.1, by cDNA: 36719., supported by cDNA: gi_18086558 [Arabidopsis >gi|25412221|pir||H84637 hypothetical protein At2g24540
  misc_feature (57)..(372): Homolog of NCBI NO: 21593163 NR Description: unknown [Arabidopsis thaliana]
  misc_feature (66)..(371): Homolog of NCBI NO: 18411974 NR Description: SKP1 interacting partner 4 (SKIP4), putative; id: At3g61350.1 [Arabidopsis thaliana] >gi|11358117|pir||T47927
  misc_feature (66)..(371): Homolog of NCBI NO: 26453288 NR Description: putative SKP1 interacting partner 4 SKIP4
  misc_feature (65)..(359): Homolog of NCBI NO: 15220452 NR Description: unknown protein; protein id: At1g67480.1
MDRRNRPAPLVDSSACFCRVDRSSAAAAARRIPVSKACVQPSLRASIHPLKPRPGAERSRGGACPLLPGLPDDLAIACLIRVPRADHWKLRLVCRKWCRLLAGNYFYGLRRRLGLAEQWLYAVKRDGRDGRVSWDVLDPSRGEWRALPPVPGEYAEADGFGCAVLGGCHLYLLGGRDPRRGSAMRRVVFYSARSNRWHRAPDMLRRRQFFDVCVMGNRLYVAGGEGGGGGLRSAEVFDPAKNRWSFVAEMAAPMAPFVSAVHGGRWFVKGIGAQQQVLSQAYSPVSDSWSIVLDGMVTGWRSPSACLNGRLYAAECMDGCRLRAYDEAVDAWSTCADSKQHRGSSQAAAIVALHGRLFVVRNDMSVSAVQVAAEAGKQRWQTLAGKAHTKSFVTGLLSNLSGRSRAKNNILHCQVLEV

SEQ ID NO: 7319 - protein, 235 aa, Zea mays subsp. mays
  peptide (1)..(235): Ceres Seq. ID no. 12408858
  misc_feature (1)..(234): Homolog of NCBI NO: 18405298 NR Description: expressed protein; protein id: At1g55270.1, by cDNA: gi_13877750, supported by cDNA: gi_15293270 [Arabidopsis >gi|13877751|gb|AAK43953.1|AF370138_1 unknown protein
  misc_feature (1)..(235): Homolog of NCBI NO: 37534254 NR Description: unknown protein [Oryza sativa (japonica
  misc_feature (1)..(201): Homolog of NCBI NO: 25405811 NR Description: unknown protein, 58496-60308 [imported] -
  misc_feature (1)..(235): Homolog of NCBI NO: 19071626 NR Description: putative Kelch motif containing protein [Oryza
  misc_feature (1)..(200): Homolog of NCBI NO: 18397351 NR Description: expressed protein; protein id: At1g30090.1, by cDNA: gi_16209716 [Arabidopsis thaliana]
  misc_feature (1)..(189): Homolog of NCBI NO: 18400571 NR Description: expressed protein; protein id: At2g24540.1, by cDNA: 36719., supported by cDNA: gi_18086558 [Arabidopsis >gi|25412221|pir||H84637 hypothetical protein At2g24540
  misc_feature (1)..(189): Homolog of NCBI NO: 21593163 NR Description: unknown [Arabidopsis thaliana]
  misc_feature (1)..(188): Homolog of NCBI NO: 18411974 NR Description: SKP1 interacting partner 4 (SKIP4), putative; id: At3g61350.1 [Arabidopsis thaliana] >gi|11358117|pir||T47927
  misc_feature (1)..(188): Homolog of NCBI NO: 26453288 NR Description: putative SKP1 interacting partner 4 SKIP4
  misc_feature (1)..(176): Homolog of NCBI NO: 15220452 NR Description: unknown protein; protein id: At1g67480.1
MRRVVFYSARSNRWHRAPDMLRRRQFFDVCVMGNRLYVAGGEGGGGGLRSAEVFDPAKNRWSFVAEMAAPMAPFVSAVHGGRWFVKGIGAQQQVLSQAYSPVSDSWSIVLDGMVTGWRSPSACLNGRLYAAECMDGCRLRAYDEAVDAWSTCADSKQHRGSSQAAAIVALHGRLFVVRNDMSVSAVQVAAEAGKQRWQTLAGKAHTKSFVTGLLSNLSGRSRAKNNILHCQVLEV

SEQ ID NO: 7320 - protein, 216 aa, Zea mays subsp. mays
  peptide (1)..(216): Ceres Seq. ID no. 12408859
  misc_feature (1)..(215): Homolog of NCBI NO: 18405298 NR Description: expressed protein; protein id: At1g55270.1, by cDNA: gi_13877750, supported by cDNA: gi_15293270 [Arabidopsis >gi|13877751|gb|AAK43953.1|AF370138_1 unknown protein
  misc_feature (1)..(216): Homolog of NCBI NO: 37534254 NR Description: unknown protein [Oryza sativa (japonica
  misc_feature (1)..(182): Homolog of NCBI NO: 25405811 NR Description: unknown protein, 58496-60308 [imported] -
  misc_feature (1)..(216): Homolog of NCBI NO: 19071626 NR Description: putative Kelch motif containing protein [Oryza
  misc_feature (1)..(181): Homolog of NCBI NO: 18397351 NR Description: expressed protein; protein id: At1g30090.1, by cDNA: gi_16209716 [Arabidopsis thaliana]
  misc_feature (1)..(170): Homolog of NCBI NO: 18400571 NR Description: expressed protein; protein id: At2g24540.1, by cDNA: 36719., supported by cDNA: gi_18086558 [Arabidopsis >gi|25412221|pir||H84637 hypothetical protein At2g24540
  misc_feature (1)..(170): Homolog of NCBI NO: 21593163 NR Description: unknown [Arabidopsis thaliana]
  misc_feature (1)..(169): Homolog of NCBI NO: 18411974 NR Description: SKP1 interacting partner 4 (SKIP4), putative; id: At3g61350.1 [Arabidopsis thaliana] >gi|11358117|pir||T47927
  misc_feature (1)..(169): Homolog of NCBI NO: 26453288 NR Description: putative SKP1 interacting partner 4 SKIP4
  misc_feature (1)..(157): Homolog of NCBI NO: 15220452 NR Description: unknown protein; protein id: At1g67480.1
MLRRRQFFDVCVMGNRLYVAGGEGGGGGLRSAEVFDPAKNRWSFVAEMAAPMAPFVSAVHGGRWFVKGIGAQQQVLSQAYSPVSDSWSIVLDGMVTGWRSPSACLNGRLYAAECMDGCRLRAYDEAVDAWSTCADSKQHRGSSQAAAIVALHGRLFVVRNDMSVSAVQVAAEAGKQRWQTLAGKAHTKSFVTGLLSNLSGRSRAKNNILHCQVLEV

SEQ ID NO: 7321 - DNA, 1606 bp, Zea mays subsp. mays
  misc_feature (1)..(1606): Ceres Seq. ID no. 13498353
  misc_feature: MA Experiment ID: 20000535 Result: Down-regulated in Transcription
  misc_feature: MA Experiment 20000535 PARAMETER Experiment Name: Zm_Hybrid_Seed_Dev_P Parameter: DAP Value: 30 vs. 12
  misc_feature: MA Experiment 20000535 PARAMETER Experiment Name: Zm_Hybrid_Seed_Dev_P Parameter: Organism Value: Zea mays
  misc_feature: MA Experiment 20000535 PARAMETER Experiment Name: Zm_Hybrid_Seed_Dev_P Parameter: Plant Line Value: 35A19
  misc_feature: MA Experiment 20000535 PARAMETER Experiment Name: Zm_Hybrid_Seed_Dev_P Parameter: Tissue Value: Embryo vs. Unfert Floret
gaaaatttccggtgctgagcgtgcatcggcagagctgactgtgactggtgaactgaaggaaaggggaggagaaggggagggaagctttgggcgggagaggaagcctagcagcaacagtaggcagtagcagggttgaccggaggggcagtggagtctggagagtaacccaacaaccccctcctcccctccccttctgtcttattgccacctctccacgtctccaccaaacaaggcaacaagggagaagtagatctgcatctgcgagaggaggcagcgggggtggtgatgatggagagccagccgctgcaggccccgacggccacggctccggcccccggatctgcggagccagccggagctccgccggccgtcacccccggcaaggagttcacgcgcacctgcaagggcctcgtcgtcgtgctcatcggaggatacgtgctgctccagctcctcccttcgtcactcaactacctcgccatcatcccctccaagacaatcccctatgtatggaccgtctttaccgctggttacatcgagcaagtcctcccaggggccattggcagttctcttggtcttctcttttgtggaaaggacattgaaccagcatggggccgcaaggaattcttgaagttcattattttgatcaactccatctgtggcattcttgcattttgctttgctattggactctactacgtcactggaaaggagagcttccttgtcacaccactttctggtttccacggttgccttgctggctttcttgtggccctgaagcaactcttaccaaaccttgagcttcctatgtgctttttctggaaaataaaggcaaagtggatgccattctttgttgtatgtttctcaagtatcatggccttcatcgtgcctgattccattaacttcctgccaactttggtgtccgggatgtacgttagctggctttacctgagatacttccaaaggaacccactgactggacttaagggtgatcccagtgatgacttttccttccccagtttattcccagctgccatgagaccagttacggaccctgtggccaacctgtttgataggctgttgtgtgcaaggtccaggcctttggaagtcgccctcccgatatcagatcctaccaaggcttcaagaagaagggagcgtggcgagagggttcttgaggaaaggttggcggctgacaatgctggtgacacagaggcctcgcctcgtggccatggcaccgcggaagactgagaactttcttgtgaccatcagctcctcttataggagccatggctttgctccctccagcgtttatagctctgcacttttgtcttctggagatggagctattcagttcacagcgaacgaataatacgatgttcttagtttctctttttttccgcttctttgtctgcgaggatttattggttaaattgtgtactagtcaattgttatggtacagcgaaaaagagagaagagggtgatggcatttgcagcgaggtgttgagattccgttgtagccatgcatttgcagccgattgtttggtactggtcaaagttctgtagtagtcatatactctgcttaaaatatagaaagaagaatggcttcgtc

SEQ ID NO: 7322 - protein, 319 aa, Zea mays subsp. mays
  peptide (1)..(319): Ceres Seq. ID no. 13498354
  misc_feature (2)..(319): Homolog of NCBI NO: 21741573 NR Description: OSJNBa0094O15.3 [Oryza sativa (japonica
  misc_feature (19)..(319): Homolog of NCBI NO: 34395257 NR Description: putative placental protein 6 [Oryza sativa
  misc_feature (27)..(302): Homolog of NCBI NO: 18398108 NR Description: expressed protein [Arabidopsis thaliana] unknown [Arabidopsis thaliana] >gi|25083369|gb|AAN72066.1|
  misc_feature (35)..(302): Homolog of NCBI NO: 6648207 NR Description: unknown protein [Arabidopsis thaliana]
  misc_feature (42)..(299): Homolog of NCBI NO: 5902022 NR Description: PL6 protein [Homo sapiens]
  misc_feature (42)..(312): Homolog of NCBI NO: 19920824 NR Description: CG9536-PA [Drosophila melanogaster]
  misc_feature (40)..(299): Homolog of NCBI NO: 34865897 NR Description: similar to PL6 protein [Rattus norvegicus]
  misc_feature (40)..(299): Homolog of NCBI NO: 9790165 NR Description: PL6 protein; PL-6; placental protein 6 [Mus >gi|24638131|sp|Q9WUH1|PL6_MOUSE PL6 protein (Placental protein >gi|4574738|gb|AAD24193.1|AF134238_1 PL6 protein [Mus musculus]
  misc_feature (42)..(248): Homolog of NCBI NO: 39593885 NR Description: Hypothetical protein CBG06225 [Caenorhabditis
  misc_feature (42)..(229): Homolog of NCBI NO: 15639966 NR Description: glpG protein, putative [Treponema pallidum]
MMESQPLQAPTATAPAPGSAEPAGAPPAVTPGKEFTRTCKGLVVVLIGGYVLLQLLPSSLNYLAIIPSKTIPYVWTVFTAGYIEQVLPGAIGSSLGLLFCGKDIEPAWGRKEFLKFIILINSICGILAFCFAIGLYYVTGKESFLVTPLSGFHGCLAGFLVALKQLLPNLELPMCFFWKIKAKWMPFFVVCFSSIMAFIVPDSINFLPTLVSGMYVSWLYLRYFQRNPLTGLKGDPSDDFSFPSLFPAAMRPVTDPVANLFDRLLCARSRPLEVALPISDPTKASRRRERGERVLEERLAADNAGDTEASPRGHGTAED

SEQ ID NO: 7323 - protein, 318 aa, Zea mays subsp. mays
  peptide (1)..(318): Ceres Seq. ID no. 13498355
  misc_feature (1)..(318): Homolog of NCBI NO: 21741573 NR Description: OSJNBa0094O15.3 [Oryza sativa (japonica
  misc_feature (18)..(318): Homolog of NCBI NO: 34395257 NR Description: putative placental protein 6 [Oryza sativa
  misc_feature (26)..(301): Homolog of NCBI NO: 18398108 NR Description: expressed protein [Arabidopsis thaliana] unknown [Arabidopsis thaliana] >gi|25083369|gb|AAN72066.1|
  misc_feature (34)..(301): Homolog of NCBI NO: 6648207 NR Description: unknown protein [Arabidopsis thaliana]
  misc_feature (41)..(298): Homolog of NCBI NO: 5902022 NR Description: PL6 protein [Homo sapiens]
  misc_feature (41)..(311): Homolog of NCBI NO: 19920824 NR Description: CG9536-PA [Drosophila melanogaster]
  misc_feature (39)..(298): Homolog of NCBI NO: 34865897 NR Description: similar to PL6 protein [Rattus norvegicus]
  misc_feature (39)..(298): Homolog of NCBI NO: 9790165 NR Description: PL6 protein; PL-6; placental protein 6 [Mus >gi|24638131|sp|Q9WUH1|PL6_MOUSE PL6 protein (Placental protein >gi|4574738|gb|AAD24193.1|AF134238_1 PL6 protein [Mus musculus]
  misc_feature (41)..(247): Homolog of NCBI NO: 39593885 NR Description: Hypothetical protein CBG06225 [Caenorhabditis
  misc_feature (41)..(228): Homolog of NCBI NO: 15639966 NR Description: glpG protein, putative [Treponema pallidum]
MESQPLQAPTATAPAPGSAEPAGAPPAVTPGKEFTRTCKGLVVVLIGGYVLLQLLPSSLNYLAIIPSKTIPYVWTVFTAGYIEQVLPGAIGSSLGLLFCGKDIEPAWGRKEFLKFIILINSICGILAFCFAIGLYYVTGKESFLVTPLSGFHGCLAGFLVALKQLLPNLELPMCFFWKIKAKWMPFFVVCFSSIMAFIVPDSINFLPTLVSGMYVSWLYLRYFQRNPLTGLKGDPSDDFSFPSLFPAAMRPVTDPVANLFDRLLCARSRPLEVALPISDPTKASRRRERGERVLEERLAADNAGDTEASPRGHGTAED

SEQ ID NO: 7324 - DNA, 1201 bp, Zea mays subsp. mays
  misc_feature (1)..(1201): Ceres Seq. ID no. 13492541
  misc_feature: MA Experiment ID: 108535 Result: Down-regulated in Transcription
  misc_feature: MA Experiment 108535 PARAMETER Experiment Name: Zm_Meristem_P Parameter: Age (day) Value: 8
  misc_feature: MA Experiment 108535 PARAMETER Experiment Name: Zm_Meristem_P Parameter: Organism Value: Zea mays
  misc_feature: MA Experiment 108535 PARAMETER Experiment Name: Zm_Meristem_P Parameter: Plant Line Value: 35A19
  misc_feature: MA Experiment 108535 PARAMETER Experiment Name: Zm_Meristem_P Parameter: Tissue Value: Root Meristem vs. Above Root Meristem
  misc_feature: MA Experiment ID: 108536 Result: Down-regulated in Transcription
  misc_feature: MA Experiment 108536 PARAMETER Experiment Name: Zm_Meristem_P Parameter: Age (day) Value: 8
  misc_feature: MA Experiment 108536 PARAMETER Experiment Name: Zm_Meristem_P Parameter: Organism Value: Zea mays
  misc_feature: MA Experiment 108536 PARAMETER Experiment Name: Zm_Meristem_P Parameter: Plant Line Value: 35A19
  misc_feature: MA Experiment 108536 PARAMETER Experiment Name: Zm_Meristem_P Parameter: Tissue Value: Shoot Meristem vs. Above Shoot Meristem
  misc_feature: MA Experiment ID: 20000534 Result: Up-regulated in Transcription
  misc_feature: MA Experiment 20000534 PARAMETER Experiment Name: Zm_Hybrid_Pollen_P Parameter: Age (day) Value: 8
  misc_feature: MA Experiment 20000534 PARAMETER Experiment Name: Zm_Hybrid_Pollen_P Parameter: Organism Value: Zea mays
  misc_feature: MA Experiment 20000534 PARAMETER Experiment Name: Zm_Hybrid_Pollen_P Parameter: Plant Line Value: 35A19
  misc_feature: MA Experiment 20000534 PARAMETER Experiment Name: Zm_Hybrid_Pollen_P Parameter: Tissue Value: Pollen vs. Aerial
gcgcgcccgtggcccgtaaaagacaccaacccacttctcgaatcgaatccaggtccagggacgccgctacccgccgtccttcacccccgccatgccaacgctcggcatctcgccgctgctggacgcctacttccggcgccgcttcgccgcagcgggcctcgtggaggcctccgtcccgctggacggcggcgccaccacggtccactgctggcgcttcccgccggggtccgccgacggcgaggacgacgcccgtcccgtcctggtgctcctgcacggcttcgggcccccggcaacgtggcagtggaggcgccaggtgggccctctctcgcgccggttccgcctcgtcgtcccggacctgctcttcttcggcggctcgtccacgtcggcggcggcgcccggcgccgggcgggtgtccgaggcgcggcaggcggaggcggtggcgaagctcgtggcggccctggtggcgccgccggcgcgcgtgtcggtggccggcaccagctacggcgggttcgtggcgtaccacctggcgcggctgctgggccccggcgcggtggaccgggtggtgatcgccagctccgacctcctcaaggccgacgccgacgaccgcgccctgctccgccgcggcgccgccgagcgcgtcgaggacgtcatgctgccccgctcccccgagcggatgcggcgcctgatgcagctcgcctaccaccgcccgcgccgcttcacgccgggcttcgtgctccgggatctcgcccagtatctgtacagcgacaaagtagaagagaagaaggagctaatcaaggggataacgctgggcaacaaagacaagttccagcttacacctctcccccaggaagtccttgtgttgtggggagagcacgaccagatattcccagtcgagaaggcatttcaagtggcaaggaaacttggagcgaatgctaggctggaggtcctcaaggacaccggccacatgcctcaagaagaggatccaaagcggttcaacgaggcaatcctcaacttcttgcttccagctccaaagtcgtccttgtaacgcgatatatatcccatagttattcacttattattcaggcccaaggagagttcacgatttcgatatgcacattctgcccgatcagtgcagtctttgtcgctttggtatcacctcaccttcaagattgatcatggaaactattgctatttatctgcc

SEQ ID NO: 7325 - protein, 317 aa, Zea mays subsp. mays
  peptide (1)..(317): Ceres Seq. ID no. 13492542
  misc_feature (82)..(220): Pfam Name: alpha/beta hydrolase fold Pfam Description: alpha/beta hydrolase fold
  misc_feature (82)..(220): Pfam Name: alpha/beta hydrolase fold Pfam Description: alpha/beta hydrolase fold
  misc_feature (1)..(220): Homolog of NCBI NO: 24059850 NR Description: hydrolase-like protein [Oryza sativa (japonica
  misc_feature (220)..(317): Homolog of NCBI NO: 24059850 NR Description: hydrolase-like protein [Oryza sativa (japonica
  misc_feature (5)..(310): Homolog of NCBI NO: 27436745 NR Description: Hypothetical protein [Oryza sativa (japonica
  misc_feature (3)..(314): Homolog of NCBI NO: 27436746 NR Description: Unknown protein [Oryza sativa (japonica
  misc_feature (54)..(313): Homolog of NCBI NO: 34896168 NR Description: contains ESTs
  misc_feature (220)..(317): Homolog of NCBI NO: 24059850 NR Description: hydrolase-like protein [Oryza sativa (japonica
  misc_feature (3)..(314): Homolog of NCBI NO: 27436746 NR Description: Unknown protein [Oryza sativa (japonica
  misc_feature (6)..(317): Homolog of NCBI NO: 18411865 NR Description: hydrolase, alpha/beta fold family [Arabidopsis >gi|19699019|gb|AAL91245.1| unknown protein [Arabidopsis >gi|25084092|gb|AAN72173.1| unknown protein [Arabidopsis
  misc_feature (6)..(314): Homolog of NCBI NO: 37533664 NR Description: putative hydrolase [Oryza sativa (japonica >gi|19920100|gb|AAM08532.1| Putative hydrolase [Oryza sativa]
  misc_feature (57)..(309): Homolog of NCBI NO: 21592805 NR Description: unknown [Arabidopsis thaliana]
  misc_feature (43)..(315): Homolog of NCBI NO: 22326938 NR Description: hydrolase, alpha/beta fold family [Arabidopsis >gi|29294062|gb|AAO73899.1| hydrolase, alpha/beta fold family
  misc_feature (6)..(309): Homolog of NCBI NO: 30689631 NR Description: hydrolase, alpha/beta fold family [Arabidopsis
  misc_feature (54)..(313): Homolog of NCBI NO: 34896168 NR Description: contains ESTs
  misc_feature (5)..(310): Homolog of NCBI NO: 27436745 NR Description: Hypothetical protein [Oryza sativa (japonica
  misc_feature (1)..(220): Homolog of NCBI NO: 24059850 NR Description: hydrolase-like protein [Oryza sativa (japonica
  misc_feature (6)..(309): Homolog of NCBI NO: 30689631 NR Description: hydrolase, alpha/beta fold family [Arabidopsis
  misc_feature (43)..(315): Homolog of NCBI NO: 22326938 NR Description: hydrolase, alpha/beta fold family [Arabidopsis >gi|29294062|gb|AAO73899.1| hydrolase, alpha/beta fold family
  misc_feature (57)..(309): Homolog of NCBI NO: 21592805 NR Description: unknown [Arabidopsis thaliana]
  misc_feature (6)..(314): Homolog of NCBI NO: 37533664 NR Description: putative hydrolase [Oryza sativa (japonica >gi|19920100|gb|AAM08532.1| Putative hydrolase [Oryza sativa]
  misc_feature (6)..(317): Homolog of NCBI NO: 18411865 NR Description: hydrolase, alpha/beta fold family [Arabidopsis >gi|19699019|gb|AAL91245.1| unknown protein [Arabidopsis >gi|25084092|gb|AAN72173.1| unknown protein [Arabidopsis
MPTLGISPLLDAYFRRRFAAAGLVEASVPLDGGATTVHCWRFPPGSADGEDDARPVLVLLHGFGPPATWQWRRQVGPLSRRFRLVVPDLLFFGGSSTSAAAPGAGRVSEARQAEAVAKLVAALVAPPARVSVAGTSYGGFVAYHLARLLGPGAVDRVVIASSDLLKADADDRALLRRGAAERVEDVMLPRSPERMRRLMQLAYHRPRRFTPGFVLRDLAQYLYSDKVEEKKELIKGITLGNKDKFQLTPLPQEVLVLWGEHDQIFPVEKAFQVARKLGANARLEVLKDTGHMPQEEDPKRFNEAILNFLLPAPKSSL

SEQ ID NO: 7326 - protein, 311 aa, Zea mays subsp. mays
  peptide (1)..(311): Ceres Seq. ID no. 13492543
  misc_feature (111)..(220): Pfam Name: Protein of unknown function (DUF390) Pfam Description: Protein of unknown function (DUF390)
  misc_feature (111)..(220): Pfam Name: Protein of unknown function (DUF390) Pfam Description: Protein of unknown function (DUF390)
  misc_feature (18)..(311): Homolog of NCBI NO: 29247944 NR Description: GLP_26_54603_52153 [Giardia lamblia ATCC 50803]
  misc_feature (1)..(307): Homolog of NCBI NO: 33865132 NR Description: possible N-terminal part of IF-2 [Synechococcus
  misc_feature (17)..(311): Homolog of NCBI NO: 23018055 NR Description: hypothetical protein [Thermobifida fusca]
  misc_feature (55)..(259): Homolog of NCBI NO: 23105938 NR Description: hypothetical protein [Azotobacter vinelandii]
  misc_feature (11)..(296): Homolog of NCBI NO: 25989119 NR Description: unknown [Streptomyces aureofaciens]
  misc_feature (161)..(311): Homolog of NCBI NO: 5032119 NR Description: Ser/Arg-related nuclear matrix protein (plenty of
  misc_feature (12)..(298): Homolog of NCBI NO: 14018072 NR Description: hypothetical protein [Oryza sativa]
  misc_feature (51)..(247): Homolog of NCBI NO: 7494125 NR Description: myosin-IA - Acanthamoeba castellanii
  misc_feature (40)..(311): Homolog of NCBI NO: 23105951 NR Description: hypothetical protein [Azotobacter vinelandii]
  misc_feature (44)..(272): Homolog of NCBI NO: 538695 NR Description: hypothetical protein (sdsB region) - Pseudomonas
  misc_feature (1)..(307): Homolog of NCBI NO: 33865132 NR Description: possible N-terminal part of IF-2 [Synechococcus
  misc_feature (17)..(311): Homolog of NCBI NO: 23018055 NR Description: hypothetical protein [Thermobifida fusca]
  misc_feature (55)..(259): Homolog of NCBI NO: 23105938 NR Description: hypothetical protein [Azotobacter vinelandii]
  misc_feature (11)..(296): Homolog of NCBI NO: 25989119 NR Description: unknown [Streptomyces aureofaciens]
  misc_feature (161)..(311): Homolog of NCBI NO: 5032119 NR Description: Ser/Arg-related nuclear matrix protein (plenty of
  misc_feature (12)..(298): Homolog of NCBI NO: 14018072 NR Description: hypothetical protein [Oryza sativa]
  misc_feature (18)..(311): Homolog of NCBI NO: 29247944 NR Description: GLP_26_54603_52153 [Giardia lamblia ATCC 50803]
  misc_feature (51)..(247): Homolog of NCBI NO: 7494125 NR Description: myosin-IA - Acanthamoeba castellanii
  misc_feature (40)..(311): Homolog of NCBI NO: 23105951 NR Description: hypothetical protein [Azotobacter vinelandii]
  misc_feature (44)..(272): Homolog of NCBI NO: 538695 NR Description: hypothetical protein (sdsB region) - Pseudomonas
ARPWPVKDTNPLLESNPGPGTPLPAVLHPRHANARHLAAAGRLLPAPLRRSGPRGGLRPAGRRRHHGPLLALPAGVRRRRGRRPSRPGAPARLRAPGNVAVEAPGGPSLAPVPPRRPGPALLRRLVHVGGGARRRAGVRGAAGGGGGEARGGPGGAAGARVGGRHQLRRVRGVPPGAAAGPRRGGPGGDRQLRPPQGRRRRPRPAPPRRRRARRGRHAAPLPRADAAPDAARLPPPAPLHAGLRAPGSRPVSVQRQSRREEGANQGDNAGQQRQVPAYTSPPGSPCVVGRARPDIPSREGISSGKETWSEC

SEQ ID NO: 7327 - protein, 187 aa, Zea mays subsp. mays
  peptide (1)..(187): Ceres Seq. ID no. 13492544
  misc_feature (5)..(142): Homolog of NCBI NO: 5032119 NR Description: Ser/Arg-related nuclear matrix protein (plenty of
  misc_feature (4)..(187): Homolog of NCBI NO: 9845307 NR Description: pr5 [Rat cytomegalovirus]
  misc_feature (2)..(187): Homolog of NCBI NO: 27375632 NR Description: blr0521 [Bradyrhizobium japonicum]
  misc_feature (5)..(142): Homolog of NCBI NO: 5032119 NR Description: Ser/Arg-related nuclear matrix protein (plenty of
  misc_feature (4)..(187): Homolog of NCBI NO: 9845307 NR Description: pr5 [Rat cytomegalovirus]
  misc_feature (2)..(187): Homolog of NCBI NO: 27375632 NR Description: blr0521 [Bradyrhizobium japonicum]
APVARKRHQPTSRIESRSRDAATRRPSPPPCQRSASRRCWTPTSGAASPQRASWRPPSRWTAAPPRSTAGASRRGPPTARTTPVPSWCSCTASGPRQRGSGGARWALSRAGSASSSRTCSSSAARPRRRRRPAPGGCPRRGRRRRWRSSWRPWWRRRRACRWPAPATAGSWRTTWRGCWAPARWTGW

SEQ ID NO: 7328 - DNA, 1109 bp, Zea mays subsp. mays
  misc_feature (1)..(1109): Ceres Seq. ID no. 13498696
  misc_feature: MA Experiment ID: 108543 Result: Up-regulated in Transcription
  misc_feature: MA Experiment ID: 20000478 Result: Down-regulated in Transcription
  misc_feature: MA Experiment 20000478 PARAMETER Experiment Name: Zm_5mM_SA_P Parameter: Age (day) Value: 11
  misc_feature: MA Experiment 20000478 PARAMETER Experiment Name: Zm_5mM_SA_P Parameter: Organism Value: Zea mays
  misc_feature: MA Experiment 20000478 PARAMETER Experiment Name: Zm_5mM_SA_P Parameter: Plant Line Value: 35A19
  misc_feature: MA Experiment 20000478 PARAMETER Experiment Name: Zm_5mM_SA_P Parameter: Timepoint (hr) Value: 72
  misc_feature: MA Experiment 20000478 PARAMETER Experiment Name: Zm_5mM_SA_P Parameter: Tissue Value: Aerial
  misc_feature: MA Experiment 20000478 PARAMETER Experiment Name: Zm_5mM_SA_P Parameter: Treatment Value: 5mM SA vs. No Treatment
  misc_feature: MA Experiment ID: 20000479 Result: Down-regulated in Transcription
  misc_feature: MA Experiment 20000479 PARAMETER Experiment Name: Zm_Drought_P Parameter: Age (day) Value: 10
  misc_feature: MA Experiment 20000479 PARAMETER Experiment Name: Zm_Drought_P Parameter: Organism Value: Zea mays
  misc_feature: MA Experiment 20000479 PARAMETER Experiment Name: Zm_Drought_P Parameter: Plant Line Value: 35A19
  misc_feature: MA Experiment 20000479 PARAMETER Experiment Name: Zm_Drought_P Parameter: Timepoint (hr) Value: 48
  misc_feature: MA Experiment 20000479 PARAMETER Experiment Name: Zm_Drought_P Parameter: Tissue Value: Aerial
  misc_feature: MA Experiment 20000479 PARAMETER Experiment Name: Zm_Drought_P Parameter: Treatment Value: Drought vs. No Drought
  misc_feature: MA Experiment ID: 20000480 Result: Down-regulated in Transcription
  misc_feature: MA Experiment 20000480 PARAMETER Experiment Name: Zm_Drought_P Parameter: Age (day) Value: 11
  misc_feature: MA Experiment 20000480 PARAMETER Experiment Name: Zm_Drought_P Parameter: Organism Value: Zea mays
  misc_feature: MA Experiment 20000480 PARAMETER Experiment Name: Zm_Drought_P Parameter: Plant Line Value: 35A19
  misc_feature: MA Experiment 20000480 PARAMETER Experiment Name: Zm_Drought_P Parameter: Timepoint (hr) Value: 72
  misc_feature: MA Experiment 20000480 PARAMETER Experiment Name: Zm_Drought_P Parameter: Tissue Value: Aerial
  misc_feature: MA Experiment 20000480 PARAMETER Experiment Name: Zm_Drought_P Parameter: Treatment Value: Drought vs. No Drought
  misc_feature: MA Experiment ID: 20000632 Result: Down-regulated in Transcription
  misc_feature: MA Experiment 20000632 PARAMETER Experiment Name: Zm_Herbicide-Treatments_P Parameter: Timepoint (hr) Value: 4
  misc_feature: MA Experiment 20000632 PARAMETER Experiment Name: Zm_Herbicide-Treatments_P Parameter: Tissue Value: Aerial
  misc_feature: MA Experiment 20000632 PARAMETER Experiment Name: Zm_Herbicide-Treatments_P Parameter: Treatment Value: Glean vs. No Treatment
ccctgaaactcaactagccgttggagtcaaggcagcggcggcggacgcggctgaaagctgtcgaccgtgccgcgccgcccccaacggtcactggagaggaagaagaaactcgcatttccatccccagccaattgtcgctcgcctttaaatcctgcgccccaccgccgcctccactcccaccgctctctatcctcccactcaaatactcctcaatagccatcgaggagaagggagatagaaacgggagggaacacccactcgatcgtcagccatgacccggggagagaaccaggagtcgcaaaccggtaacgtccccgccgcatccgcggcgacgccggggccgaagccggcgtcggcgggggccgggaaaggcgcggagggccagtctgtggtgcggcggctgcagtcggagctgatggcgctgatgatgggcggcgacccgggcgtgtcggcgtttcccgagggggacaacatgctccactgggtgggcaccatcgacggctccgccgggacggcctacgagggcacctcctaccgcctcgcgttggccttcaccaccgagtacccgtacaagccgcccaaggtgcggttcgacaccccctgcttccaccctaacgtcgacgtgcacggcaacatctgcctggacatcctccaggacaagtggtcctccgcctacgacgtgcgcaccatcctcctctccatccagagcctgcttggagagccgaacaacgactcgccgctcaacactcaggcggcagcgctctgggcgaaccaggaagagtttaggaagatggtggagaaaatctacaagcccgccgcatagaggaggatgacagcgccggtgaagatgtgggttcttcaagcactcatttcgcttggattgatcgacaagagataatatttggattgtttgggttcccagtctggtgctgtagcaggaaggaatatttgggtcgcctagagcgtggcgattctgtaattttgttctttgagttctgaaatgttcagatattcatttttccatgaatcgttttcgtcccttcgcctcttcctaactgcaatattggtatgaaattatgaatatggactggacaagactgattgaattc

SEQ ID NO: 7329 - protein, 183 aa, Zea mays subsp. mays
  peptide (1)..(183): Ceres Seq. ID no. 13498697
  misc_feature (1)..(183): Homolog of NCBI NO: 34903234 NR Description: unnamed protein product [Oryza sativa (japonica group)] >gi|6815106|dbj|BAA90392.1| unnamed protein product
  misc_feature (12)..(181): Homolog of NCBI NO: 18403097 NR Description: ubiquitin-conjugating enzyme (UBC20) [Arabidopsis
  misc_feature (12)..(181): Homolog of NCBI NO: 21618179 NR Description: E2, ubiquitin-conjugating enzyme, putative
  misc_feature (11)..(181): Homolog of NCBI NO: 18402475 NR Description: ubiquitin-conjugating enzyme (UBC19) [Arabidopsis
  misc_feature (12)..(181): Homolog of NCBI NO: 25293673 NR Description: hypothetical protein F17J6.3 [imported] -
  misc_feature (25)..(181): Homolog of NCBI NO: 9454557 NR Description: Putative ubiquitin carrier protein [Arabidopsis
  misc_feature (13)..(180): Homolog of NCBI NO: 3915189 NR Description: UBIQUITIN-CONJUGATING ENZYME X (UBIQUITIN-PROTEIN
  misc_feature (15)..(182): Homolog of NCBI NO: 3915196 NR Description: Ubiquitin-conjugating enzyme E2-C
  misc_feature (15)..(179): Homolog of NCBI NO: 5902146 NR Description: ubiquitin-conjugating enzyme E2C; ubiquitin
  misc_feature (15)..(179): Homolog of NCBI NO: 30583869 NR Description: Homo sapiens ubiquitin-conjugating enzyme E2C
MTRGENQESQTGNVPAASAATPGPKPASAGAGKGAEGQSVVRRLQSELMALMMGGDPGVSAFPEGDNMLHWVGTIDGSAGTAYEGTSYRLALAFTTEYPYKPPKVRFDTPCFHPNVDVHGNICLDILQDKWSSAYDVRTILLSIQSLLGEPNNDSPLNTQAAALWANQEEFRKMVEKIYKPAA

SEQ ID NO: 7330 - protein, 135 aa, Zea mays subsp. mays
  peptide (1)..(135): Ceres Seq. ID no. 13498698
  misc_feature (1)..(135): Homolog of NCBI NO: 34903234 NR Description: unnamed protein product [Oryza sativa (japonica group)] >gi|6815106|dbj|BAA90392.1| unnamed protein product
  misc_feature (1)..(133): Homolog of NCBI NO: 18403097 NR Description: ubiquitin-conjugating enzyme (UBC20) [Arabidopsis
  misc_feature (1)..(133): Homolog of NCBI NO: 21618179 NR Description: E2, ubiquitin-conjugating enzyme, putative
  misc_feature (1)..(133): Homolog of NCBI NO: 18402475 NR Description: ubiquitin-conjugating enzyme (UBC19) [Arabidopsis
  misc_feature (1)..(133): Homolog of NCBI NO: 25293673 NR Description: hypothetical protein F17J6.3 [imported] -
  misc_feature (1)..(133): Homolog of NCBI NO: 9454557 NR Description: Putative ubiquitin carrier protein [Arabidopsis
  misc_feature (1)..(132): Homolog of NCBI NO: 3915189 NR Description: UBIQUITIN-CONJUGATING ENZYME X (UBIQUITIN-PROTEIN
  misc_feature (1)..(134): Homolog of NCBI NO: 3915196 NR Description: Ubiquitin-conjugating enzyme E2-C
  misc_feature (1)..(131): Homolog of NCBI NO: 5902146 NR Description: ubiquitin-conjugating enzyme E2C; ubiquitin
  misc_feature (1)..(131): Homolog of NCBI NO: 30583869 NR Description: Homo sapiens ubiquitin-conjugating enzyme E2C
MALMMGGDPGVSAFPEGDNMLHWVGTIDGSAGTAYEGTSYRLALAFTTEYPYKPPKVRFDTPCFHPNVDVHGNICLDILQDKWSSAYDVRTILLSIQSLLGEPNNDSPLNTQAAALWANQEEFRKMVEKIYKPAA

SEQ ID NO: 7331 - protein, 132 aa, Zea mays subsp. mays
  peptide (1)..(132): Ceres Seq. ID no. 13498699
  misc_feature (1)..(132): Homolog of NCBI NO: 34903234 NR Description: unnamed protein product [Oryza sativa (japonica group)] >gi|6815106|dbj|BAA90392.1| unnamed protein product
  misc_feature (1)..(130): Homolog of NCBI NO: 18403097 NR Description: ubiquitin-conjugating enzyme (UBC20) [Arabidopsis
  misc_feature (1)..(130): Homolog of NCBI NO: 21618179 NR Description: E2, ubiquitin-conjugating enzyme, putative
  misc_feature (1)..(130): Homolog of NCBI NO: 18402475 NR Description: ubiquitin-conjugating enzyme (UBC19) [Arabidopsis
  misc_feature (1)..(130): Homolog of NCBI NO: 25293673 NR Description: hypothetical protein F17J6.3 [imported] -
  misc_feature (1)..(130): Homolog of NCBI NO: 9454557 NR Description: Putative ubiquitin carrier protein [Arabidopsis
  misc_feature (1)..(129): Homolog of NCBI NO: 3915189 NR Description: UBIQUITIN-CONJUGATING ENZYME X (UBIQUITIN-PROTEIN
  misc_feature (1)..(131): Homolog of NCBI NO: 3915196 NR Description: Ubiquitin-conjugating enzyme E2-C
  misc_feature (1)..(128): Homolog of NCBI NO: 5902146 NR Description: ubiquitin-conjugating enzyme E2C; ubiquitin
  misc_feature (1)..(128): Homolog of NCBI NO: 30583869 NR Description: Homo sapiens ubiquitin-conjugating enzyme E2C
MMGGDPGVSAFPEGDNMLHWVGTIDGSAGTAYEGTSYRLALAFTTEYPYKPPKVRFDTPCFHPNVDVHGNICLDILQDKWSSAYDVRTILLSIQSLLGEPNNDSPLNTQAAALWANQEEFRKMVEKIYKPAA

SEQ ID NO: 7332 - DNA, 1576 bp, Zea mays subsp. mays
  misc_feature (1)..(1576): Ceres Seq. ID no. 12565869
  misc_feature: MA Experiment ID: 108535 Result: Up-regulated in Transcription
  misc_feature: MA Experiment 108535 PARAMETER Experiment Name: Zm_Meristem_P Parameter: Age (day) Value: 8
  misc_feature: MA Experiment 108535 PARAMETER Experiment Name: Zm_Meristem_P Parameter: Organism Value: Zea mays
  misc_feature: MA Experiment 108535 PARAMETER Experiment Name: Zm_Meristem_P Parameter: Plant Line Value: 35A19
  misc_feature: MA Experiment 108535 PARAMETER Experiment Name: Zm_Meristem_P Parameter: Tissue Value: Root Meristem vs. Above Root Meristem
  misc_feature: MA Experiment ID: 108544 Result: Down-regulated in Transcription
  misc_feature: MA Experiment ID: 20000108 Result: Up-regulated in Transcription
  misc_feature: MA Experiment 20000108 PARAMETER Experiment Name: Zm_Root-Tips_P Parameter: Age (day) Value: 12
  misc_feature: MA Experiment 20000108 PARAMETER Experiment Name: Zm_Root-Tips_P Parameter: Organism Value: Zea mays
  misc_feature: MA Experiment 20000108 PARAMETER Experiment Name: Zm_Root-Tips_P Parameter: Tissue Value: Root tips vs. Root mid region    35
  misc_feature: MA Experiment 20000108 PARAMETER Experiment Name: Zm_Root-Tips_P Parameter: Tissue Value: Root tips vs. Root mid region   Sequence Listing-Misc Features (4)
tattgtgaggggctactgttgggggccttcggcttccgaaggtcctcaaaaatgtaatttgactatgttttccaggagaaatatgtgaacaggtaccttcgaagtcagattgcgagtatacaagagcatggttaagacgaagcttgactgggacggcgatcacgacgaaggataagacgatcacgaagctatgtgcagaagagcttcggcataacggcgggaaggggaaaccgacttaaagatgaaaagccaaattagacctcgaagaattactatagagttattgataaatgtaaagggcattaatgtaattttgcatgggctgcgacccgtgcctataaataggtgaacagtattcccgtactgttcacgctgacttggcattcacttttgcgtcacgcctgtattctcattccttcaagccgaaggtacatttgtaatttaccattgtttacataagtaatataaatggaaatagattaataataatgtttatagaaattatgttactttctatactttgtatgaatgttctccatcttctatcatgatcatgaaggtgaatctgacataacaaaggagcgaattgagaaaattctcaaggctggagctaatgttgtgttgaccaccaagggaattgacgatatgtccttgaagtactttgttgaggctggtgcgattgcagtaaggcgtgtgcgcaaggaagatttgcgacatgttgccaaagccactggtgcaactatggtgtctacttttgcggacatggaaggtgaagaaacattcgattcatcattccttggccatgctgatgaagttgtggaggaaagaattgctgacgatgatgttattctggtgaaaggcacaaagaacaccagcgcggtctctataatacttaggggcgcaaatgactacatgcttgatgagattgaacggtccttgcatgatgccctgtgcattgtgaagagaaccctggaatcaaatatggttgttgctgggggtggtgcagttgaagctgcgctgtcagctttatctggagaaccttgcaacaaccctgggttctcgggaacaattggcaattgctgaatttgctgagtctttgttaatcataccaaaggtactatctgttaatgctgcaaaagatgcaactgagcttgtagcaaagcttagggcatatcatcatactgctcaaacaaaggccgacaagcaacattattcaagtatgggccttgacctctctaagggtatcattcgcaacaaccttgagtatggcgtgatagagccatcgatgagcaaagtaaagatcattcagtttgccacggaggctgccattactatcctgaggattgacgacatgatcaagcttaccaaggaagaagagggtaacgaagagtaagcagcccaccagtagtgggctagtggactcccatgggatggttgccatagcatgtagcacttgttttttcacttatcgtttacttttgcttgctgtgagcattcgtttgtaggaaaagtgagaacggatgtgtatcaatccgtgttgggtgacgatgactcacggatgaatcaaatatttgcc

SEQ ID NO: 7333 - protein, 184 aa, Zea mays subsp. mays
  peptide (1)..(184): Ceres Seq. ID no. 12565870
  misc_feature (12)..(165): Pfam Name: TCP-1/cpn60 chaperonin family Pfam Description: TCP-1/cpn60 chaperonin family
  misc_feature (12)..(165): Homolog of NCBI NO: 38345468 NR Description: OSJNBa0010H02.6 [Oryza sativa (japonica
  misc_feature (12)..(165): Homolog of NCBI NO: 24371053 NR Description: t-complex polypeptide 1 [Bruguiera sexangula]
  misc_feature (12)..(165): Homolog of NCBI NO: 25083339 NR Description: t-complex polypeptide 1 homologue [Arabidopsis
  misc_feature (12)..(165): Homolog of NCBI NO: 15231024 NR Description: t-complex polypeptide 1 homologue; protein id:
  misc_feature (12)..(165): Homolog of NCBI NO: 9293959 NR Description: chaperonin, t-complex protein alpha subunit
  misc_feature (12)..(165): Homolog of NCBI NO: 17066720 NR Description: CCT chaperonin alpha subunit [Physarum
  misc_feature (12)..(165): Homolog of NCBI NO: 135538 NR Description: T-complex protein 1, alpha subunit (TCP-1-alpha)
  misc_feature (12)..(165): Homolog of NCBI NO: 30584211 NR Description: Homo sapiens t-complex 1 [synthetic construct]
  misc_feature (12)..(165): Homolog of NCBI NO: 13540473 NR Description: t-complex 1; T-complex locus TCP-1; t-complex 1
  misc_feature (12)..(165): Homolog of NCBI NO: 135536 NR Description: T-COMPLEX PROTEIN 1, ALPHA SUBUNIT (TCP-1-ALPHA)
MFSIFYHDHEGESDITKERIEKILKAGANVVLTTKGIDDMSLKYFVEAGAIAVRRVRKEDLRHVAKATGATMVSTFADMEGEETFDSSFLGHADEVVEERIADDDVILVKGTKNTSAVSIILRGANDYMLDEIERSLHDALCIVKRTLESNMVVAGGGAVEAALSALSGEPCNNPGFSGTIGNC

SEQ ID NO: 7334 - protein, 145 aa, Zea mays subsp. mays
  peptide (1)..(145): Ceres Seq. ID no. 12565871
  misc_feature (1)..(126): Pfam Name: TCP-1/cpn60 chaperonin family Pfam Description: TCP-1/cpn60 chaperonin family
  misc_feature (1)..(126): Homolog of NCBI NO: 38345468 NR Description: OSJNBa0010H02.6 [Oryza sativa (japonica
  misc_feature (1)..(126): Homolog of NCBI NO: 24371053 NR Description: t-complex polypeptide 1 [Bruguiera sexangula]
  misc_feature (1)..(126): Homolog of NCBI NO: 25083339 NR Description: t-complex polypeptide 1 homologue [Arabidopsis
  misc_feature (1)..(126): Homolog of NCBI NO: 15231024 NR Description: t-complex polypeptide 1 homologue; protein id:
  misc_feature (1)..(126): Homolog of NCBI NO: 9293959 NR Description: chaperonin, t-complex protein alpha subunit
  misc_feature (1)..(126): Homolog of NCBI NO: 17066720 NR Description: CCT chaperonin alpha subunit [Physarum
  misc_feature (1)..(126): Homolog of NCBI NO: 135538 NR Description: T-complex protein 1, alpha subunit (TCP-1-alpha)
  misc_feature (1)..(126): Homolog of NCBI NO: 30584211 NR Description: Homo sapiens t-complex 1 [synthetic construct]
  misc_feature (1)..(126): Homolog of NCBI NO: 13540473 NR Description: t-complex 1; T-complex locus TCP-1; t-complex 1
  misc_feature (1)..(126): Homolog of NCBI NO: 135536 NR Description: T-COMPLEX PROTEIN 1, ALPHA SUBUNIT (TCP-1-ALPHA)
MSLKYFVEAGAIAVRRVRKEDLRHVAKATGATMVSTFADMEGEETFDSSFLGHADEVVEERIADDDVILVKGTKNTSAVSIILRGANDYMLDEIERSLHDALCIVKRTLESNMVVAGGGAVEAALSALSGEPCNNPGFSGTIGNC

SEQ ID NO: 7335 - protein, 113 aa, Zea mays subsp. mays
  peptide (1)..(113): Ceres Seq. ID no. 12565872
  misc_feature (1)..(94): Pfam Name: TCP-1/cpn60 chaperonin family Pfam Description: TCP-1/cpn60 chaperonin family
  misc_feature (1)..(94): Homolog of NCBI NO: 38345468 NR Description: OSJNBa0010H02.6 [Oryza sativa (japonica
  misc_feature (1)..(94): Homolog of NCBI NO: 24371053 NR Description: t-complex polypeptide 1 [Bruguiera sexangula]
  misc_feature (1)..(94): Homolog of NCBI NO: 25083339 NR Description: t-complex polypeptide 1 homologue [Arabidopsis
  misc_feature (1)..(94): Homolog of NCBI NO: 15231024 NR Description: t-complex polypeptide 1 homologue; protein id:
  misc_feature (1)..(94): Homolog of NCBI NO: 9293959 NR Description: chaperonin, t-complex protein alpha subunit
  misc_feature (1)..(94): Homolog of NCBI NO: 17066720 NR Description: CCT chaperonin alpha subunit [Physarum
  misc_feature (1)..(94): Homolog of NCBI NO: 135538 NR Description: T-complex protein 1, alpha subunit (TCP-1-alpha)
  misc_feature (1)..(94): Homolog of NCBI NO: 30584211 NR Description: Homo sapiens t-complex 1 [synthetic construct]
  misc_feature (1)..(94): Homolog of NCBI NO: 13540473 NR Description: t-complex 1; T-complex locus TCP-1; t-complex 1
  misc_feature (1)..(94): Homolog of NCBI NO: 135536 NR Description: T-COMPLEX PROTEIN 1, ALPHA SUBUNIT (TCP-1-ALPHA)
MVSTFADMEGEETFDSSFLGHADEVVEERIADDDVILVKGTKNTSAVSIILRGANDYMLDEIERSLHDALCIVKRTLESNMVVAGGGAVEAALSALSGEPCNNPGFSGTIGNC

SEQ ID NO: 7336 - DNA, 1555 bp, Zea mays subsp. mays
  misc_feature (1)..(1555): Ceres Seq. ID no. 12434998
  misc_feature: MA Experiment ID: 108529 Result: Down-regulated in Transcription
  misc_feature: MA Experiment 108529 PARAMETER Experiment Name: Zm_Imbibed_Seeds_P Parameter: Age (day) Value: 5 vs. 2
  misc_feature: MA Experiment 108529 PARAMETER Experiment Name: Zm_Imbibed_Seeds_P Parameter: Organism Value: Zea mays
  misc_feature: MA Experiment 108529 PARAMETER Experiment Name: Zm_Imbibed_Seeds_P Parameter: Plant Line Value: 35A19
  misc_feature: MA Experiment 108529 PARAMETER Experiment Name: Zm_Imbibed_Seeds_P Parameter: Tissue Value: Roots vs. Embryo
  misc_feature: MA Experiment ID: 108544 Result: Down-regulated in Transcription
  misc_feature: MA Experiment ID: 108546 Result: Down-regulated in Transcription
  misc_feature: MA Experiment 108546 PARAMETER Experiment Name: Zm_Imbibed_Seeds_P Parameter: Age (day) Value: 3 vs. 2
  misc_feature: MA Experiment 108546 PARAMETER Experiment Name: Zm_Imbibed_Seeds_P Parameter: Organism Value: Zea mays
  misc_feature: MA Experiment 108546 PARAMETER Experiment Name: Zm_Imbibed_Seeds_P Parameter: Plant Line Value: 35A19
  misc_feature: MA Experiment 108546 PARAMETER Experiment Name: Zm_Imbibed_Seeds_P Parameter: Tissue Value: Roots vs. Embryo
  misc_feature: MA Experiment ID: 108687 Result: Down-regulated in Transcription
  misc_feature: MA Experiment 108687 PARAMETER Experiment Name: Zm_Embryos-Flowers__P Parameter: Tissue Value: Embryo vs. Aerial+
  misc_feature: MA Experiment ID: 20000477 Result: Down-regulated in Transcription
  misc_feature: MA Experiment 20000477 PARAMETER Experiment Name: Zm_5mM_SA_P Parameter: Age (day) Value: 10
  misc_feature: MA Experiment 20000477 PARAMETER Experiment Name: Zm_5mM_SA_P Parameter: Organism Value: Zea mays
  misc_feature: MA Experiment 20000477 PARAMETER Experiment Name: Zm_5mM_SA_P Parameter: Plant Line Value: 35A19
  misc_feature: MA Experiment 20000477 PARAMETER Experiment Name: Zm_5mM_SA_P Parameter: Timepoint (hr) Value: 48
  misc_feature: MA Experiment 20000477 PARAMETER Experiment Name: Zm_5mM_SA_P Parameter: Tissue Value: Aerial
  misc_feature: MA Experiment 20000477 PARAMETER Experiment Name: Zm_5mM_SA_P Parameter: Treatment Value: 5mM SA vs. No Treatment
  misc_feature: MA Experiment ID: 20000478 Result: Down-regulated in Transcription
  misc_feature: MA Experiment 20000478 PARAMETER Experiment Name: Zm_5mM_SA_P Parameter: Age (day) Value: 11
  misc_feature: MA Experiment 20000478 PARAMETER Experiment Name: Zm_5mM_SA_P Parameter: Organism Value: Zea mays
  misc_feature: MA Experiment 20000478 PARAMETER Experiment Name: Zm_5mM_SA_P Parameter: Plant Line Value: 35A19
  misc_feature: MA Experiment 20000478 PARAMETER Experiment Name: Zm_5mM_SA_P Parameter: Timepoint (hr) Value: 72
  misc_feature: MA Experiment 20000478 PARAMETER Experiment Name: Zm_5mM_SA_P Parameter: Tissue Value: Aerial
  misc_feature: MA Experiment 20000478 PARAMETER Experiment Name: Zm_5mM_SA_P Parameter: Treatment Value: 5mM SA vs. No Treatment
  misc_feature: MA Experiment ID: 20000479 Result: Down-regulated in Transcription
  misc_feature: MA Experiment 20000479 PARAMETER Experiment Name: Zm_Drought_P Parameter: Age (day) Value: 10
  misc_feature: MA Experiment 20000479 PARAMETER Experiment Name: Zm_Drought_P Parameter: Organism Value: Zea mays
  misc_feature: MA Experiment 20000479 PARAMETER Experiment Name: Zm_Drought_P Parameter: Plant Line Value: 35A19
  misc_feature: MA Experiment 20000479 PARAMETER Experiment Name: Zm_Drought_P Parameter: Timepoint (hr) Value: 48
  misc_feature: MA Experiment 20000479 PARAMETER Experiment Name: Zm_Drought_P Parameter: Tissue Value: Aerial
  misc_feature: MA Experiment 20000479 PARAMETER Experiment Name: Zm_Drought_P Parameter: Treatment Value: Drought vs. No Drought
  misc_feature: MA Experiment ID: 20000632 Result: Down-regulated in Transcription
  misc_feature: MA Experiment 20000632 PARAMETER Experiment Name: Zm_Herbicide-Treatments_P Parameter: Timepoint (hr) Value: 4
  misc_feature: MA Experiment 20000632 PARAMETER Experiment Name: Zm_Herbicide-Treatments_P Parameter: Tissue Value: Aerial
  misc_feature: MA Experiment 20000632 PARAMETER Experiment Name: Zm_Herbicide-Treatments_P Parameter: Treatment Value: Glean vs. No Treatment
acaccaagagcaggctcacgccgcaacctagcctgcacgcactctcagtctctcactgaccgcgaccagcgctcagccttctgctccggaagctagctctccggccagccaccccaccccgtccacccgacaatggcggccgccgtggccctcctcctgctctccgccctcggcggagcggcggcgcaggtgttccctccgtggaacggcacgttcccgatggggcccgggttcggaggcgggagcagcggcggcggcgcgggcgcgggcgcggggaccggcgtgccggcgatgttcgtgttcggggactcgctgacggacaacggcaacaacaacgacctgaactcgctcgccaaggctaactacccgccctacggcatcgacttcgccggcggccctaccggccgcttctccaacggctacaccatggtcgacgagatcgctcagctgctgggcctgccgctgctgccgtcgcacacggacgcggcgtcgagcggcggcggcgacgcggcgctgcacggcgtgaactacgcgtcggcggcggcggggatcctggacaacacggggcagaacttcgtggggcgcatcccgttcaaccagcagatcaagaacttcgagcagacgctggagcagctgcggcgccggacgacgacgacgaggccgggcgcgggcgcgggcgggctggcgcggagcatcttctacgtgggcatgggcagcaacgactacctcaacaactacctcatgcccaactacaacacccgcaacgagtacaacggcgaccagtactccacgctgctggtgcgccagtacgccaggcagctcgacgcgctctacggcctgggcgcccgcaggttcgtcatcgccggggtgggctccatggcctgcatccccaacatgcgcgcgcggagccccgtcaacatgtgctcgcccgacgtcgacgacctcatcatccctttcaacaccaaggtcaaggccatggtgaccagcctcaacgccaaccgcccggacgccaagttcatctacgtcgacaactacgccatgatctcccagatcctaagcaacccgtggtcctacgggttcagcgtggccgaccgcggctgctgcggcatcgggaggaaccggggcatgatcacctgcctgcccttcctgcgcccgtgcctcaaccgcaactcctacatcttctgggacgccttccacccgacggagagggtcaacgtgctcctcggcagggccgccttcagtggcggcaacgacgtcgtctaccccatgaacatccagcagctcgccgcatggcagccgtgactcggtgcaaagctgtcgatcgatcgatgcgtcgttttgtagcactacttactgctatagcgtgtgtggtcatgagtaggagggagctgagcggagttatggtacggtgcgtatcagcgaccagtatcctgctgtttggggtcaatgtcaacatcgtgtctcttgtttttggttcatcagttagttatctatcaatgtttgttcgcttattacctgtactgcatcacggagatcagtggagtcatatatttcc

SEQ ID NO: 7337 - protein, 389 aa, Zea mays subsp. mays
  peptide (1)..(389): Ceres Seq. ID no. 12434999
  misc_feature (54)..(368): Pfam Name: GDSL-like Lipase/Acylhydrolase Pfam Description: GDSL-like Lipase/Acylhydrolase
  misc_feature (48)..(386): Homolog of NCBI NO: 18409881 NR Description: hypothetical protein; protein id: At1g71691.1
  misc_feature (51)..(384): Homolog of NCBI NO: 15224005 NR Description: putative GDSL-motif lipase/acylhydrolase; protein At1g71250.1 [Arabidopsis thaliana] >gi|25336259|pir||B96737
  misc_feature (45)..(385): Homolog of NCBI NO: 21592417 NR Description: lipase/hydrolase, putative [Arabidopsis thaliana]
  misc_feature (45)..(385): Homolog of NCBI NO: 15220514 NR Description: lipase/hydrolase, putative; protein id: supported by cDNA: 23556., supported by cDNA: gi_18086454
  misc_feature (43)..(385): Homolog of NCBI NO: 34909504 NR Description: putative GDSL-motif lipase/hydrolase-like protein
  misc_feature (52)..(386): Homolog of NCBI NO: 15242458 NR Description: GDSL-motif lipase/hydrolase-like protein; protein At5g45670.1, supported by cDNA: 18389., supported by cDNA:
  misc_feature (52)..(386): Homolog of NCBI NO: 21553940 NR Description: GDSL-motif lipase/hydrolase-like protein
  misc_feature (41)..(385): Homolog of NCBI NO: 15241626 NR Description: GDSL-motif lipase acylhydrolase-like protein;
  misc_feature (51)..(386): Homolog of NCBI NO: 34910808 NR Description: GDSL-motif lipase/hydrolase-like protein [Oryza
  misc_feature (51)..(385): Homolog of NCBI NO: 18398991 NR Description: unknown protein; protein id: At1g33811.1, by cDNA: gi_20466731 [Arabidopsis thaliana] unknown protein [Arabidopsis thaliana]
MAAAVALLLLSALGGAAAQVFPPWNGTFPMGPGFGGGSSGGGAGAGAGTGVPAMFVFGDSLTDNGNNNDLNSLAKANYPPYGIDFAGGPTGRFSNGYTMVDEIAQLLGLPLLPSHTDAASSGGGDAALHGVNYASAAAGILDNTGQNFVGRIPFNQQIKNFEQTLEQLRRRTTTTRPGAGAGGLARSIFYVGMGSNDYLNNYLMPNYNTRNEYNGDQYSTLLVRQYARQLDALYGLGARRFVIAGVGSMACIPNMRARSPVNMCSPDVDDLIIPFNTKVKAMVTSLNANRPDAKFIYVDNYAMISQILSNPWSYGFSVADRGCCGIGRNRGMITCLPFLRPCLNRNSYIFWDAFHPTERVNVLLGRAAFSGGNDVVYPMNIQQLAAWQP

SEQ ID NO: 7338 - protein, 360 aa, Zea mays subsp. mays
  peptide (1)..(360): Ceres Seq. ID no. 12435000
  misc_feature (25)..(339): Pfam Name: GDSL-like Lipase/Acylhydrolase Pfam Description: GDSL-like Lipase/Acylhydrolase
  misc_feature (19)..(357): Homolog of NCBI NO: 18409881 NR Description: hypothetical protein; protein id: At1g71691.1
  misc_feature (22)..(355): Homolog of NCBI NO: 15224005 NR Description: putative GDSL-motif lipase/acylhydrolase; protein At1g71250.1 [Arabidopsis thaliana] >gi|25336259|pir||B96737
  misc_feature (16)..(356): Homolog of NCBI NO: 21592417 NR Description: lipase/hydrolase, putative [Arabidopsis thaliana]
  misc_feature (16)..(356): Homolog of NCBI NO: 15220514 NR Description: lipase/hydrolase, putative; protein id: supported by cDNA: 23556., supported by cDNA: gi_18086454
  misc_feature (14)..(356): Homolog of NCBI NO: 34909504 NR Description: putative GDSL-motif lipase/hydrolase-like protein
  misc_feature (23)..(357): Homolog of NCBI NO: 15242458 NR Description: GDSL-motif lipase/hydrolase-like protein; protein At5g45670.1, supported by cDNA: 18389., supported by cDNA:
  misc_feature (23)..(357): Homolog of NCBI NO: 21553940 NR Description: GDSL-motif lipase/hydrolase-like protein
  misc_feature (12)..(356): Homolog of NCBI NO: 15241626 NR Description: GDSL-motif lipase acylhydrolase-like protein;
  misc_feature (22)..(357): Homolog of NCBI NO: 34910808 NR Description: GDSL-motif lipase/hydrolase-like protein [Oryza
  misc_feature (22)..(356): Homolog of NCBI NO: 18398991 NR Description: unknown protein; protein id: At1g33811.1, by cDNA: gi_20466731 [Arabidopsis thaliana] unknown protein [Arabidopsis thaliana]
MGPGFGGGSSGGGAGAGAGTGVPAMFVFGDSLTDNGNNNDLNSLAKANYPPYGIDFAGGPTGRFSNGYTMVDEIAQLLGLPLLPSHTDAASSGGGDAALHGVNYASAAAGILDNTGQNFVGRIPFNQQIKNFEQTLEQLRRRTTTTRPGAGAGGLARSIFYVGMGSNDYLNNYLMPNYNTRNEYNGDQYSTLLVRQYARQLDALYGLGARRFVIAGVGSMACIPNMRARSPVNMCSPDVDDLIIPFNTKVKAMVTSLNANRPDAKFIYVDNYAMISQILSNPWSYGFSVADRGCCGIGRNRGMITCLPFLRPCLNRNSYIFWDAFHPTERVNVLLGRAAFSGGNDVVYPMNIQQLAAWQP

SEQ ID NO: 7339 - protein, 336 aa, Zea mays subsp. mays
  peptide (1)..(336): Ceres Seq. ID no. 12435001
  misc_feature (1)..(315): Pfam Name: GDSL-like Lipase/Acylhydrolase Pfam Description: GDSL-like Lipase/Acylhydrolase
  misc_feature (1)..(333): Homolog of NCBI NO: 18409881 NR Description: hypothetical protein; protein id: At1g71691.1
  misc_feature (1)..(331): Homolog of NCBI NO: 15224005 NR Description: putative GDSL-motif lipase/acylhydrolase; protein At1g71250.1 [Arabidopsis thaliana] >gi|25336259|pir||B96737
  misc_feature (1)..(332): Homolog of NCBI NO: 21592417 NR Description: lipase/hydrolase, putative [Arabidopsis thaliana]
  misc_feature (1)..(332): Homolog of NCBI NO: 15220514 NR Description: lipase/hydrolase, putative; protein id: supported by cDNA: 23556., supported by cDNA: gi_18086454
  misc_feature (1)..(332): Homolog of NCBI NO: 34909504 NR Description: putative GDSL-motif lipase/hydrolase-like protein
  misc_feature (1)..(333): Homolog of NCBI NO: 15242458 NR Description: GDSL-motif lipase/hydrolase-like protein; protein At5g45670.1, supported by cDNA: 18389., supported by cDNA:
  misc_feature (1)..(333): Homolog of NCBI NO: 21553940 NR Description: GDSL-motif lipase/hydrolase-like protein
  misc_feature (1)..(332): Homolog of NCBI NO: 15241626 NR Description: GDSL-motif lipase acylhydrolase-like protein;
  misc_feature (1)..(333): Homolog of NCBI NO: 34910808 NR Description: GDSL-motif lipase/hydrolase-like protein [Oryza
  misc_feature (1)..(332): Homolog of NCBI NO: 18398991 NR Description: unknown protein; protein id: At1g33811.1, by cDNA: gi_20466731 [Arabidopsis thaliana] unknown protein [Arabidopsis thaliana]
MFVFGDSLTDNGNNNDLNSLAKANYPPYGIDFAGGPTGRFSNGYTMVDEIAQLLGLPLLPSHTDAASSGGGDAALHGVNYASAAAGILDNTGQNFVGRIPFNQQIKNFEQTLEQLRRRTTTTRPGAGAGGLARSIFYVGMGSNDYLNNYLMPNYNTRNEYNGDQYSTLLVRQYARQLDALYGLGARRFVIAGVGSMACIPNMRARSPVNMCSPDVDDLIIPFNTKVKAMVTSLNANRPDAKFIYVDNYAMISQILSNPWSYGFSVADRGCCGIGRNRGMITCLPFLRPCLNRNSYIFWDAFHPTERVNVLLGRAAFSGGNDVVYPMNIQQLAAWQP

SEQ ID NO: 7340 - DNA, 695 bp, Zea mays subsp. mays
  misc_feature (1)..(695): Ceres Seq. ID no. 12382109
  misc_feature: MA Experiment ID: 108545 Result: Up-regulated in Transcription
  misc_feature: MA Experiment 108545 PARAMETER Experiment Name: Zm_Imbibed_Seeds_P Parameter: Age (day) Value: 3 vs. 2
  misc_feature: MA Experiment 108545 PARAMETER Experiment Name: Zm_Imbibed_Seeds_P Parameter: Organism Value: Zea mays
  misc_feature: MA Experiment 108545 PARAMETER Experiment Name: Zm_Imbibed_Seeds_P Parameter: Plant Line Value: 35A19
  misc_feature: MA Experiment 108545 PARAMETER Experiment Name: Zm_Imbibed_Seeds_P Parameter: Tissue Value: Aerial vs. Embryo
  misc_feature: MA Experiment ID: 20000479 Result: Down-regulated in Transcription
  misc_feature: MA Experiment 20000479 PARAMETER Experiment Name: Zm_Drought_P Parameter: Age (day) Value: 10
  misc_feature: MA Experiment 20000479 PARAMETER Experiment Name: Zm_Drought_P Parameter: Organism Value: Zea mays
  misc_feature: MA Experiment 20000479 PARAMETER Experiment Name: Zm_Drought_P Parameter: Plant Line Value: 35A19
  misc_feature: MA Experiment 20000479 PARAMETER Experiment Name: Zm_Drought_P Parameter: Timepoint (hr) Value: 48
  misc_feature: MA Experiment 20000479 PARAMETER Experiment Name: Zm_Drought_P Parameter: Tissue Value: Aerial
  misc_feature: MA Experiment 20000479 PARAMETER Experiment Name: Zm_Drought_P Parameter: Treatment Value: Drought vs. No Drought
  misc_feature: MA Experiment ID: 20000480 Result: Down-regulated in Transcription
  misc_feature: MA Experiment 20000480 PARAMETER Experiment Name: Zm_Drought_P Parameter: Age (day) Value: 11
  misc_feature: MA Experiment 20000480 PARAMETER Experiment Name: Zm_Drought_P Parameter: Organism Value: Zea mays
  misc_feature: MA Experiment 20000480 PARAMETER Experiment Name: Zm_Drought_P Parameter: Plant Line Value: 35A19
  misc_feature: MA Experiment 20000480 PARAMETER Experiment Name: Zm_Drought_P Parameter: Timepoint (hr) Value: 72
  misc_feature: MA Experiment 20000480 PARAMETER Experiment Name: Zm_Drought_P Parameter: Tissue Value: Aerial
  misc_feature: MA Experiment 20000480 PARAMETER Experiment Name: Zm_Drought_P Parameter: Treatment Value: Drought vs. No Drought
  misc_feature: MA Experiment ID: 20000633 Result: Up-regulated in Transcription
  misc_feature: MA Experiment 20000633 PARAMETER Experiment Name: Zm_Herbicide-Treatments_P Parameter: Timepoint (hr) Value: 4
  misc_feature: MA Experiment 20000633 PARAMETER Experiment Name: Zm_Herbicide-Treatments_P Parameter: Tissue Value: Aerial
  misc_feature: MA Experiment 20000633 PARAMETER Experiment Name: Zm_Herbicide-Treatments_P Parameter: Treatment Value: Trimec vs. No Treatment
gcacgagaccattacctagaacatcctaatcgaaaaaacactcaatcaactagctcaacaacacctgacctgatacaaaaggagccctagagttccagagacgaagaaaggagaagaagccaatcagccaccagccatgatgagtgccaagagacttgttcagatgtcaagtagtaggtggcgaagaatggcggccctcgcgaggaagaggctcgcatcgacacctgtgaaagaaactgacgggtcgtcatgcagcacttcgtcggtggctggcaaaggccactgtgccatgtactcggctgatggtcggcggtttgaggtcccgttggtgttcctcggaacggctctcttcggtgagctcctgagcatgtcgcaggaggagttcggcttcgctggtgatgacggcaggatcaccttgccatgtgagtctttggtgatggagtacatgatgtgtttgcttacaagagatgcctctgaagaggtcaaaaggttgtttttgagctccatggcaaggccttgccactatggatctggactggtgcaaaccatgcatcatacccagcgaactgttgttcctagcttctgaagattagcatatatgcgcagtagcaagcagattgttttcaccttttcgtgtttgatgtaaatgtttacataatgtagattgggatggaatggaactaaccatatggttc

SEQ ID NO: 7341 - protein, 149 aa, Zea mays subsp. mays
  peptide (1)..(149): Ceres Seq. ID no. 12382110
  misc_feature (1)..(108): Pfam Name: Auxin responsive protein Pfam Description: Auxin responsive protein
  misc_feature (1)..(128): Homolog of NCBI NO: 20149052 NR Description: auxin-induced SAUR-like protein [Capsicum annuum]
  misc_feature (1)..(146): Homolog of NCBI NO: 21592571 NR Description: auxin-induced protein, putative [Arabidopsis
  misc_feature (1)..(146): Homolog of NCBI NO: 18397123 NR Description: auxin-induced protein, putative; protein id:
  misc_feature (1)..(146): Homolog of NCBI NO: 18397101 NR Description: auxin-induced protein, putative; protein id:
  misc_feature (1)..(146): Homolog of NCBI NO: 18397103 NR Description: auxin-induced protein, putative; protein id:
  misc_feature (1)..(146): Homolog of NCBI NO: 26452170 NR Description: putative auxin-induced protein [Arabidopsis
  misc_feature (1)..(145): Homolog of NCBI NO: 38603942 NR Description: At1g29420 [Arabidopsis thaliana]
  misc_feature (1)..(146): Homolog of NCBI NO: 21617989 NR Description: auxin-induced protein, putative [Arabidopsis
  misc_feature (1)..(146): Homolog of NCBI NO: 21553494 NR Description: auxin-induced protein, putative [Arabidopsis
  misc_feature (1)..(125): Homolog of NCBI NO: 26452075 NR Description: putative auxin-induced protein [Arabidopsis
MMSAKRLVQMSSSRWRRMAALARKRLASTPVKETDGSSCSTSSVAGKGHCAMYSADGRRFEVPLVFLGTALFGELLSMSQEEFGFAGDDGRITLPCESLVMEYMMCLLTRDASEEVKRLFLSSMARPCHYGSGLVQTMHHTQRTVVPSF

SEQ ID NO: 7342 - protein, 148 aa, Zea mays subsp. mays
  peptide (1)..(148): Ceres Seq. ID no. 12382111
  misc_feature (1)..(107): Pfam Name: Auxin responsive protein Pfam Description: Auxin responsive protein
  misc_feature (1)..(127): Homolog of NCBI NO: 20149052 NR Description: auxin-induced SAUR-like protein [Capsicum annuum]
  misc_feature (1)..(145): Homolog of NCBI NO: 21592571 NR Description: auxin-induced protein, putative [Arabidopsis
  misc_feature (1)..(145): Homolog of NCBI NO: 18397123 NR Description: auxin-induced protein, putative; protein id:
  misc_feature (1)..(145): Homolog of NCBI NO: 18397101 NR Description: auxin-induced protein, putative; protein id:
  misc_feature (1)..(145): Homolog of NCBI NO: 18397103 NR Description: auxin-induced protein, putative; protein id:
  misc_feature (1)..(145): Homolog of NCBI NO: 26452170 NR Description: putative auxin-induced protein [Arabidopsis
  misc_feature (1)..(144): Homolog of NCBI NO: 38603942 NR Description: At1g29420 [Arabidopsis thaliana]
  misc_feature (1)..(145): Homolog of NCBI NO: 21617989 NR Description: auxin-induced protein, putative [Arabidopsis
  misc_feature (1)..(145): Homolog of NCBI NO: 21553494 NR Description: auxin-induced protein, putative [Arabidopsis
  misc_feature (1)..(124): Homolog of NCBI NO: 26452075 NR Description: putative auxin-induced protein [Arabidopsis
MSAKRLVQMSSSRWRRMAALARKRLASTPVKETDGSSCSTSSVAGKGHCAMYSADGRRFEVPLVFLGTALFGELLSMSQEEFGFAGDDGRITLPCESLVMEYMMCLLTRDASEEVKRLFLSSMARPCHYGSGLVQTMHHTQRTVVPSF

SEQ ID NO: 7343 - protein, 140 aa, Zea mays subsp. mays
  peptide (1)..(140): Ceres Seq. ID no. 12382112
  misc_feature (1)..(99): Pfam Name: Auxin responsive protein Pfam Description: Auxin responsive protein
  misc_feature (1)..(119): Homolog of NCBI NO: 20149052 NR Description: auxin-induced SAUR-like protein [Capsicum annuum]
  misc_feature (1)..(137): Homolog of NCBI NO: 21592571 NR Description: auxin-induced protein, putative [Arabidopsis
  misc_feature (1)..(137): Homolog of NCBI NO: 18397123 NR Description: auxin-induced protein, putative; protein id:
  misc_feature (1)..(137): Homolog of NCBI NO: 18397101 NR Description: auxin-induced protein, putative; protein id:
  misc_feature (1)..(137): Homolog of NCBI NO: 18397103 NR Description: auxin-induced protein, putative; protein id:
  misc_feature (1)..(137): Homolog of NCBI NO: 26452170 NR Description: putative auxin-induced protein [Arabidopsis
  misc_feature (1)..(136): Homolog of NCBI NO: 38603942 NR Description: At1g29420 [Arabidopsis thaliana]
  misc_feature (1)..(137): Homolog of NCBI NO: 21617989 NR Description: auxin-induced protein, putative [Arabidopsis
  misc_feature (1)..(137): Homolog of NCBI NO: 21553494 NR Description: auxin-induced protein, putative [Arabidopsis
  misc_feature (1)..(116): Homolog of NCBI NO: 26452075 NR Description: putative auxin-induced protein [Arabidopsis
MSSSRWRRMAALARKRLASTPVKETDGSSCSTSSVAGKGHCAMYSADGRRFEVPLVFLGTALFGELLSMSQEEFGFAGDDGRITLPCESLVMEYMMCLLTRDASEEVKRLFLSSMARPCHYGSGLVQTMHHTQRTVVPSF

SEQ ID NO: 7344 - DNA, 1241 bp, Zea mays subsp. mays
  misc_feature (1)..(1241): Ceres Seq. ID no. 12344775
  misc_feature: MA Experiment ID: 108522 Result: Up-regulated in Transcription
  misc_feature: MA Experiment 108522 PARAMETER Experiment Name: Zm_42deg_Heat_P Parameter: Age (day) Value: 8
  misc_feature: MA Experiment 108522 PARAMETER Experiment Name: Zm_42deg_Heat_P Parameter: Organism Value: Zea mays
  misc_feature: MA Experiment 108522 PARAMETER Experiment Name: Zm_42deg_Heat_P Parameter: Plant Line Value: 35A19
  misc_feature: MA Experiment 108522 PARAMETER Experiment Name: Zm_42deg_Heat_P Parameter: Temperature (deg C) Value: 42 vs. 22
  misc_feature: MA Experiment 108522 PARAMETER Experiment Name: Zm_42deg_Heat_P Parameter: Timepoint (hr) Value: 1
  misc_feature: MA Experiment 108522 PARAMETER Experiment Name: Zm_42deg_Heat_P Parameter: Tissue Value: Aerial
  misc_feature: MA Experiment ID: 108523 Result: Up-regulated in Transcription
  misc_feature: MA Experiment 108523 PARAMETER Experiment Name: Zm_42deg_Heat_P Parameter: Age (day) Value: 8
  misc_feature: MA Experiment 108523 PARAMETER Experiment Name: Zm_42deg_Heat_P Parameter: Organism Value: Zea mays
  misc_feature: MA Experiment 108523 PARAMETER Experiment Name: Zm_42deg_Heat_P Parameter: Plant Line Value: 35A19
  misc_feature: MA Experiment 108523 PARAMETER Experiment Name: Zm_42deg_Heat_P Parameter: Temperature (deg C) Value: 42 vs. 22
  misc_feature: MA Experiment 108523 PARAMETER Experiment Name: Zm_42deg_Heat_P Parameter: Timepoint (hr) Value: 6
  misc_feature: MA Experiment 108523 PARAMETER Experiment Name: Zm_42deg_Heat_P Parameter: Tissue Value: Aerial
  misc_feature: MA Experiment ID: 108543 Result: Down-regulated in Transcription
  misc_feature: MA Experiment ID: 20000534 Result: Down-regulated in Transcription
  misc_feature: MA Experiment 20000534 PARAMETER Experiment Name: Zm_Hybrid_Pollen_P Parameter: Age (day) Value: 8
  misc_feature: MA Experiment 20000534 PARAMETER Experiment Name: Zm_Hybrid_Pollen_P Parameter: Organism Value: Zea mays
  misc_feature: MA Experiment 20000534 PARAMETER Experiment Name: Zm_Hybrid_Pollen_P Parameter: Plant Line Value: 35A19
  misc_feature: MA Experiment 20000534 PARAMETER Experiment Name: Zm_Hybrid_Pollen_P Parameter: Tissue Value: Pollen vs. Aerial
acggttagttgtttcacacggacgcgcatttgtcgcgatcgacgatcgagaaaatcctagggttttcctctctcgccgccgccgacttaaagaggacagaggagtaggcgaagtagcgccgggagaggaacatggggacgccggagacgtcgcgggagccgtgcccggaccggatcctggacgacgtcggcggcgcgttcgggatgggcgccgttggcggctccgcctatcacttcatcaagggcatctacaactccccaaacgggatgcgcctgtccggaggcgcgcagaccgtgcgcatgaacgcgccgcgcgtggggggcagcttcgccgtttggggcggcctcttctccaccttcgactgcgccatggtgtacgcgcgccagaaggaggacccttggaactccatcgttgcgggcgcagccacgggcgggttcctctctatgcgccagggcatgggggccgcgggccggtccgcgctcatgggcggcatcctgctggccctcatcgagggcgccggactcatgctcaatcgcgtcctcgccaacccgccgctgcccgccgacgatcccaaccttacagcggccatgggcggcaaccctttcccgggcctgccgcaggcgccgccggtcgtggcacctccggaagcggcgacctccagcggcgtgggtggcttgttcgggggactgtttggcaggaaggaggaggataagaaacccagcgcagtcgggggcaagtcggagatcttggagagcttcgacacgcccagcagtccgataccatcgttcgagtacaagtgaggaaaaggttggctgacgccactgttgcttgcttggtgttgcaatgtggtggtggtggtctggaattggtgaattgcatgtcagcgatacaataacacagacaggacaggagatggattgtttgatgaatttattcctgcgccgctctgcctcgacggctcatatctatacgcccgcttgtgtatgtataagccctttttcaaaacgtggcagattggctactttttgatgagatgtagtagtatctgtaggagcaacagctgtagtattatatgcattcgtgtttgtgcaatgcaatgcacatcaaaacccttgtgcggttgtgcctggccatctgaagggacgacttatttgttcatgtcgctggtcttcgttttgctggcccagtggcctacgaggctgtgctgtgttaaggattggacatctgaagggttcttttgc

SEQ ID NO: 7345 - protein, 236 aa, Zea mays subsp. mays
  peptide (1)..(236): Ceres Seq. ID no. 12344776
RLVVSHGRAFVAIDDRENPRVFLSRRRRLKEDRGVGEVAPGEEHGDAGDVAGAVPGPDPGRRRRRVRDGRRWRLRLSLHQGHLQLPKRDAPVRRRADRAHERAARGGQLRRLGRPLLHLRLRHGVRAPEGGPLELHRCGRSHGRVPLYAPGHGGRGPVRAHGRHPAGPHRGRRTHAQSRPRQPAAARRRSQPYSGHGRQPFPGPAAGAAGRGTSGSGDLQRRGWLVRGTVWQEGGG

SEQ ID NO: 7346 - protein, 222 aa, Zea mays subsp. mays
  peptide (1)..(222): Ceres Seq. ID no. 12344777
  misc_feature (1)..(222): Homolog of NCBI NO: 34394571 NR Description: translocase inner membrane-like protein [Oryza
  misc_feature (1)..(222): Homolog of NCBI NO: 15217923 NR Description: mitochondrial inner membrane translocase
  misc_feature (1)..(171): Homolog of NCBI NO: 15228131 NR Description: putative protein translocase; protein id: supported by cDNA: gi_13430691, supported by cDNA: gi_15810185, by cDNA: gi_6103721 [Arabidopsis thaliana]
  misc_feature (1)..(171): Homolog of NCBI NO: 38678772 NR Description: mitochondrial inner membrane translocase TM17-2
  misc_feature (1)..(171): Homolog of NCBI NO: 6103722 NR Description: TIM17 [Arabidopsis thaliana]
  misc_feature (5)..(162): Homolog of NCBI NO: 5032181 NR Description: translocase of inner mitochondrial membrane 17 B (yeast); inner mitochondrial membrane preprotein translocase sapiens] >gi|12643624|sp|O60830|IM7B_HUMAN Mitochondrial import
  misc_feature (5)..(162): Homolog of NCBI NO: 34933423 NR Description: similar to mitochondrial inner membrane
  misc_feature (5)..(162): Homolog of NCBI NO: 33468937 NR Description: translocator of inner mitochondrial membrane b; of inner mitochondrial membrane 17 kDa, b [Mus musculus] Mitochondrial import inner membrane translocase subunit TIM17 B
  misc_feature (5)..(156): Homolog of NCBI NO: 30923567 NR Description: CG40451-PA [Drosophila melanogaster]
  misc_feature (5)..(165): Homolog of NCBI NO: 33468943 NR Description: translocator of inner mitochondrial membrane a; of inner mitochondrial membrane 17 kDa, a [Mus musculus] Mitochondrial import inner membrane translocase subunit TIM17 A
  misc_feature (1)..(222): Homolog of NCBI NO: 34394571 NR Description: translocase inner membrane-like protein [Oryza
  misc_feature (1)..(222): Homolog of NCBI NO: 15217923 NR Description: mitochondrial inner membrane translocase
  misc_feature (1)..(171): Homolog of NCBI NO: 15228131 NR Description: putative protein translocase; protein id: supported by cDNA: gi_13430691, supported by cDNA: gi_15810185, by cDNA: gi_6103721 [Arabidopsis thaliana]
  misc_feature (1)..(171): Homolog of NCBI NO: 38678772 NR Description: mitochondrial inner membrane translocase TM17-2
  misc_feature (1)..(171): Homolog of NCBI NO: 6103722 NR Description: TIM17 [Arabidopsis thaliana]
  misc_feature (5)..(162): Homolog of NCBI NO: 5032181 NR Description: translocase of inner mitochondrial membrane 17 B (yeast); inner mitochondrial membrane preprotein translocase sapiens] >gi|12643624|sp|O60830|IM7B_HUMAN Mitochondrial import
  misc_feature (5)..(162): Homolog of NCBI NO: 34933423 NR Description: similar to mitochondrial inner membrane
  misc_feature (5)..(162): Homolog of NCBI NO: 33468937 NR Description: translocator of inner mitochondrial membrane b; of inner mitochondrial membrane 17 kDa, b [Mus musculus] Mitochondrial import inner membrane translocase subunit TIM17 B
  misc_feature (5)..(156): Homolog of NCBI NO: 30923567 NR Description: CG40451-PA [Drosophila melanogaster]
  misc_feature (5)..(165): Homolog of NCBI NO: 33468943 NR Description: translocator of inner mitochondrial membrane a; of inner mitochondrial membrane 17 kDa, a [Mus musculus] Mitochondrial import inner membrane translocase subunit TIM17 A
MGTPETSREPCPDRILDDVGGAFGMGAVGGSAYHFIKGIYNSPNGMRLSGGAQTVRMNAPRVGGSFAVWGGLFSTFDCAMVYARQKEDPWNSIVAGAATGGFLSMRQGMGAAGRSALMGGILLALIEGAGLMLNRVLANPPLPADDPNLTAAMGGNPFPGLPQAPPVVAPPEAATSSGVGGLFGGLFGRKEEDKKPSAVGGKSEILESFDTPSSPIPSFEYK

SEQ ID NO: 7347 - protein, 198 aa, Zea mays subsp. mays
  peptide (1)..(198): Ceres Seq. ID no. 12344778
  misc_feature (1)..(198): Homolog of NCBI NO: 34394571 NR Description: translocase inner membrane-like protein [Oryza
  misc_feature (1)..(198): Homolog of NCBI NO: 15217923 NR Description: mitochondrial inner membrane translocase
  misc_feature (1)..(147): Homolog of NCBI NO: 15228131 NR Description: putative protein translocase; protein id: supported by cDNA: gi_13430691, supported by cDNA: gi_15810185, by cDNA: gi_6103721 [Arabidopsis thaliana]
  misc_feature (1)..(147): Homolog of NCBI NO: 38678772 NR Description: mitochondrial inner membrane translocase TM17-2
  misc_feature (1)..(147): Homolog of NCBI NO: 6103722 NR Description: TIM17 [Arabidopsis thaliana]
  misc_feature (1)..(138): Homolog of NCBI NO: 5032181 NR Description: translocase of inner mitochondrial membrane 17 B (yeast); inner mitochondrial membrane preprotein translocase sapiens] >gi|12643624|sp|O60830|IM7B_HUMAN Mitochondrial import
  misc_feature (1)..(138): Homolog of NCBI NO: 34933423 NR Description: similar to mitochondrial inner membrane
  misc_feature (1)..(138): Homolog of NCBI NO: 33468937 NR Description: translocator of inner mitochondrial membrane b; of inner mitochondrial membrane 17 kDa, b [Mus musculus] Mitochondrial import inner membrane translocase subunit TIM17 B
  misc_feature (1)..(132): Homolog of NCBI NO: 30923567 NR Description: CG40451-PA [Drosophila melanogaster]
  misc_feature (1)..(141): Homolog of NCBI NO: 33468943 NR Description: translocator of inner mitochondrial membrane a; of inner mitochondrial membrane 17 kDa, a [Mus musculus] Mitochondrial import inner membrane translocase subunit TIM17 A
  misc_feature (1)..(198): Homolog of NCBI NO: 34394571 NR Description: translocase inner membrane-like protein [Oryza
  misc_feature (1)..(198): Homolog of NCBI NO: 15217923 NR Description: mitochondrial inner membrane translocase
  misc_feature (1)..(147): Homolog of NCBI NO: 15228131 NR Description: putative protein translocase; protein id: supported by cDNA: gi_13430691, supported by cDNA: gi_15810185, by cDNA: gi_6103721 [Arabidopsis thaliana]
  misc_feature (1)..(147): Homolog of NCBI NO: 38678772 NR Description: mitochondrial inner membrane translocase TM17-2
  misc_feature (1)..(147): Homolog of NCBI NO: 6103722 NR Description: TIM17 [Arabidopsis thaliana]
  misc_feature (1)..(138): Homolog of NCBI NO: 5032181 NR Description: translocase of inner mitochondrial membrane 17 B (yeast); inner mitochondrial membrane preprotein translocase sapiens] >gi|12643624|sp|O60830|IM7B_HUMAN Mitochondrial import
  misc_feature (1)..(138): Homolog of NCBI NO: 34933423 NR Description: similar to mitochondrial inner membrane
  misc_feature (1)..(138): Homolog of NCBI NO: 33468937 NR Description: translocator of inner mitochondrial membrane b; of inner mitochondrial membrane 17 kDa, b [Mus musculus] Mitochondrial import inner membrane translocase subunit TIM17 B
  misc_feature (1)..(132): Homolog of NCBI NO: 30923567 NR Description: CG40451-PA [Drosophila melanogaster]
  misc_feature (1)..(141): Homolog of NCBI NO: 33468943 NR Description: translocator of inner mitochondrial membrane a; of inner mitochondrial membrane 17 kDa, a [Mus musculus] Mitochondrial import inner membrane translocase subunit TIM17 A
MGAVGGSAYHFIKGIYNSPNGMRLSGGAQTVRMNAPRVGGSFAVWGGLFSTFDCAMVYARQKEDPWNSIVAGAATGGFLSMRQGMGAAGRSALMGGILLALIEGAGLMLNRVLANPPLPADDPNLTAAMGGNPFPGLPQAPPVVAPPEAATSSGVGGLFGGLFGRKEEDKKPSAVGGKSEILESFDTPSSPIPSFEYK

SEQ ID NO: 7348 - DNA, 1006 bp, Zea mays subsp. mays
  misc_feature (1)..(1006): Ceres Seq. ID no. 12344779
  misc_feature: MA Experiment ID: 108535 Result: Up-regulated in Transcription
  misc_feature: MA Experiment 108535 PARAMETER Experiment Name: Zm_Meristem_P Parameter: Age (day) Value: 8
  misc_feature: MA Experiment 108535 PARAMETER Experiment Name: Zm_Meristem_P Parameter: Organism Value: Zea mays
  misc_feature: MA Experiment 108535 PARAMETER Experiment Name: Zm_Meristem_P Parameter: Plant Line Value: 35A19
  misc_feature: MA Experiment 108535 PARAMETER Experiment Name: Zm_Meristem_P Parameter: Tissue Value: Root Meristem vs. Above Root Meristem
  misc_feature: MA Experiment ID: 108556 Result: Down-regulated in Transcription
  misc_feature: MA Experiment 108556 PARAMETER Experiment Name: Zm_Drought_P Parameter: Age (day) Value: 9
  misc_feature: MA Experiment 108556 PARAMETER Experiment Name: Zm_Drought_P Parameter: Organism Value: Zea mays
  misc_feature: MA Experiment 108556 PARAMETER Experiment Name: Zm_Drought_P Parameter: Plant Line Value: 35A19
  misc_feature: MA Experiment 108556 PARAMETER Experiment Name: Zm_Drought_P Parameter: Timepoint (hr) Value: 24
  misc_feature: MA Experiment 108556 PARAMETER Experiment Name: Zm_Drought_P Parameter: Tissue Value: Aerial
  misc_feature: MA Experiment 108556 PARAMETER Experiment Name: Zm_Drought_P Parameter: Treatment Value: Drought vs. No Drought
  misc_feature: MA Experiment ID: 20000480 Result: Down-regulated in Transcription
  misc_feature: MA Experiment 20000480 PARAMETER Experiment Name: Zm_Drought_P Parameter: Age (day) Value: 11
  misc_feature: MA Experiment 20000480 PARAMETER Experiment Name: Zm_Drought_P Parameter: Organism Value: Zea mays
  misc_feature: MA Experiment 20000480 PARAMETER Experiment Name: Zm_Drought_P Parameter: Plant Line Value: 35A19
  misc_feature: MA Experiment 20000480 PARAMETER Experiment Name: Zm_Drought_P Parameter: Timepoint (hr) Value: 72
  misc_feature: MA Experiment 20000480 PARAMETER Experiment Name: Zm_Drought_P Parameter: Tissue Value: Aerial
  misc_feature: MA Experiment 20000480 PARAMETER Experiment Name: Zm_Drought_P Parameter: Treatment Value: Drought vs. No Drought
  misc_feature: MA Experiment ID: 20000488 Result: Up-regulated in Transcription
  misc_feature: MA Experiment 20000488 PARAMETER Experiment Name: Zm_50mM_NH4NO3_L_to_H_P Parameter: Organism Value: Zea mays
  misc_feature: MA Experiment 20000488 PARAMETER Experiment Name: Zm_50mM_NH4NO3_L_to_H_P Parameter: Timepoint (hr) Value: 8
  misc_feature: MA Experiment 20000488 PARAMETER Experiment Name: Zm_50mM_NH4NO3_L_to_H_P Parameter: Tissue Value: Leaves
  misc_feature: MA Experiment 20000488 PARAMETER Experiment Name: Zm_50mM_NH4NO3_L_to_H_P Parameter: Treatment Value: 50mM NH4NO3 vs. 100mM Mannitol
  misc_feature: MA Experiment ID: 20001606 Result: Up-regulated in Transcription
  misc_feature: MA Experiment 20001606 PARAMETER Experiment Name: Zm_50ppm_KNO3_L-to-H_P Parameter: Age (day) Value: 19
  misc_feature: MA Experiment 20001606 PARAMETER Experiment Name: Zm_50ppm_KNO3_L-to-H_P Parameter: Organism Value: Zea mays
  misc_feature: MA Experiment 20001606 PARAMETER Experiment Name: Zm_50ppm_KNO3_L-to-H_P Parameter: Plant Line Value: 35A19
  misc_feature: MA Experiment 20001606 PARAMETER Experiment Name: Zm_50ppm_KNO3_L-to-H_P Parameter: Timepoint (hr) Value: 8
  misc_feature: MA Experiment 20001606 PARAMETER Experiment Name: Zm_50ppm_KNO3_L-to-H_P Parameter: Tissue Value: Shoots
  misc_feature: MA Experiment 20001606 PARAMETER Experiment Name: Zm_50ppm_KNO3_L-to-H_P Parameter: Treatment Value: 50ppm KNO3 vs. 50ppm KCl
agatatggttttcggatacttgaaagcccatcttactctccttccggtcgccgcagtaaacccctaggaagaaaccccaccgcttctggccgccgccggctcaccggtgacggcatccaaatccatggcctcccgccaggcgctccacatcttcacgccctcccggcgggcgatgcacatcctcacgtcgtcccgcggcatcgcctcgaccccgcacctctcgtccttcggctggtttgataagatcaagtccaccatcactggcaagaagcccgaggaggcctccgaggcatcctccttcaccctcatccagttcgcagacacgatggagaaagcgaggaagctggggacgttcaagaacttcgttgccgggcgggccagcgaggccaccgtcgtgaacgtcttcgagaagcactccgctgtgctgcgctacctcggtgccatcgaccccaccggcgagaacctccgaaacactgacaaaattaacgcgaccaagcactgcaactgcacaattgctgacgtggagcacattctggccaagtacacatgggctaaagaggctcagaagaagattgcaaagctcaaggaagaagggaagccattaccgaagtcatttaacgaggtccaaaatctaatgggttctacaccagtggatgtcggcagaagtaatctggcaaagagtggtcagataagtaggaatgctttctgcccatgtggttctaagaaacgatataaaaggtgctgtggagcttcatgagatgaacaacaatcctctagttcactagcacatgcaggccaggtgcagcgtttgtaagctcttttctttgccaaactctaccaagctctttcgtggacaacacctgaatttgaagcttgcaatttgtaaagcactatgagcgagccctatgtttcagaaggctttctcttaaactctgatttcttgattggagttgttgtttaacattgattcagttcaaccatgcatgaatctaggtaatatatatcc

SEQ ID NO: 7349 - protein, 210 aa, Zea mays subsp. mays
  peptide (1)..(210): Ceres Seq. ID no. 12344780
  misc_feature (39)..(167): Homolog of NCBI NO: 15229851 NR Description: unknown protein; protein id: At3g04950.1
MASRQALHIFTPSRRAMHILTSSRGIASTPHLSSFGWFDKIKSTITGKKPEEASEASSFTLIQFADTMEKARKLGTFKNFVAGRASEATVVNVFEKHSAVLRYLGAIDPTGENLRNTDKINATKHCNCTIADVEHILAKYTWAKEAQKKIAKLKEEGKPLPKSFNEVQNLMGSTPVDVGRSNLAKSGQISRNAFCPCGSKKRYKRCCGAS

SEQ ID NO: 7350 - protein, 194 aa, Zea mays subsp. mays
  peptide (1)..(194): Ceres Seq. ID no. 12344781
  misc_feature (23)..(151): Homolog of NCBI NO: 15229851 NR Description: unknown protein; protein id: At3g04950.1
MHILTSSRGIASTPHLSSFGWFDKIKSTITGKKPEEASEASSFTLIQFADTMEKARKLGTFKNFVAGRASEATVVNVFEKHSAVLRYLGAIDPTGENLRNTDKINATKHCNCTIADVEHILAKYTWAKEAQKKIAKLKEEGKPLPKSFNEVQNLMGSTPVDVGRSNLAKSGQISRNAFCPCGSKKRYKRCCGAS

SEQ ID NO: 7351 - protein, 143 aa, Zea mays subsp. mays
  peptide (1)..(143): Ceres Seq. ID no. 12344782
  misc_feature (1)..(100): Homolog of NCBI NO: 15229851 NR Description: unknown protein; protein id: At3g04950.1
MEKARKLGTFKNFVAGRASEATVVNVFEKHSAVLRYLGAIDPTGENLRNTDKINATKHCNCTIADVEHILAKYTWAKEAQKKIAKLKEEGKPLPKSFNEVQNLMGSTPVDVGRSNLAKSGQISRNAFCPCGSKKRYKRCCGAS

SEQ ID NO: 7352 - DNA, 1515 bp, Zea mays subsp. mays
  misc_feature (1)..(1515): Ceres Seq. ID no. 13498565
  misc_feature: MA Experiment ID: 108556 Result: Down-regulated in Transcription
  misc_feature: MA Experiment 108556 PARAMETER Experiment Name: Zm_Drought_P Parameter: Age (day) Value: 9
  misc_feature: MA Experiment 108556 PARAMETER Experiment Name: Zm_Drought_P Parameter: Organism Value: Zea mays
  misc_feature: MA Experiment 108556 PARAMETER Experiment Name: Zm_Drought_P Parameter: Plant Line Value: 35A19
  misc_feature: MA Experiment 108556 PARAMETER Experiment Name: Zm_Drought_P Parameter: Timepoint (hr) Value: 24
  misc_feature: MA Experiment 108556 PARAMETER Experiment Name: Zm_Drought_P Parameter: Tissue Value: Aerial
  misc_feature: MA Experiment 108556 PARAMETER Experiment Name: Zm_Drought_P Parameter: Treatment Value: Drought vs. No Drought
  misc_feature: MA Experiment ID: 20000477 Result: Down-regulated in Transcription
  misc_feature: MA Experiment 20000477 PARAMETER Experiment Name: Zm_5mM_SA_P Parameter: Age (day) Value: 10
  misc_feature: MA Experiment 20000477 PARAMETER Experiment Name: Zm_5mM_SA_P Parameter: Organism Value: Zea mays
  misc_feature: MA Experiment 20000477 PARAMETER Experiment Name: Zm_5mM_SA_P Parameter: Plant Line Value: 35A19
  misc_feature: MA Experiment 20000477 PARAMETER Experiment Name: Zm_5mM_SA_P Parameter: Timepoint (hr) Value: 48
  misc_feature: MA Experiment 20000477 PARAMETER Experiment Name: Zm_5mM_SA_P Parameter: Tissue Value: Aerial
  misc_feature: MA Experiment 20000477 PARAMETER Experiment Name: Zm_5mM_SA_P Parameter: Treatment Value: 5mM SA vs. No Treatment
  misc_feature: MA Experiment ID: 20000478 Result: Down-regulated in Transcription
  misc_feature: MA Experiment 20000478 PARAMETER Experiment Name: Zm_5mM_SA_P Parameter: Age (day) Value: 11
  misc_feature: MA Experiment 20000478 PARAMETER Experiment Name: Zm_5mM_SA_P Parameter: Organism Value: Zea mays
  misc_feature: MA Experiment 20000478 PARAMETER Experiment Name: Zm_5mM_SA_P Parameter: Plant Line Value: 35A19
  misc_feature: MA Experiment 20000478 PARAMETER Experiment Name: Zm_5mM_SA_P Parameter: Timepoint (hr) Value: 72
  misc_feature: MA Experiment 20000478 PARAMETER Experiment Name: Zm_5mM_SA_P Parameter: Tissue Value: Aerial
  misc_feature: MA Experiment 20000478 PARAMETER Experiment Name: Zm_5mM_SA_P Parameter: Treatment Value: 5mM SA vs. No Treatment
  misc_feature: MA Experiment ID: 20000479 Result: Down-regulated in Transcription
  misc_feature: MA Experiment 20000479 PARAMETER Experiment Name: Zm_Drought_P Parameter: Age (day) Value: 10
  misc_feature: MA Experiment 20000479 PARAMETER Experiment Name: Zm_Drought_P Parameter: Organism Value: Zea mays
  misc_feature: MA Experiment 20000479 PARAMETER Experiment Name: Zm_Drought_P Parameter: Plant Line Value: 35A19
  misc_feature: MA Experiment 20000479 PARAMETER Experiment Name: Zm_Drought_P Parameter: Timepoint (hr) Value: 48
  misc_feature: MA Experiment 20000479 PARAMETER Experiment Name: Zm_Drought_P Parameter: Tissue Value: Aerial
  misc_feature: MA Experiment 20000479 PARAMETER Experiment Name: Zm_Drought_P Parameter: Treatment Value: Drought vs. No Drought
ccattacctagaacatcctaatcgaaaaaagaagccaagggggaagcgaaaccgaaagcgagcagagtttggcaatggagctcccgtggggaatgctgctgccgctgctgctggtcctctccgtctcgtcctcgtcatcgtcgtcggctgctgccacgctcgccgtcagcgctccgcccccactgcttgttcctcctcctcgtcatgctcaagacgccgaaggcatgctcatcaacggcaacttcgagacggcgccgcggaggctgaacaagaccctcatcgtggggcgccactcgctgccggggtggacggtgcaggggcacgtggagtacgtctcgggcggtccccagcccgggggcatgttcttcgcggtgccgcacggcgtgcacgcgctgcgcctcggcagccgcgcgtcggcgtcgcagaacgtgacggtgcggccgggggcgctgtacgcgctcacgttcgcggcgacgcggacgtgcgcgcaggacgaggccctgcgcgtggcggtggcgccgtcgctctcggcgcccgccgacgtcgccgtgcgcacgctctacagcggcgcgtccgccgacacctgggcctggggcttccgcgcctcctcccccgtcgcgcaggtcacgttcgccaaccccggcgtgcaggaggaccccgcgtgcggcccgctgctggacgctgtcgccatcaaggagctgcccgcgccgtacccgaccaaagacaacctgatcaagaacgacggcttcgagatcggtccccaggtgctcaggaactcgacggtcggcgttctgctgccccccaagcagaaggacgcgacgtcgccgctgcccggctggatcatcgagtcgctcaaggcggtgcggttcatcgacgcggcccacttctctgtccccgcggggcagtacgcggtggagctggtggccgggcgggagagcgccatcgcgcaggtcatccgcaccgtgcccaaccgcgcctacaacctgtcgttcgccgtcggcgacgcccggaacggctgccacggctctatgctggtggaggcgttcgcgggcaacgtcacgcagaaggtgccgttcgattccacggggaaaggcgggtttaagacggcggcgttcaggttcgtggccagcggcgtccgcacccgcctcaccttctacagctcctactaccacaccaaggtcaccgacggcgtctcgctctgcggccccgtgctggaccaggtcaaggttgtgcctgtcaaggcgtagtgaaatgtagtgaaatgaatcgtgagagcgccgagtgacggtcgagtgacggtctgctctgctctgctctgctcgtcgtctgtagctgtgctcgtcgtgatttggcgtggtgggttgtgaaagtgtggacgaattatggacccttcggaatctgatcgtggtgtgctgtgcggtgcgatgtgctgtagcgaaatttggttactcatctcttgttctctccgcgtttggaatttgcgttttccaatccggtattgaatgtataataatt

SEQ ID NO: 7353 - protein, 390 aa, Zea mays subsp. mays
  peptide (1)..(390): Ceres Seq. ID no. 13498566
  misc_feature (64)..(385): Pfam Name: Protein of unknown function, DUF642 Pfam Description: Protein of unknown function, DUF642
  misc_feature (64)..(385): Pfam Name: Protein of unknown function, DUF642 Pfam Description: Protein of unknown function, DUF642
  misc_feature (1)..(390): Homolog of NCBI NO: 30102997 NR Description: unknown protein [Oryza sativa (japonica
  misc_feature (45)..(385): Homolog of NCBI NO: 18398135 NR Description: expressed protein [Arabidopsis thaliana] unknown protein [Arabidopsis thaliana] unknown protein [Arabidopsis thaliana]
  misc_feature (64)..(385): Homolog of NCBI NO: 12321555 NR Description: unknown protein, 5' partial [Arabidopsis thaliana]
  misc_feature (42)..(385): Homolog of NCBI NO: 15227437 NR Description: expressed protein [Arabidopsis thaliana]
  misc_feature (41)..(385): Homolog of NCBI NO: 15227439 NR Description: expressed protein [Arabidopsis thaliana]
  misc_feature (45)..(385): Homolog of NCBI NO: 18398135 NR Description: expressed protein [Arabidopsis thaliana] unknown protein [Arabidopsis thaliana] unknown protein [Arabidopsis thaliana]
  misc_feature (42)..(385): Homolog of NCBI NO: 15227437 NR Description: expressed protein [Arabidopsis thaliana]
  misc_feature (49)..(389): Homolog of NCBI NO: 21537379 NR Description: unknown [Arabidopsis thaliana]
  misc_feature (49)..(389): Homolog of NCBI NO: 15239438 NR Description: expressed protein [Arabidopsis thaliana] Unknown protein [Arabidopsis thaliana]
  misc_feature (48)..(389): Homolog of NCBI NO: 23397043 NR Description: unknown protein [Arabidopsis thaliana]
  misc_feature (48)..(389): Homolog of NCBI NO: 21554402 NR Description: unknown [Arabidopsis thaliana]
  misc_feature (48)..(389): Homolog of NCBI NO: 15239049 NR Description: expressed protein [Arabidopsis thaliana]
  misc_feature (41)..(385): Homolog of NCBI NO: 15227439 NR Description: expressed protein [Arabidopsis thaliana]
  misc_feature (64)..(385): Homolog of NCBI NO: 12321555 NR Description: unknown protein, 5' partial [Arabidopsis thaliana]
  misc_feature (1)..(390): Homolog of NCBI NO: 30102997 NR Description: unknown protein [Oryza sativa (japonica
  misc_feature (48)..(389): Homolog of NCBI NO: 15239049 NR Description: expressed protein [Arabidopsis thaliana]
  misc_feature (48)..(389): Homolog of NCBI NO: 21554402 NR Description: unknown [Arabidopsis thaliana]
  misc_feature (48)..(389): Homolog of NCBI NO: 23397043 NR Description: unknown protein [Arabidopsis thaliana]
  misc_feature (49)..(389): Homolog of NCBI NO: 15239438 NR Description: expressed protein [Arabidopsis thaliana] Unknown protein [Arabidopsis thaliana]
  misc_feature (49)..(389): Homolog of NCBI NO: 21537379 NR Description: unknown [Arabidopsis thaliana]
MELPWGMLLPLLLVLSVSSSSSSSAAATLAVSAPPPLLVPPPRHAQDAEGMLINGNFETAPRRLNKTLIVGRHSLPGWTVQGHVEYVSGGPQPGGMFFAVPHGVHALRLGSRASASQNVTVRPGALYALTFAATRTCAQDEALRVAVAPSLSAPADVAVRTLYSGASADTWAWGFRASSPVAQVTFANPGVQEDPACGPLLDAVAIKELPAPYPTKDNLIKNDGFEIGPQVLRNSTVGVLLPPKQKDATSPLPGWIIESLKAVRFIDAAHFSVPAGQYAVELVAGRESAIAQVIRTVPNRAYNLSFAVGDARNGCHGSMLVEAFAGNVTQKVPFDSTGKGGFKTAAFRFVASGVRTRLTFYSSYYHTKVTDGVSLCGPVLDQVKVVPVKA

SEQ ID NO: 7354 - protein, 384 aa, Zea mays subsp. mays
  peptide (1)..(384): Ceres Seq. ID no. 13498567
  misc_feature (58)..(379): Pfam Name: Protein of unknown function, DUF642 Pfam Description: Protein of unknown function, DUF642
  misc_feature (58)..(379): Pfam Name: Protein of unknown function, DUF642 Pfam Description: Protein of unknown function, DUF642
  misc_feature (1)..(384): Homolog of NCBI NO: 30102997 NR Description: unknown protein [Oryza sativa (japonica
  misc_feature (39)..(379): Homolog of NCBI NO: 18398135 NR Description: expressed protein [Arabidopsis thaliana] unknown protein [Arabidopsis thaliana] unknown protein [Arabidopsis thaliana]
  misc_feature (58)..(379): Homolog of NCBI NO: 12321555 NR Description: unknown protein, 5' partial [Arabidopsis thaliana]
  misc_feature (36)..(379): Homolog of NCBI NO: 15227437 NR Description: expressed protein [Arabidopsis thaliana]
  misc_feature (35)..(379): Homolog of NCBI NO: 15227439 NR Description: expressed protein [Arabidopsis thaliana]
  misc_feature (39)..(379): Homolog of NCBI NO: 18398135 NR Description: expressed protein [Arabidopsis thaliana] unknown protein [Arabidopsis thaliana] unknown protein [Arabidopsis thaliana]
  misc_feature (36)..(379): Homolog of NCBI NO: 15227437 NR Description: expressed protein [Arabidopsis thaliana]
  misc_feature (43)..(383): Homolog of NCBI NO: 21537379 NR Description: unknown [Arabidopsis thaliana]
  misc_feature (43)..(383): Homolog of NCBI NO: 15239438 NR Description: expressed protein [Arabidopsis thaliana] Unknown protein [Arabidopsis thaliana]
  misc_feature (42)..(383): Homolog of NCBI NO: 23397043 NR Description: unknown protein [Arabidopsis thaliana]
  misc_feature (42)..(383): Homolog of NCBI NO: 21554402 NR Description: unknown [Arabidopsis thaliana]
  misc_feature (42)..(383): Homolog of NCBI NO: 15239049 NR Description: expressed protein [Arabidopsis thaliana]
  misc_feature (35)..(379): Homolog of NCBI NO: 15227439 NR Description: expressed protein [Arabidopsis thaliana]
  misc_feature (58)..(379): Homolog of NCBI NO: 12321555 NR Description: unknown protein, 5' partial [Arabidopsis thaliana]
  misc_feature (1)..(384): Homolog of NCBI NO: 30102997 NR Description: unknown protein [Oryza sativa (japonica
  misc_feature (42)..(383): Homolog of NCBI NO: 15239049 NR Description: expressed protein [Arabidopsis thaliana]
  misc_feature (42)..(383): Homolog of NCBI NO: 21554402 NR Description: unknown [Arabidopsis thaliana]
  misc_feature (42)..(383): Homolog of NCBI NO: 23397043 NR Description: unknown protein [Arabidopsis thaliana]
  misc_feature (43)..(383): Homolog of NCBI NO: 15239438 NR Description: expressed protein [Arabidopsis thaliana] Unknown protein [Arabidopsis thaliana]
  misc_feature (43)..(383): Homolog of NCBI NO: 21537379 NR Description: unknown [Arabidopsis thaliana]
MLLPLLLVLSVSSSSSSSAAATLAVSAPPPLLVPPPRHAQDAEGMLINGNFETAPRRLNKTLIVGRHSLPGWTVQGHVEYVSGGPQPGGMFFAVPHGVHALRLGSRASASQNVTVRPGALYALTFAATRTCAQDEALRVAVAPSLSAPADVAVRTLYSGASADTWAWGFRASSPVAQVTFANPGVQEDPACGPLLDAVAIKELPAPYPTKDNLIKNDGFEIGPQVLRNSTVGVLLPPKQKDATSPLPGWIIESLKAVRFIDAAHFSVPAGQYAVELVAGRESAIAQVIRTVPNRAYNLSFAVGDARNGCHGSMLVEAFAGNVTQKVPFDSTGKGGFKTAAFRFVASGVRTRLTFYSSYYHTKVTDGVSLCGPVLDQVKVVPVKA

SEQ ID NO: 7355 - protein, 366 aa, Zea mays subsp. mays
  peptide (1)..(366): Ceres Seq. ID no. 13498568
  misc_feature (76)..(340): Homolog of NCBI NO: 23102218 NR Description: hypothetical protein [Azotobacter vinelandii]
  misc_feature (76)..(340): Homolog of NCBI NO: 23102218 NR Description: hypothetical protein [Azotobacter vinelandii]
HYLEHPNRKKKPRGKRNRKRAEFGNGAPVGNAAAAAAGPLRLVLVIVVGCCHARRQRSAPTACSSSSSCSRRRRHAHQRQLRDGAAEAEQDPHRGAPLAAGVDGAGARGVRLGRSPARGHVLRGAARRARAAPRQPRVGVAERDGAAGGAVRAHVRGDADVRAGRGPARGGGAVALGARRRRRAHALQRRVRRHLGLGLPRLLPRRAGHVRQPRRAGGPRVRPAAGRCRHQGAARAVPDQRQPDQERRLRDRSPGAQELDGRRSAAPQAEGRDVAAARLDHRVAQGGAVHRRGPLLCPRGAVRGGAGGRAGERHRAGHPHRAQPRLQPVVRRRRRPERLPRLYAGGGVRGQRHAEGAVRFHGERRV

SEQ ID NO: 7356 - DNA, 1693 bp, Zea mays subsp. mays
  misc_feature (1)..(1693): Ceres Seq. ID no. 13498349
  misc_feature: MA Experiment ID: 108504 Result: Down-regulated in Transcription
  misc_feature: MA Experiment 108504 PARAMETER Experiment Name: Zm_Drought_P Parameter: Age (day) Value: 8
  misc_feature: MA Experiment 108504 PARAMETER Experiment Name: Zm_Drought_P Parameter: Organism Value: Zea mays
  misc_feature: MA Experiment 108504 PARAMETER Experiment Name: Zm_Drought_P Parameter: Plant Line Value: 35A19
  misc_feature: MA Experiment 108504 PARAMETER Experiment Name: Zm_Drought_P Parameter: Timepoint (hr) Value: 12
  misc_feature: MA Experiment 108504 PARAMETER Experiment Name: Zm_Drought_P Parameter: Tissue Value: Aerial
  misc_feature: MA Experiment 108504 PARAMETER Experiment Name: Zm_Drought_P Parameter: Treatment Value: Drought vs. No Drought
  misc_feature: MA Experiment ID: 108528 Result: Up-regulated in Transcription
  misc_feature: MA Experiment 108528 PARAMETER Experiment Name: Zm_Imbibed_Seeds_P Parameter: Age (day) Value: 5 vs. 2
  misc_feature: MA Experiment 108528 PARAMETER Experiment Name: Zm_Imbibed_Seeds_P Parameter: Organism Value: Zea mays
  misc_feature: MA Experiment 108528 PARAMETER Experiment Name: Zm_Imbibed_Seeds_P Parameter: Plant Line Value: 35A19
  misc_feature: MA Experiment 108528 PARAMETER Experiment Name: Zm_Imbibed_Seeds_P Parameter: Tissue Value: Aerial vs. Embryo
  misc_feature: MA Experiment ID: 108529 Result: Up-regulated in Transcription
  misc_feature: MA Experiment 108529 PARAMETER Experiment Name: Zm_Imbibed_Seeds_P Parameter: Age (day) Value: 5 vs. 2
  misc_feature: MA Experiment 108529 PARAMETER Experiment Name: Zm_Imbibed_Seeds_P Parameter: Organism Value: Zea mays
  misc_feature: MA Experiment 108529 PARAMETER Experiment Name: Zm_Imbibed_Seeds_P Parameter: Plant Line Value: 35A19
  misc_feature: MA Experiment 108529 PARAMETER Experiment Name: Zm_Imbibed_Seeds_P Parameter: Tissue Value: Roots vs. Embryo
  misc_feature: MA Experiment ID: 108530 Result: Up-regulated in Transcription
  misc_feature: MA Experiment 108530 PARAMETER Experiment Name: Zm_Imbibed_Seeds_P Parameter: Age (day) Value: 6 vs. 2
  misc_feature: MA Experiment 108530 PARAMETER Experiment Name: Zm_Imbibed_Seeds_P Parameter: Organism Value: Zea mays
  misc_feature: MA Experiment 108530 PARAMETER Experiment Name: Zm_Imbibed_Seeds_P Parameter: Plant Line Value: 35A19
  misc_feature: MA Experiment 108530 PARAMETER Experiment Name: Zm_Imbibed_Seeds_P Parameter: Tissue Value: Aerial vs. Embryo
  misc_feature: MA Experiment ID: 108535 Result: Down-regulated in Transcription
  misc_feature: MA Experiment 108535 PARAMETER Experiment Name: Zm_Meristem_P Parameter: Age (day) Value: 8
  misc_feature: MA Experiment 108535 PARAMETER Experiment Name: Zm_Meristem_P Parameter: Organism Value: Zea mays
  misc_feature: MA Experiment 108535 PARAMETER Experiment Name: Zm_Meristem_P Parameter: Plant Line Value: 35A19
  misc_feature: MA Experiment 108535 PARAMETER Experiment Name: Zm_Meristem_P Parameter: Tissue Value: Root Meristem vs. Above Root Meristem
  misc_feature: MA Experiment ID: 108536 Result: Down-regulated in Transcription
  misc_feature: MA Experiment 108536 PARAMETER Experiment Name: Zm_Meristem_P Parameter: Age (day) Value: 8
  misc_feature: MA Experiment 108536 PARAMETER Experiment Name: Zm_Meristem_P Parameter: Organism Value: Zea mays
  misc_feature: MA Experiment 108536 PARAMETER Experiment Name: Zm_Meristem_P Parameter: Plant Line Value: 35A19
  misc_feature: MA Experiment 108536 PARAMETER Experiment Name: Zm_Meristem_P Parameter: Tissue Value: Shoot Meristem vs. Above Shoot Meristem
  misc_feature: MA Experiment ID: 108545 Result: Up-regulated in Transcription
  misc_feature: MA Experiment 108545 PARAMETER Experiment Name: Zm_Imbibed_Seeds_P Parameter: Age (day) Value: 3 vs. 2
  misc_feature: MA Experiment 108545 PARAMETER Experiment Name: Zm_Imbibed_Seeds_P Parameter: Organism Value: Zea mays
  misc_feature: MA Experiment 108545 PARAMETER Experiment Name: Zm_Imbibed_Seeds_P Parameter: Plant Line Value: 35A19
  misc_feature: MA Experiment 108545 PARAMETER Experiment Name: Zm_Imbibed_Seeds_P Parameter: Tissue Value: Aerial vs. Embryo
  misc_feature: MA Experiment ID: 108547 Result: Up-regulated in Transcription
  misc_feature: MA Experiment 108547 PARAMETER Experiment Name: Zm_Imbibed_Seeds_P Parameter: Age (day) Value: 4 vs. 2
  misc_feature: MA Experiment 108547 PARAMETER Experiment Name: Zm_Imbibed_Seeds_P Parameter: Organism Value: Zea mays
  misc_feature: MA Experiment 108547 PARAMETER Experiment Name: Zm_Imbibed_Seeds_P Parameter: Plant Line Value: 35A19
  misc_feature: MA Experiment 108547 PARAMETER Experiment Name: Zm_Imbibed_Seeds_P Parameter: Tissue Value: Aerial vs. Embryo
  misc_feature: MA Experiment ID: 108556 Result: Down-regulated in Transcription
  misc_feature: MA Experiment 108556 PARAMETER Experiment Name: Zm_Drought_P Parameter: Age (day) Value: 9
  misc_feature: MA Experiment 108556 PARAMETER Experiment Name: Zm_Drought_P Parameter: Organism Value: Zea mays
  misc_feature: MA Experiment 108556 PARAMETER Experiment Name: Zm_Drought_P Parameter: Plant Line Value: 35A19
  misc_feature: MA Experiment 108556 PARAMETER Experiment Name: Zm_Drought_P Parameter: Timepoint (hr) Value: 24
  misc_feature: MA Experiment 108556 PARAMETER Experiment Name: Zm_Drought_P Parameter: Tissue Value: Aerial
  misc_feature: MA Experiment 108556 PARAMETER Experiment Name: Zm_Drought_P Parameter: Treatment Value: Drought vs. No Drought
  misc_feature: MA Experiment ID: 108559 Result: Down-regulated in Transcription
  misc_feature: MA Experiment 108559 PARAMETER Experiment Name: Zm_5mM_NO_P Parameter: Age (day) Value: 8
  misc_feature: MA Experiment 108559 PARAMETER Experiment Name: Zm_5mM_NO_P Parameter: Organism Value: Zea mays
  misc_feature: MA Experiment 108559 PARAMETER Experiment Name: Zm_5mM_NO_P Parameter: Plant Line Value: 35A19
  misc_feature: MA Experiment 108559 PARAMETER Experiment Name: Zm_5mM_NO_P Parameter: Timepoint (hr) Value: 12
  misc_feature: MA Experiment 108559 PARAMETER Experiment Name: Zm_5mM_NO_P Parameter: Tissue Value: Aerial
  misc_feature: MA Experiment 108559 PARAMETER Experiment Name: Zm_5mM_NO_P Parameter: Treatment Value: 5mM NO vs. No Treatment
  misc_feature: MA Experiment ID: 20000479 Result: Down-regulated in Transcription
  misc_feature: MA Experiment 20000479 PARAMETER Experiment Name: Zm_Drought_P Parameter: Age (day) Value: 10
  misc_feature: MA Experiment 20000479 PARAMETER Experiment Name: Zm_Drought_P Parameter: Organism Value: Zea mays
  misc_feature: MA Experiment 20000479 PARAMETER Experiment Name: Zm_Drought_P Parameter: Plant Line Value: 35A19
  misc_feature: MA Experiment 20000479 PARAMETER Experiment Name: Zm_Drought_P Parameter: Timepoint (hr) Value: 48
  misc_feature: MA Experiment 20000479 PARAMETER Experiment Name: Zm_Drought_P Parameter: Tissue Value: Aerial
  misc_feature: MA Experiment 20000479 PARAMETER Experiment Name: Zm_Drought_P Parameter: Treatment Value: Drought vs. No Drought
  misc_feature: MA Experiment ID: 20000480 Result: Down-regulated in Transcription
  misc_feature: MA Experiment 20000480 PARAMETER Experiment Name: Zm_Drought_P Parameter: Age (day) Value: 11
  misc_feature: MA Experiment 20000480 PARAMETER Experiment Name: Zm_Drought_P Parameter: Organism Value: Zea mays
  misc_feature: MA Experiment 20000480 PARAMETER Experiment Name: Zm_Drought_P Parameter: Plant Line Value: 35A19
  misc_feature: MA Experiment 20000480 PARAMETER Experiment Name: Zm_Drought_P Parameter: Timepoint (hr) Value: 72
  misc_feature: MA Experiment 20000480 PARAMETER Experiment Name: Zm_Drought_P Parameter: Tissue Value: Aerial
  misc_feature: MA Experiment 20000480 PARAMETER Experiment Name: Zm_Drought_P Parameter: Treatment Value: Drought vs. No Drought
  misc_feature: MA Experiment ID: 20000487 Result: Down-regulated in Transcription
  misc_feature: MA Experiment 20000487 PARAMETER Experiment Name: Zm_50mM_NH4NO3_L_to_H_P Parameter: Organism Value: Zea mays
  misc_feature: MA Experiment 20000487 PARAMETER Experiment Name: Zm_50mM_NH4NO3_L_to_H_P Parameter: Timepoint (hr) Value: 4
  misc_feature: MA Experiment 20000487 PARAMETER Experiment Name: Zm_50mM_NH4NO3_L_to_H_P Parameter: Tissue Value: Leaves
  misc_feature: MA Experiment 20000487 PARAMETER Experiment Name: Zm_50mM_NH4NO3_L_to_H_P Parameter: Treatment Value: 50mM NH4NO3 vs. 100mM Mannitol
  misc_feature: MA Experiment ID: 20000492 Result: Down-regulated in Transcription
  misc_feature: MA Experiment 20000492 PARAMETER Experiment Name: Zm_Hybrid_Seed_Dev_P Parameter: DAP Value: 12
  misc_feature: MA Experiment 20000492 PARAMETER Experiment Name: Zm_Hybrid_Seed_Dev_P Parameter: Organism Value: Zea mays
  misc_feature: MA Experiment 20000492 PARAMETER Experiment Name: Zm_Hybrid_Seed_Dev_P Parameter: Plant Line Value: 35A19
  misc_feature: MA Experiment 20000492 PARAMETER Experiment Name: Zm_Hybrid_Seed_Dev_P Parameter: Tissue Value: Fert Kernel vs. Unfert Floret
  misc_feature: MA Experiment ID: 20000535 Result: Down-regulated in Transcription
  misc_feature: MA Experiment 20000535 PARAMETER Experiment Name: Zm_Hybrid_Seed_Dev_P Parameter: DAP Value: 30 vs. 12
  misc_feature: MA Experiment 20000535 PARAMETER Experiment Name: Zm_Hybrid_Seed_Dev_P Parameter: Organism Value: Zea mays
  misc_feature: MA Experiment 20000535 PARAMETER Experiment Name: Zm_Hybrid_Seed_Dev_P Parameter: Plant Line Value: 35A19
  misc_feature: MA Experiment 20000535 PARAMETER Experiment Name: Zm_Hybrid_Seed_Dev_P Parameter: Tissue Value: Embryo vs. Unfert Floret
  misc_feature: MA Experiment ID: 20001613 Result: Down-regulated in Transcription
  misc_feature: MA Experiment 20001613 PARAMETER Experiment Name: Zm_50ppm_KNO3_L-to-H_P Parameter: Age (day) Value: 20
  misc_feature: MA Experiment 20001613 PARAMETER Experiment Name: Zm_50ppm_KNO3_L-to-H_P Parameter: Organism Value: Zea mays
  misc_feature: MA Experiment 20001613 PARAMETER Experiment Name: Zm_50ppm_KNO3_L-to-H_P Parameter: Plant Line Value: 35A19
  misc_feature: MA Experiment 20001613 PARAMETER Experiment Name: Zm_50ppm_KNO3_L-to-H_P Parameter: Timepoint (hr) Value: 24
  misc_feature: MA Experiment 20001613 PARAMETER Experiment Name: Zm_50ppm_KNO3_L-to-H_P Parameter: Tissue Value: Roots
  misc_feature: MA Experiment 20001613 PARAMETER Experiment Name: Zm_50ppm_KNO3_L-to-H_P Parameter: Treatment Value: 50ppm KNO3 vs. 50ppm KCl
  misc_feature: MA Experiment ID: 20001614 Result: Down-regulated in Transcription
  misc_feature: MA Experiment 20001614 PARAMETER Experiment Name: Zm_50ppm_KNO3_L-to-H_P Parameter: Age (day) Value: 21
  misc_feature: MA Experiment 20001614 PARAMETER Experiment Name: Zm_50ppm_KNO3_L-to-H_P Parameter: Organism Value: Zea mays
  misc_feature: MA Experiment 20001614 PARAMETER Experiment Name: Zm_50ppm_KNO3_L-to-H_P Parameter: Plant Line Value: 35A19
  misc_feature: MA Experiment 20001614 PARAMETER Experiment Name: Zm_50ppm_KNO3_L-to-H_P Parameter: Timepoint (hr) Value: 48
  misc_feature: MA Experiment 20001614 PARAMETER Experiment Name: Zm_50ppm_KNO3_L-to-H_P Parameter: Tissue Value: Roots
  misc_feature: MA Experiment 20001614 PARAMETER Experiment Name: Zm_50ppm_KNO3_L-to-H_P Parameter: Treatment Value: 50ppm KNO3 vs. 50ppm KCl
actcactcatagaggccgtcaggccagtcgccctcgcccagtagtaggctagtagcgacgggcgacggtggagatcgtgcgaggctgtgtactacctgtacgcctccatcgtcgcctcgcaccatcaatcctgtgcggtgccagatcctccccgggtcttgtcttgtcgcaggtggaagccatgtccgccgcggacgcagccggcggcaaggaggcggcgccggcgtgcgactcctgcacgggcatgccggcggtggtgtactgccgggccgactccgcgaggctgtgcctgcagtgcgaccgccacgtgcacggcgccaacaccgtgtccacccgccacgcccgggcgccgctctgcgccgggtgccacgcagccgctgccgctgccgccacgccggccgcttcctctgcgccagctgccgcttgggggaggagaaggatgagcgggacggcggtggcgccgccgacagtagtagcgacgacggtggcgcggtggaagggtacgccgggtgcccctcggtcgccgatctcgcgaccatcctgggcgccggctccgcgtgggaggagccccagacgctccgcttggagagccggagctccggcggcgagctggctgacgaggtcatccgccagctggtggagctcgccaggtcggaggcggcggctcgcgctgagatggagcagcttactccatggccgtcgccggagcttgctgccattactggacagtacgccgacttcggggctctcgacgctgacaccgcctggcatgatgatgcagcagccatcgcggcagcagtagtgccttccactgaggaggagcagcaagcgtggatcgcggccggctgcgacgtcggcgcgtgccggacggaggagaaggcgcgcgagaacgacgctgctctggccgagccgtgtctgtcctcgttcgtggagatgtcagagatctgccccgccagcgtcgtcggtcaccctcagccacggcggggacgagggcgtcgacagcagcggcaagacagccccgcggccgcagctggccgcgccgacgccggcgaagggcggctacgacgtggcctaccccgaccgcggcacggtgatctcgcgctacaaggagaagcggaagaacaggaggttcgacaagcagatccggtacgagtcgcgcaaggcccgcgccgacggccggatgcggatcaaggggcggttcgccaagtccggcgaggtctgagacgcgtgcgggcgctcacgccatgccaacggcaacgagctggtagggggaccgtgcgtgtgtttcacgtgggtggttaggtttggtattttggttggtgttgcagctcgctgctcgcacgtgtcgatgcgtactagtctacgttgattagagacggttgtctactctttcctcattcgtttaataaaacacggctccaccaccaatgcaagtttcaccccgatcgattggaagcgtgtgtttacgtggagaactcgctaagttagatgtcgtttggtaatgtaatagataaccgatattgttaaattatatttgtttaggtttaattataattaataatatactagaaatagataccggcttattcgaacttgttactgccggtattcgagagtgaatcattaccattattatttaagttgtatttcgtgaatcaaacgacacattagtttctagtcaaatttgttattc

SEQ ID NO: 7357 - protein, 208 aa, Zea mays subsp. mays
  peptide (1)..(208): Ceres Seq. ID no. 13498350
  misc_feature (1)..(91): Homolog of NCBI NO: 34899270 NR Description: putative zinc-finger protein [Oryza sativa
  misc_feature (1)..(11): Homolog of NCBI NO: 34899270 NR Description: putative zinc-finger protein [Oryza sativa
  misc_feature (1)..(93): Homolog of NCBI NO: 7522220 NR Description: zinc-finger protein C60910 [imported] - rice
  misc_feature (1)..(91): Homolog of NCBI NO: 34899270 NR Description: putative zinc-finger protein [Oryza sativa
  misc_feature (1)..(11): Homolog of NCBI NO: 34899270 NR Description: putative zinc-finger protein [Oryza sativa
  misc_feature (1)..(93): Homolog of NCBI NO: 7522220 NR Description: zinc-finger protein C60910 [imported] - rice
MEQLTPWPSPELAAITGQYADFGALDADTAWHDDAAAIAAAVVPSTEEEQQAWIAAGCDVGACRTEEKARENDAALAEPCLSSFVEMSEICPASVVGHPQPRRGRGRRQQRQDSPAAAAGRADAGEGRLRRGLPRPRHGDLALQGEAEEQEVRQADPVRVAQGPRRRPDADQGAVRQVRRGLRRVRALTPCQRQRAGRGTVRVFHVGG

SEQ ID NO: 7358 - protein, 206 aa, Zea mays subsp. mays
  peptide (1)..(206): Ceres Seq. ID no. 13498351
  misc_feature (12)..(58): Pfam Name: B-box zinc finger Pfam Description: B-box zinc finger
  misc_feature (12)..(58): Pfam Name: B-box zinc finger Pfam Description: B-box zinc finger
  misc_feature (3)..(69): Homolog of NCBI NO: 34899270 NR Description: putative zinc-finger protein [Oryza sativa
  misc_feature (1)..(111): Homolog of NCBI NO: 7522220 NR Description: zinc-finger protein C60910 [imported] - rice
  misc_feature (9)..(79): Homolog of NCBI NO: 38175538 NR Description: zinc-finger protein C60910-like [Oryza sativa
  misc_feature (11)..(62): Homolog of NCBI NO: 30685731 NR Description: CONSTANS B-box zinc finger family protein
  misc_feature (1)..(102): Homolog of NCBI NO: 34898680 NR Description: Hd1 [Oryza sativa (japonica cultivar-group)]
  misc_feature (1)..(111): Homolog of NCBI NO: 7522220 NR Description: zinc-finger protein C60910 [imported] - rice
  misc_feature (11)..(62): Homolog of NCBI NO: 30685731 NR Description: CONSTANS B-box zinc finger family protein
  misc_feature (8)..(85): Homolog of NCBI NO: 21667483 NR Description: CONSTANS-like protein [Hordeum vulgare subsp.
  misc_feature (8)..(85): Homolog of NCBI NO: 21667479 NR Description: CONSTANS-like protein [Hordeum vulgare subsp.
  misc_feature (16)..(68): Homolog of NCBI NO: 7489605 NR Description: zinc-finger protein S3574 [imported] - rice
  misc_feature (16)..(111): Homolog of NCBI NO: 15231491 NR Description: CONSTANS B-box zinc finger family protein
  misc_feature (1)..(81): Homolog of NCBI NO: 11094209 NR Description: allele:Hd1 [Oryza sativa]
  misc_feature (1)..(102): Homolog of NCBI NO: 34898680 NR Description: Hd1 [Oryza sativa (japonica cultivar-group)]
  misc_feature (9)..(79): Homolog of NCBI NO: 38175538 NR Description: zinc-finger protein C60910-like [Oryza sativa
  misc_feature (3)..(69): Homolog of NCBI NO: 34899270 NR Description: putative zinc-finger protein [Oryza sativa
  misc_feature (1)..(81): Homolog of NCBI NO: 11094209 NR Description: allele:Hd1 [Oryza sativa]
  misc_feature (16)..(111): Homolog of NCBI NO: 15231491 NR Description: CONSTANS B-box zinc finger family protein
  misc_feature (16)..(68): Homolog of NCBI NO: 7489605 NR Description: zinc-finger protein S3574 [imported] - rice
  misc_feature (8)..(85): Homolog of NCBI NO: 21667479 NR Description: CONSTANS-like protein [Hordeum vulgare subsp.
  misc_feature (8)..(85): Homolog of NCBI NO: 21667483 NR Description: CONSTANS-like protein [Hordeum vulgare subsp.
MSAADAAGGKEAAPACDSCTGMPAVVYCRADSARLCLQCDRHVHGANTVSTRHARAPLCAGCHAAAAAAATPAASSAPAAAWGRRRMSGTAVAPPTVVATTVARWKGTPGAPRSPISRPSWAPAPRGRSPRRSAWRAGAPAASWLTRSSASWWSSPGRRRRLALRWSSLLHGRRRSLLPLLDSTPTSGLSTLTPPGMMMQQPSRQQ

SEQ ID NO: 7359 - protein, 185 aa, Zea mays subsp. mays
  peptide (1)..(185): Ceres Seq. ID no. 13498352
  misc_feature (1)..(37): Pfam Name: B-box zinc finger Pfam Description: B-box zinc finger
  misc_feature (1)..(37): Pfam Name: B-box zinc finger Pfam Description: B-box zinc finger
  misc_feature (1)..(48): Homolog of NCBI NO: 34899270 NR Description: putative zinc-finger protein [Oryza sativa
  misc_feature (1)..(90): Homolog of NCBI NO: 7522220 NR Description: zinc-finger protein C60910 [imported] - rice
  misc_feature (1)..(58): Homolog of NCBI NO: 38175538 NR Description: zinc-finger protein C60910-like [Oryza sativa
  misc_feature (1)..(41): Homolog of NCBI NO: 30685731 NR Description: CONSTANS B-box zinc finger family protein
  misc_feature (1)..(81): Homolog of NCBI NO: 34898680 NR Description: Hd1 [Oryza sativa (japonica cultivar-group)]
  misc_feature (1)..(90): Homolog of NCBI NO: 7522220 NR Description: zinc-finger protein C60910 [imported] - rice
  misc_feature (1)..(41): Homolog of NCBI NO: 30685731 NR Description: CONSTANS B-box zinc finger family protein
  misc_feature (1)..(64): Homolog of NCBI NO: 21667483 NR Description: CONSTANS-like protein [Hordeum vulgare subsp.
  misc_feature (1)..(64): Homolog of NCBI NO: 21667479 NR Description: CONSTANS-like protein [Hordeum vulgare subsp.
  misc_feature (1)..(47): Homolog of NCBI NO: 7489605 NR Description: zinc-finger protein S3574 [imported] - rice
  misc_feature (1)..(90): Homolog of NCBI NO: 15231491 NR Description: CONSTANS B-box zinc finger family protein
  misc_feature (1)..(60): Homolog of NCBI NO: 11094209 NR Description: allele:Hd1 [Oryza sativa]
  misc_feature (1)..(81): Homolog of NCBI NO: 34898680 NR Description: Hd1 [Oryza sativa (japonica cultivar-group)]
  misc_feature (1)..(58): Homolog of NCBI NO: 38175538 NR Description: zinc-finger protein C60910-like [Oryza sativa
  misc_feature (1)..(48): Homolog of NCBI NO: 34899270 NR Description: putative zinc-finger protein [Oryza sativa
  misc_feature (1)..(60): Homolog of NCBI NO: 11094209 NR Description: allele:Hd1 [Oryza sativa]
  misc_feature (1)..(90): Homolog of NCBI NO: 15231491 NR Description: CONSTANS B-box zinc finger family protein
  misc_feature (1)..(47): Homolog of NCBI NO: 7489605 NR Description: zinc-finger protein S3574 [imported] - rice
  misc_feature (1)..(64): Homolog of NCBI NO: 21667479 NR Description: CONSTANS-like protein [Hordeum vulgare subsp.
  misc_feature (1)..(64): Homolog of NCBI NO: 21667483 NR Description: CONSTANS-like protein [Hordeum vulgare subsp.
MPAVVYCRADSARLCLQCDRHVHGANTVSTRHARAPLCAGCHAAAAAAATPAASSAPAAAWGRRRMSGTAVAPPTVVATTVARWKGTPGAPRSPISRPSWAPAPRGRSPRRSAWRAGAPAASWLTRSSASWWSSPGRRRRLALRWSSLLHGRRRSLLPLLDSTPTSGLSTLTPPGMMMQQPSRQQ

SEQ ID NO: 7360 - DNA, 1706 bp, Zea mays subsp. mays; identical to SEQ ID NO: 2601
  misc_feature (1)..(1706): Ceres Seq. ID no. 12408837
  misc_feature: MA Experiment ID: 108504 Result: Down-regulated in Transcription
  misc_feature: MA Experiment 108504 PARAMETER Experiment Name: Zm_Drought_P Parameter: Age (day) Value: 8
  misc_feature: MA Experiment 108504 PARAMETER Experiment Name: Zm_Drought_P Parameter: Organism Value: Zea mays
  misc_feature: MA Experiment 108504 PARAMETER Experiment Name: Zm_Drought_P Parameter: Plant Line Value: 35A19
  misc_feature: MA Experiment 108504 PARAMETER Experiment Name: Zm_Drought_P Parameter: Timepoint (hr) Value: 12
  misc_feature: MA Experiment 108504 PARAMETER Experiment Name: Zm_Drought_P Parameter: Tissue Value: Aerial
  misc_feature: MA Experiment 108504 PARAMETER Experiment Name: Zm_Drought_P Parameter: Treatment Value: Drought vs. No Drought
  misc_feature: MA Experiment ID: 108527 Result: Down-regulated in Transcription
  misc_feature: MA Experiment 108527 PARAMETER Experiment Name: Zm_5mM_NO_P Parameter: Age (day) Value: 8
  misc_feature: MA Experiment 108527 PARAMETER Experiment Name: Zm_5mM_NO_P Parameter: Organism Value: Zea mays
  misc_feature: MA Experiment 108527 PARAMETER Experiment Name: Zm_5mM_NO_P Parameter: Plant Line Value: 35A19
  misc_feature: MA Experiment 108527 PARAMETER Experiment Name: Zm_5mM_NO_P Parameter: Timepoint (hr) Value: 6
  misc_feature: MA Experiment 108527 PARAMETER Experiment Name: Zm_5mM_NO_P Parameter: Tissue Value: Aerial
  misc_feature: MA Experiment 108527 PARAMETER Experiment Name: Zm_5mM_NO_P Parameter: Treatment Value: 5mM NO vs. No Treatment
  misc_feature: MA Experiment ID: 108528 Result: Up-regulated in Transcription
  misc_feature: MA Experiment 108528 PARAMETER Experiment Name: Zm_Imbibed_Seeds_P Parameter: Age (day) Value: 5 vs. 2
  misc_feature: MA Experiment 108528 PARAMETER Experiment Name: Zm_Imbibed_Seeds_P Parameter: Organism Value: Zea mays
  misc_feature: MA Experiment 108528 PARAMETER Experiment Name: Zm_Imbibed_Seeds_P Parameter: Plant Line Value: 35A19
  misc_feature: MA Experiment 108528 PARAMETER Experiment Name: Zm_Imbibed_Seeds_P Parameter: Tissue Value: Aerial vs. Embryo
  misc_feature: MA Experiment ID: 108530 Result: Up-regulated in Transcription
  misc_feature: MA Experiment 108530 PARAMETER Experiment Name: Zm_Imbibed_Seeds_P Parameter: Age (day) Value: 6 vs. 2
  misc_feature: MA Experiment 108530 PARAMETER Experiment Name: Zm_Imbibed_Seeds_P Parameter: Organism Value: Zea mays
  misc_feature: MA Experiment 108530 PARAMETER Experiment Name: Zm_Imbibed_Seeds_P Parameter: Plant Line Value: 35A19
  misc_feature: MA Experiment 108530 PARAMETER Experiment Name: Zm_Imbibed_Seeds_P Parameter: Tissue Value: Aerial vs. Embryo
  misc_feature: MA Experiment ID: 108536 Result: Down-regulated in Transcription
  misc_feature: MA Experiment 108536 PARAMETER Experiment Name: Zm_Meristem_P Parameter: Age (day) Value: 8
  misc_feature: MA Experiment 108536 PARAMETER Experiment Name: Zm_Meristem_P Parameter: Organism Value: Zea mays
  misc_feature: MA Experiment 108536 PARAMETER Experiment Name: Zm_Meristem_P Parameter: Plant Line Value: 35A19
  misc_feature: MA Experiment 108536 PARAMETER Experiment Name: Zm_Meristem_P Parameter: Tissue Value: Shoot Meristem vs. Above Shoot Meristem
  misc_feature: MA Experiment ID: 108543 Result: Up-regulated in Transcription
  misc_feature: MA Experiment ID: 108545 Result: Up-regulated in Transcription
  misc_feature: MA Experiment 108545 PARAMETER Experiment Name: Zm_Imbibed_Seeds_P Parameter: Age (day) Value: 3 vs. 2
  misc_feature: MA Experiment 108545 PARAMETER Experiment Name: Zm_Imbibed_Seeds_P Parameter: Organism Value: Zea mays
  misc_feature: MA Experiment 108545 PARAMETER Experiment Name: Zm_Imbibed_Seeds_P Parameter: Plant Line Value: 35A19
  misc_feature: MA Experiment 108545 PARAMETER Experiment Name: Zm_Imbibed_Seeds_P Parameter: Tissue Value: Aerial vs. Embryo
  misc_feature: MA Experiment ID: 108556 Result: Down-regulated in Transcription
  misc_feature: MA Experiment 108556 PARAMETER Experiment Name: Zm_Drought_P Parameter: Age (day) Value: 9
  misc_feature: MA Experiment 108556 PARAMETER Experiment Name: Zm_Drought_P Parameter: Organism Value: Zea mays
  misc_feature: MA Experiment 108556 PARAMETER Experiment Name: Zm_Drought_P Parameter: Plant Line Value: 35A19
  misc_feature: MA Experiment 108556 PARAMETER Experiment Name: Zm_Drought_P Parameter: Timepoint (hr) Value: 24
  misc_feature: MA Experiment 108556 PARAMETER Experiment Name: Zm_Drought_P Parameter: Tissue Value: Aerial
  misc_feature: MA Experiment 108556 PARAMETER Experiment Name: Zm_Drought_P Parameter: Treatment Value: Drought vs. No Drought
  misc_feature: MA Experiment ID: 108559 Result: Down-regulated in Transcription
  misc_feature: MA Experiment 108559 PARAMETER Experiment Name: Zm_5mM_NO_P Parameter: Age (day) Value: 8
  misc_feature: MA Experiment 108559 PARAMETER Experiment Name: Zm_5mM_NO_P Parameter: Organism Value: Zea mays
  misc_feature: MA Experiment 108559 PARAMETER Experiment Name: Zm_5mM_NO_P Parameter: Plant Line Value: 35A19
  misc_feature: MA Experiment 108559 PARAMETER Experiment Name: Zm_5mM_NO_P Parameter: Timepoint (hr) Value: 12
  misc_feature: MA Experiment 108559 PARAMETER Experiment Name: Zm_5mM_NO_P Parameter: Tissue Value: Aerial
  misc_feature: MA Experiment 108559 PARAMETER Experiment Name: Zm_5mM_NO_P Parameter: Treatment Value: 5mM NO vs. No Treatment
  misc_feature: MA Experiment ID: 108687 Result: Down-regulated in Transcription
  misc_feature: MA Experiment 108687 PARAMETER Experiment Name: Zm_Embryos-Flowers__P Parameter: Tissue Value: Embryo vs. Aerial+
  misc_feature: MA Experiment ID: 108688 Result: Down-regulated in Transcription
  misc_feature: MA Experiment 108688 PARAMETER Experiment Name: Zm_Embryos-Flowers__P Parameter: Tissue Value: Immature Flowers vs. Aerial+
  misc_feature: MA Experiment ID: 108689 Result: Down-regulated in Transcription
  misc_feature: MA Experiment 108689 PARAMETER Experiment Name: Zm_Drought_Roots_P Parameter: Age (day) Value: 9
  misc_feature: MA Experiment 108689 PARAMETER Experiment Name: Zm_Drought_Roots_P Parameter: Organism Value: Zea mays
  misc_feature: MA Experiment 108689 PARAMETER Experiment Name: Zm_Drought_Roots_P Parameter: Plant Line Value: 35A19
  misc_feature: MA Experiment 108689 PARAMETER Experiment Name: Zm_Drought_Roots_P Parameter: Timepoint (hr) Value: 24
  misc_feature: MA Experiment 108689 PARAMETER Experiment Name: Zm_Drought_Roots_P Parameter: Tissue Value: Roots
  misc_feature: MA Experiment 108689 PARAMETER Experiment Name: Zm_Drought_Roots_P Parameter: Treatment Value: Drought vs. No Drought
  misc_feature: MA Experiment ID: 20000479 Result: Down-regulated in Transcription
  misc_feature: MA Experiment 20000479 PARAMETER Experiment Name: Zm_Drought_P Parameter: Age (day) Value: 10
  misc_feature: MA Experiment 20000479 PARAMETER Experiment Name: Zm_Drought_P Parameter: Organism Value: Zea mays
  misc_feature: MA Experiment 20000479 PARAMETER Experiment Name: Zm_Drought_P Parameter: Plant Line Value: 35A19
  misc_feature: MA Experiment 20000479 PARAMETER Experiment Name: Zm_Drought_P Parameter: Timepoint (hr) Value: 48
  misc_feature: MA Experiment 20000479 PARAMETER Experiment Name: Zm_Drought_P Parameter: Tissue Value: Aerial
  misc_feature: MA Experiment 20000479 PARAMETER Experiment Name: Zm_Drought_P Parameter: Treatment Value: Drought vs. No Drought
  misc_feature: MA Experiment ID: 20000480 Result: Down-regulated in Transcription
  misc_feature: MA Experiment 20000480 PARAMETER Experiment Name: Zm_Drought_P Parameter: Age (day) Value: 11
  misc_feature: MA Experiment 20000480 PARAMETER Experiment Name: Zm_Drought_P Parameter: Organism Value: Zea mays
  misc_feature: MA Experiment 20000480 PARAMETER Experiment Name: Zm_Drought_P Parameter: Plant Line Value: 35A19
  misc_feature: MA Experiment 20000480 PARAMETER Experiment Name: Zm_Drought_P Parameter: Timepoint (hr) Value: 72
  misc_feature: MA Experiment 20000480 PARAMETER Experiment Name: Zm_Drought_P Parameter: Tissue Value: Aerial
  misc_feature: MA Experiment 20000480 PARAMETER Experiment Name: Zm_Drought_P Parameter: Treatment Value: Drought vs. No Drought
  misc_feature: MA Experiment ID: 20000492 Result: Down-regulated in Transcription
  misc_feature: MA Experiment 20000492 PARAMETER Experiment Name: Zm_Hybrid_Seed_Dev_P Parameter: DAP Value: 12
  misc_feature: MA Experiment 20000492 PARAMETER Experiment Name: Zm_Hybrid_Seed_Dev_P Parameter: Organism Value: Zea mays
  misc_feature: MA Experiment 20000492 PARAMETER Experiment Name: Zm_Hybrid_Seed_Dev_P Parameter: Plant Line Value: 35A19
  misc_feature: MA Experiment 20000492 PARAMETER Experiment Name: Zm_Hybrid_Seed_Dev_P Parameter: Tissue Value: Fert Kernel vs. Unfert Floret
  misc_feature: MA Experiment ID: 20000535 Result: Down-regulated in Transcription
  misc_feature: MA Experiment 20000535 PARAMETER Experiment Name: Zm_Hybrid_Seed_Dev_P Parameter: DAP Value: 30 vs. 12
  misc_feature: MA Experiment 20000535 PARAMETER Experiment Name: Zm_Hybrid_Seed_Dev_P Parameter: Organism Value: Zea mays
  misc_feature: MA Experiment 20000535 PARAMETER Experiment Name: Zm_Hybrid_Seed_Dev_P Parameter: Plant Line Value: 35A19
  misc_feature: MA Experiment 20000535 PARAMETER Experiment Name: Zm_Hybrid_Seed_Dev_P Parameter: Tissue Value: Embryo vs. Unfert Floret

SEQ ID NO: 7361 - protein, 409 aa, Zea mays subsp. mays; identical to SEQ ID NO: 2602
  peptide (1)..(409): Ceres Seq. ID no. 12408838
  misc_feature (1)..(409): Homolog of NCBI NO: 1352200 NR Description: TRIOSE PHOSPHATE/PHOSPHATE TRANSLOCATOR,
  misc_feature (1)..(409): Homolog of NCBI NO: 13195734 NR Description: triose phosphate translocator [Triticum aestivum]
  misc_feature (1)..(409): Homolog of NCBI NO: 13518113 NR Description: triose phosphate/phosphate translocator [Oryza
  misc_feature (11)..(409): Homolog of NCBI NO: 9295273 NR Description: triose phosphate/phosphate translocator precursor
  misc_feature (10)..(409): Homolog of NCBI NO: 629694 NR Description: phosphate translocator, chloroplast - common >gi|403023|emb|CAA52979.1| phosphate translocator [Nicotiana
  misc_feature (7)..(409): Homolog of NCBI NO: 1352199 NR Description: Triose phosphate/phosphate translocator,
  misc_feature (12)..(406): Homolog of NCBI NO: 117291 NR Description: TRIOSE PHOSPHATE/PHOSPHATE TRANSLOCATOR,
  misc_feature (12)..(406): Homolog of NCBI NO: 21593093 NR Description: phosphate/triose-phosphate translocator precursor
  misc_feature (12)..(408): Homolog of NCBI NO: 9757731 NR Description: phosphate/triose-phosphate translocator precursor
  misc_feature (79)..(397): Homolog of NCBI NO: 18423670 NR Description: glucose-6-phosphate/phosphate translocator; id: At5g54800.1, supported by cDNA: 26107., supported by cDNA: supported by cDNA: gi_7229674 [Arabidopsis thaliana]

SEQ ID NO: 7362 - protein, 296 aa, Zea mays subsp. mays; identical to SEQ ID NO: 2603
  peptide (1)..(296): Ceres Seq. ID no. 12408839
  misc_feature (1)..(296): Homolog of NCBI NO: 1352200 NR Description: TRIOSE PHOSPHATE/PHOSPHATE TRANSLOCATOR,
  misc_feature (1)..(296): Homolog of NCBI NO: 13195734 NR Description: triose phosphate translocator [Triticum aestivum]
  misc_feature (1)..(296): Homolog of NCBI NO: 13518113 NR Description: triose phosphate/phosphate translocator [Oryza
  misc_feature (1)..(296): Homolog of NCBI NO: 9295273 NR Description: triose phosphate/phosphate translocator precursor
  misc_feature (1)..(296): Homolog of NCBI NO: 629694 NR Description: phosphate translocator, chloroplast - common >gi|403023|emb|CAA52979.1| phosphate translocator [Nicotiana
  misc_feature (1)..(296): Homolog of NCBI NO: 1352199 NR Description: Triose phosphate/phosphate translocator,
  misc_feature (1)..(293): Homolog of NCBI NO: 117291 NR Description: TRIOSE PHOSPHATE/PHOSPHATE TRANSLOCATOR,
  misc_feature (1)..(293): Homolog of NCBI NO: 21593093 NR Description: phosphate/triose-phosphate translocator precursor
  misc_feature (1)..(295): Homolog of NCBI NO: 9757731 NR Description: phosphate/triose-phosphate translocator precursor
  misc_feature (1)..(284): Homolog of NCBI NO: 18423670 NR Description: glucose-6-phosphate/phosphate translocator; id: At5g54800.1, supported by cDNA: 26107., supported by cDNA: supported by cDNA: gi_7229674 [Arabidopsis thaliana]

SEQ ID NO: 7363 - DNA, 1395 bp, Zea mays subsp. mays
  misc_feature (1)..(1395): Ceres Seq. ID no. 12408833
  misc_feature: MA Experiment ID: 108527 Result: Up-regulated in Transcription
  misc_feature: MA Experiment 108527 PARAMETER Experiment Name: Zm_5mM_NO_P Parameter: Age (day) Value: 8
  misc_feature: MA Experiment 108527 PARAMETER Experiment Name: Zm_5mM_NO_P Parameter: Organism Value: Zea mays
  misc_feature: MA Experiment 108527 PARAMETER Experiment Name: Zm_5mM_NO_P Parameter: Plant Line Value: 35A19
  misc_feature: MA Experiment 108527 PARAMETER Experiment Name: Zm_5mM_NO_P Parameter: Timepoint (hr) Value: 6
  misc_feature: MA Experiment 108527 PARAMETER Experiment Name: Zm_5mM_NO_P Parameter: Tissue Value: Aerial
  misc_feature: MA Experiment 108527 PARAMETER Experiment Name: Zm_5mM_NO_P Parameter: Treatment Value: 5mM NO vs. No Treatment
  misc_feature: MA Experiment ID: 108559 Result: Up-regulated in Transcription
  misc_feature: MA Experiment 108559 PARAMETER Experiment Name: Zm_5mM_NO_P Parameter: Age (day) Value: 8
  misc_feature: MA Experiment 108559 PARAMETER Experiment Name: Zm_5mM_NO_P Parameter: Organism Value: Zea mays
  misc_feature: MA Experiment 108559 PARAMETER Experiment Name: Zm_5mM_NO_P Parameter: Plant Line Value: 35A19
  misc_feature: MA Experiment 108559 PARAMETER Experiment Name: Zm_5mM_NO_P Parameter: Timepoint (hr) Value: 12
  misc_feature: MA Experiment 108559 PARAMETER Experiment Name: Zm_5mM_NO_P Parameter: Tissue Value: Aerial
  misc_feature: MA Experiment 108559 PARAMETER Experiment Name: Zm_5mM_NO_P Parameter: Treatment Value: 5mM NO vs. No Treatment
  misc_feature: MA Experiment ID: 20000477 Result: Up-regulated in Transcription
  misc_feature: MA Experiment 20000477 PARAMETER Experiment Name: Zm_5mM_SA_P Parameter: Age (day) Value: 10
  misc_feature: MA Experiment 20000477 PARAMETER Experiment Name: Zm_5mM_SA_P Parameter: Organism Value: Zea mays
  misc_feature: MA Experiment 20000477 PARAMETER Experiment Name: Zm_5mM_SA_P Parameter: Plant Line Value: 35A19
  misc_feature: MA Experiment 20000477 PARAMETER Experiment Name: Zm_5mM_SA_P Parameter: Timepoint (hr) Value: 48
  misc_feature: MA Experiment 20000477 PARAMETER Experiment Name: Zm_5mM_SA_P Parameter: Tissue Value: Aerial
  misc_feature: MA Experiment 20000477 PARAMETER Experiment Name: Zm_5mM_SA_P Parameter: Treatment Value: 5mM SA vs. No Treatment
aaataggtagatgatgccgctaacagtaacacagagtaaaagactccaattttcccacggctactgaatcacggatgcttaaatctccccaatccgtatctctgtttccctcacagcgcggctgcctataaccactccaggtctccagcgaagcaggctcaggcgcaacgcaacaacacaaggcggcggttatggcctctgctgctgcgacggctacgatggggacggggaaggtggtgtgcgtcaccggcgcatcagggtacatcgcgtcctggattgtcaggctcctcctcgaccgcggctacaccgtccgcgccaccgtgcgagacaccgctgacccaaagaaaacattgcacctgactgcgttggatggtgctaaggataggctgcacttatttaaagctagcctgctagaagagggttctttcgatgctgcagttcatggatgcgacactgtatttcatactgcctctcccttttatcacaatgtcaaggatgctaaggcagagttacttgacccagcagttaagggaacactcaatgttctcggttcatgcaagaaagcttctattaaaaaggtggttgtaacatcatctatggctgctgtagcctacaacgggaggccaaggactcctgaggtcacagttgacgagacatggttttctgatccacaaatttgtgaaacaaatcagcaatggtatattttgtccaagacgctggcagaggaggctgcttggaagttctcaagggataatggacttgaaatcgttactataaacccagcgatggttattggtcccctgctgcagcctacactaaataccagtgctgaagcaatcctgaagttaatcaatgggtcatcgtctacatatcccaatttttgctttggatgggttaatgtcaaggatgttgccctggcccatatccttgcatacgaggttccctcatcaaatggaaggtactgcatggtggaaagagttgttcactactcagaactggtgaacattatccgcaacatgtatcctacccttcctcttccggacaagtgtgcagatgacaagccgtttgtcccaccctaccaagtatcaaaggagaagataaaaagcataggcatcgagttgattccactggagacgagcgtcaaggagaccatcgaaagcttgaaagagaaggggttcgctagtttttgactcgtgcaagctgtgaaacagaagtgttactgtactacgtgatgttgcattgtacacatgcatcggacttcgcagttcccaagctattttggtagctttggtctgtaagattacctaaaataaactgagccacgttgccacgctgtagcttttgtacatgttatgctttgatcggattgagacacgtgatatatggtcgttgctt

SEQ ID NO: 7364 - protein, 332 aa, Zea mays subsp. mays
  peptide (1)..(332): Ceres Seq. ID no. 12408834
  misc_feature (14)..(306): Pfam Name: 3-beta hydroxysteroid dehydrogenase/isomerase family Pfam Description: 3-beta hydroxysteroid dehydrogenase/isomerase
  misc_feature (1)..(332): Homolog of NCBI NO: 34913420 NR Description: putative cinnamyl-alcohol dehydrogenase [Oryza
  misc_feature (8)..(332): Homolog of NCBI NO: 15239741 NR Description: cinnamyl-alcohol dehydrogenase - like protein;
  misc_feature (8)..(332): Homolog of NCBI NO: 21594240 NR Description: cinnamyl-alcohol dehydrogenase-like protein
  misc_feature (11)..(332): Homolog of NCBI NO: 7488627 NR Description: probable cinnamyl-alcohol dehydrogenase (EC - apple tree >gi|2981475|gb|AAC06319.1| putative cinnamyl alcohol
  misc_feature (7)..(332): Homolog of NCBI NO: 7431409 NR Description: cinnamyl-alcohol dehydrogenase (EC 1.1.1.195) - tree >gi|1143445|emb|CAA61275.1| cinnamyl alcohol dehydrogenase
  misc_feature (11)..(332): Homolog of NCBI NO: 37029996 NR Description: NADPH-dependent cinnamyl alcohol dehydrogenase
  misc_feature (14)..(332): Homolog of NCBI NO: 25405464 NR Description: hypothetical protein F5D21.12 [imported] - thaliana >gi|12325359|gb|AAG52618.1|AC024261_5 cinnamyl alcohol
  misc_feature (14)..(332): Homolog of NCBI NO: 30694964 NR Description: cinnamyl-alcohol dehydrogenase (CAD), putative
  misc_feature (11)..(332): Homolog of NCBI NO: 7431406 NR Description: probable cinnamyl-alcohol dehydrogenase (EC
  misc_feature (13)..(329): Homolog of NCBI NO: 5852203 NR Description: aldehyde reductase [Vigna radiata]
MASAAATATMGTGKVVCVTGASGYIASWIVRLLLDRGYTVRATVRDTADPKKTLHLTALDGAKDRLHLFKASLLEEGSFDAAVHGCDTVFHTASPFYHNVKDAKAELLDPAVKGTLNVLGSCKKASIKKVVVTSSMAAVAYNGRPRTPEVTVDETWFSDPQICETNQQWYILSKTLAEEAAWKFSRDNGLEIVTINPAMVIGPLLQPTLNTSAEAILKLINGSSSTYPNFCFGWVNVKDVALAHILAYEVPSSNGRYCMVERVVHYSELVNIIRNMYPTLPLPDKCADDKPFVPPYQVSKEKIKSIGIELIPLETSVKETIESLKEKGFASF

SEQ ID NO: 7365 - protein, 323 aa, Zea mays subsp. mays
  peptide (1)..(323): Ceres Seq. ID no. 12408835
  misc_feature (5)..(297): Pfam Name: 3-beta hydroxysteroid dehydrogenase/isomerase family Pfam Description: 3-beta hydroxysteroid dehydrogenase/isomerase
  misc_feature (1)..(323): Homolog of NCBI NO: 7431409 NR Description: cinnamyl-alcohol dehydrogenase (EC 1.1.1.195) - tree >gi|1143445|emb|CAA61275.1| cinnamyl alcohol dehydrogenase
  misc_feature (2)..(323): Homolog of NCBI NO: 37029996 NR Description: NADPH-dependent cinnamyl alcohol dehydrogenase
  misc_feature (5)..(323): Homolog of NCBI NO: 25405464 NR Description: hypothetical protein F5D21.12 [imported] - thaliana >gi|12325359|gb|AAG52618.1|AC024261_5 cinnamyl alcohol
  misc_feature (1)..(323): Homolog of NCBI NO: 34913420 NR Description: putative cinnamyl-alcohol dehydrogenase [Oryza
  misc_feature (1)..(323): Homolog of NCBI NO: 21594240 NR Description: cinnamyl-alcohol dehydrogenase-like protein
  misc_feature (2)..(323): Homolog of NCBI NO: 7488627 NR Description: probable cinnamyl-alcohol dehydrogenase (EC - apple tree >gi|2981475|gb|AAC06319.1| putative cinnamyl alcohol
  misc_feature (1)..(323): Homolog of NCBI NO: 15239741 NR Description: cinnamyl-alcohol dehydrogenase - like protein;
  misc_feature (5)..(323): Homolog of NCBI NO: 30694964 NR Description: cinnamyl-alcohol dehydrogenase (CAD), putative
  misc_feature (2)..(323): Homolog of NCBI NO: 7431406 NR Description: probable cinnamyl-alcohol dehydrogenase (EC
  misc_feature (4)..(320): Homolog of NCBI NO: 5852203 NR Description: aldehyde reductase [Vigna radiata]
MGTGKVVCVTGASGYIASWIVRLLLDRGYTVRATVRDTADPKKTLHLTALDGAKDRLHLFKASLLEEGSFDAAVHGCDTVFHTASPFYHNVKDAKAELLDPAVKGTLNVLGSCKKASIKKVVVTSSMAAVAYNGRPRTPEVTVDETWFSDPQICETNQQWYILSKTLAEEAAWKFSRDNGLEIVTINPAMVIGPLLQPTLNTSAEAILKLINGSSSTYPNFCFGWVNVKDVALAHILAYEVPSSNGRYCMVERVVHYSELVNIIRNMYPTLPLPDKCADDKPFVPPYQVSKEKIKSIGIELIPLETSVKETIESLKEKGFASF

SEQ ID NO: 7366 - protein, 197 aa, Zea mays subsp. mays
  peptide (1)..(197): Ceres Seq. ID no. 12408836
  misc_feature (1)..(171): Pfam Name: 3-beta hydroxysteroid dehydrogenase/isomerase family Pfam Description: 3-beta hydroxysteroid dehydrogenase/isomerase
  misc_feature (1)..(197): Homolog of NCBI NO: 34913420 NR Description: putative cinnamyl-alcohol dehydrogenase [Oryza
  misc_feature (1)..(197): Homolog of NCBI NO: 15239741 NR Description: cinnamyl-alcohol dehydrogenase - like protein;
  misc_feature (1)..(197): Homolog of NCBI NO: 21594240 NR Description: cinnamyl-alcohol dehydrogenase-like protein
  misc_feature (1)..(197): Homolog of NCBI NO: 7488627 NR Description: probable cinnamyl-alcohol dehydrogenase (EC - apple tree >gi|2981475|gb|AAC06319.1| putative cinnamyl alcohol
  misc_feature (1)..(197): Homolog of NCBI NO: 7431409 NR Description: cinnamyl-alcohol dehydrogenase (EC 1.1.1.195) - tree >gi|1143445|emb|CAA61275.1| cinnamyl alcohol dehydrogenase
  misc_feature (1)..(197): Homolog of NCBI NO: 37029996 NR Description: NADPH-dependent cinnamyl alcohol dehydrogenase
  misc_feature (1)..(197): Homolog of NCBI NO: 25405464 NR Description: hypothetical protein F5D21.12 [imported] - thaliana >gi|12325359|gb|AAG52618.1|AC024261_5 cinnamyl alcohol
  misc_feature (1)..(197): Homolog of NCBI NO: 30694964 NR Description: cinnamyl-alcohol dehydrogenase (CAD), putative
  misc_feature (1)..(197): Homolog of NCBI NO: 7431406 NR Description: probable cinnamyl-alcohol dehydrogenase (EC
  misc_feature (1)..(194): Homolog of NCBI NO: 5852203 NR Description: aldehyde reductase [Vigna radiata]
MAAVAYNGRPRTPEVTVDETWFSDPQICETNQQWYILSKTLAEEAAWKFSRDNGLEIVTINPAMVIGPLLQPTLNTSAEAILKLINGSSSTYPNFCFGWVNVKDVALAHILAYEVPSSNGRYCMVERVVHYSELVNIIRNMYPTLPLPDKCADDKPFVPPYQVSKEKIKSIGIELIPLETSVKETIESLKEKGFASF

SEQ ID NO: 7367 - DNA, 1014 bp, Zea mays subsp. mays
  misc_feature (1)..(1014): Ceres Seq. ID no. 12412614
  misc_feature: MA Experiment ID: 108515 Result: Up-regulated in Transcription
  misc_feature: MA Experiment 108515 PARAMETER Experiment Name: Zm_2mM_SA_P Parameter: Age (day) Value: 8
  misc_feature: MA Experiment 108515 PARAMETER Experiment Name: Zm_2mM_SA_P Parameter: Organism Value: Zea mays
  misc_feature: MA Experiment 108515 PARAMETER Experiment Name: Zm_2mM_SA_P Parameter: Plant Line Value: 35A19
  misc_feature: MA Experiment 108515 PARAMETER Experiment Name: Zm_2mM_SA_P Parameter: Timepoint (hr) Value: 12
  misc_feature: MA Experiment 108515 PARAMETER Experiment Name: Zm_2mM_SA_P Parameter: Tissue Value: Aerial
  misc_feature: MA Experiment 108515 PARAMETER Experiment Name: Zm_2mM_SA_P Parameter: Treatment Value: 2mM SA vs. No Treatment
  misc_feature: MA Experiment ID: 108544 Result: Up-regulated in Transcription
  misc_feature: MA Experiment ID: 108547 Result: Down-regulated in Transcription
  misc_feature: MA Experiment 108547 PARAMETER Experiment Name: Zm_Imbibed_Seeds_P Parameter: Age (day) Value: 4 vs. 2
  misc_feature: MA Experiment 108547 PARAMETER Experiment Name: Zm_Imbibed_Seeds_P Parameter: Organism Value: Zea mays
  misc_feature: MA Experiment 108547 PARAMETER Experiment Name: Zm_Imbibed_Seeds_P Parameter: Plant Line Value: 35A19
  misc_feature: MA Experiment 108547 PARAMETER Experiment Name: Zm_Imbibed_Seeds_P Parameter: Tissue Value: Aerial vs. Embryo
  misc_feature: MA Experiment ID: 20000477 Result: Up-regulated in Transcription
  misc_feature: MA Experiment 20000477 PARAMETER Experiment Name: Zm_5mM_SA_P Parameter: Age (day) Value: 10
  misc_feature: MA Experiment 20000477 PARAMETER Experiment Name: Zm_5mM_SA_P Parameter: Organism Value: Zea mays
  misc_feature: MA Experiment 20000477 PARAMETER Experiment Name: Zm_5mM_SA_P Parameter: Plant Line Value: 35A19
  misc_feature: MA Experiment 20000477 PARAMETER Experiment Name: Zm_5mM_SA_P Parameter: Timepoint (hr) Value: 48
  misc_feature: MA Experiment 20000477 PARAMETER Experiment Name: Zm_5mM_SA_P Parameter: Tissue Value: Aerial
  misc_feature: MA Experiment 20000477 PARAMETER Experiment Name: Zm_5mM_SA_P Parameter: Treatment Value: 5mM SA vs. No Treatment
  misc_feature: MA Experiment ID: 20000478 Result: Up-regulated in Transcription
  misc_feature: MA Experiment 20000478 PARAMETER Experiment Name: Zm_5mM_SA_P Parameter: Age (day) Value: 11
  misc_feature: MA Experiment 20000478 PARAMETER Experiment Name: Zm_5mM_SA_P Parameter: Organism Value: Zea mays
  misc_feature: MA Experiment 20000478 PARAMETER Experiment Name: Zm_5mM_SA_P Parameter: Plant Line Value: 35A19
  misc_feature: MA Experiment 20000478 PARAMETER Experiment Name: Zm_5mM_SA_P Parameter: Timepoint (hr) Value: 72
  misc_feature: MA Experiment 20000478 PARAMETER Experiment Name: Zm_5mM_SA_P Parameter: Tissue Value: Aerial
  misc_feature: MA Experiment 20000478 PARAMETER Experiment Name: Zm_5mM_SA_P Parameter: Treatment Value: 5mM SA vs. No Treatment
  misc_feature: MA Experiment ID: 20000479 Result: Up-regulated in Transcription
  misc_feature: MA Experiment 20000479 PARAMETER Experiment Name: Zm_Drought_P Parameter: Age (day) Value: 10
  misc_feature: MA Experiment 20000479 PARAMETER Experiment Name: Zm_Drought_P Parameter: Organism Value: Zea mays
  misc_feature: MA Experiment 20000479 PARAMETER Experiment Name: Zm_Drought_P Parameter: Plant Line Value: 35A19
  misc_feature: MA Experiment 20000479 PARAMETER Experiment Name: Zm_Drought_P Parameter: Timepoint (hr) Value: 48
  misc_feature: MA Experiment 20000479 PARAMETER Experiment Name: Zm_Drought_P Parameter: Tissue Value: Aerial
  misc_feature: MA Experiment 20000479 PARAMETER Experiment Name: Zm_Drought_P Parameter: Treatment Value: Drought vs. No Drought
actcccaagttcaccttcctctgcctgtagatcttctagagtcccgtatacggtttcgtctttcgtgtcccacttccatggcggcggcggcgcagctgcacggatcggctgcggccacggtggcatatcgcgggactcgagcctactcagttccatcctcatgccggtggccgcagtctggttccccgaagctttcgatttctacaagtggagtcagtatgaagccatttggctttgctgctaaactttcaacaaaatgtgcaaatgagaatgctcgagttgaagaattagatttgaggtcagaccagatgaaggaattacaggtggaggagcaggttattccccagaagaggagtgctaaaatccatgacttctgccttgggatcccttttggtggtcttttattctctatggggcttctaggatacatcttctccagaagcaccataagtcttgtcttgggcattgcaccagggctagccactctgctacttggcactctcagtctgaagttctggaggagcggcagatccagcttcctgcttatcttggctcaggcagcaatttctgctttcctggcatggaaatactctcatgcttacttcttgacaaatagactccttccttggggcttctacgcgtcactgagcactgcaatgggttgtttctacgcctatgtgctacttgcgggaggaaatcccccgcctaagaagttggcagccattccaccgcagtaggaagagccgaagagggattcggtttaggatcagcgtgcgttgacccttcgctccatagtaaaattttgattgtcttcctaagtatattctgcagcctttgtacactgctggctgggcctttgttttttcgatcctggtagcctgaaattttgagcaaataaagatccagaggacaatagccctgcctccagtaacatgctgttttcttgctcatgaatgaacgtgataaatataagcctgctcggcaaactggctgtcacagaaagttgtggcaagc

SEQ ID NO: 7368 - protein, 244 aa, Zea mays subsp. mays
  peptide (1)..(244): Ceres Seq. ID no. 12412615
  misc_feature (124)..(227): Pfam Name: Uncharacterised protein family (UPF0136) Pfam Description: Uncharacterised protein family (UPF0136)
  misc_feature (26)..(242): Homolog of NCBI NO: 38344745 NR Description: OSJNBa0089K21.3 [Oryza sativa (japonica
  misc_feature (49)..(238): Homolog of NCBI NO: 18410685 NR Description: expressed protein; protein id: At3g57280.1, by cDNA: 14487., supported by cDNA: gi_14517380, supported by gi_15450538 [Arabidopsis thaliana] >gi|14517381|gb|AAK62581.1|
  misc_feature (49)..(238): Homolog of NCBI NO: 11290570 NR Description: hypothetical protein F28O9.130 - Arabidopsis >gi|6735307|emb|CAB68134.1| hypothetical protein [Arabidopsis
  misc_feature (121)..(237): Homolog of NCBI NO: 15232290 NR Description: unknown protein; protein id: At3g20510.1 thaliana] >gi|11994139|dbj|BAB01160.1|
  misc_feature (121)..(236): Homolog of NCBI NO: 18403201 NR Description: expressed protein; protein id: At1g50740.1, by cDNA: 34587., supported by cDNA: gi_18491152, supported by
  misc_feature (121)..(237): Homolog of NCBI NO: 34896628 NR Description: hypothetical protein [Oryza sativa]
SQVHLPLPVDLLESRIRFRLSCPTSMAAAAQLHGSAAATVAYRGTRAYSVPSSCRWPQSGSPKLSISTSGVSMKPFGFAAKLSTKCANENARVEELDLRSDQMKELQVEEQVIPQKRSAKIHDFCLGIPFGGLLFSMGLLGYIFSRSTISLVLGIAPGLATLLLGTLSLKFWRSGRSSFLLILAQAAISAFLAWKYSHAYFLTNRLLPWGFYASLSTAMGCFYAYVLLAGGNPPPKKLAAIPPQ

SEQ ID NO: 7369 - protein, 219 aa, Zea mays subsp. mays
  peptide (1)..(219): Ceres Seq. ID no. 12412616
  misc_feature (99)..(202): Pfam Name: Uncharacterised protein family (UPF0136) Pfam Description: Uncharacterised protein family (UPF0136)
  misc_feature (1)..(217): Homolog of NCBI NO: 38344745 NR Description: OSJNBa0089K21.3 [Oryza sativa (japonica
  misc_feature (24)..(213): Homolog of NCBI NO: 18410685 NR Description: expressed protein; protein id: At3g57280.1, by cDNA: 14487., supported by cDNA: gi_14517380, supported by gi_15450538 [Arabidopsis thaliana] >gi|14517381|gb|AAK62581.1|
  misc_feature (24)..(213): Homolog of NCBI NO: 11290570 NR Description: hypothetical protein F28O9.130 - Arabidopsis >gi|6735307|emb|CAB68134.1| hypothetical protein [Arabidopsis
  misc_feature (96)..(212): Homolog of NCBI NO: 15232290 NR Description: unknown protein; protein id: At3g20510.1 thaliana] >gi|11994139|dbj|BAB01160.1|
  misc_feature (96)..(211): Homolog of NCBI NO: 18403201 NR Description: expressed protein; protein id: At1g50740.1, by cDNA: 34587., supported by cDNA: gi_18491152, supported by
  misc_feature (96)..(212): Homolog of NCBI NO: 34896628 NR Description: hypothetical protein [Oryza sativa]
MAAAAQLHGSAAATVAYRGTRAYSVPSSCRWPQSGSPKLSISTSGVSMKPFGFAAKLSTKCANENARVEELDLRSDQMKELQVEEQVIPQKRSAKIHDFCLGIPFGGLLFSMGLLGYIFSRSTISLVLGIAPGLATLLLGTLSLKFWRSGRSSFLLILAQAAISAFLAWKYSHAYFLTNRLLPWGFYASLSTAMGCFYAYVLLAGGNPPPKKLAAIPPQ

SEQ ID NO: 7370 - protein, 172 aa, Zea mays subsp. mays
  peptide (1)..(172): Ceres Seq. ID no. 12412617
  misc_feature (52)..(155): Pfam Name: Uncharacterised protein family (UPF0136) Pfam Description: Uncharacterised protein family (UPF0136)
  misc_feature (1)..(170): Homolog of NCBI NO: 38344745 NR Description: OSJNBa0089K21.3 [Oryza sativa (japonica
  misc_feature (1)..(166): Homolog of NCBI NO: 18410685 NR Description: expressed protein; protein id: At3g57280.1, by cDNA: 14487., supported by cDNA: gi_14517380, supported by gi_15450538 [Arabidopsis thaliana] >gi|14517381|gb|AAK62581.1|
  misc_feature (1)..(166): Homolog of NCBI NO: 11290570 NR Description: hypothetical protein F28O9.130 - Arabidopsis >gi|6735307|emb|CAB68134.1| hypothetical protein [Arabidopsis
  misc_feature (49)..(165): Homolog of NCBI NO: 15232290 NR Description: unknown protein; protein id: At3g20510.1 thaliana] >gi|11994139|dbj|BAB01160.1|
  misc_feature (49)..(164): Homolog of NCBI NO: 18403201 NR Description: expressed protein; protein id: At1g50740.1, by cDNA: 34587., supported by cDNA: gi_18491152, supported by
  misc_feature (49)..(165): Homolog of NCBI NO: 34896628 NR Description: hypothetical protein [Oryza sativa]
MKPFGFAAKLSTKCANENARVEELDLRSDQMKELQVEEQVIPQKRSAKIHDFCLGIPFGGLLFSMGLLGYIFSRSTISLVLGIAPGLATLLLGTLSLKFWRSGRSSFLLILAQAAISAFLAWKYSHAYFLTNRLLPWGFYASLSTAMGCFYAYVLLAGGNPPPKKLAAIPPQ

SEQ ID NO: 7371 - DNA, 1174 bp, Zea mays subsp. mays
  misc_feature (1)..(1174): Ceres Seq. ID no. 12412610
  misc_feature: MA Experiment ID: 108529 Result: Up-regulated in Transcription
  misc_feature: MA Experiment 108529 PARAMETER Experiment Name: Zm_Imbibed_Seeds_P Parameter: Age (day) Value: 5 vs. 2
  misc_feature: MA Experiment 108529 PARAMETER Experiment Name: Zm_Imbibed_Seeds_P Parameter: Organism Value: Zea mays
  misc_feature: MA Experiment 108529 PARAMETER Experiment Name: Zm_Imbibed_Seeds_P Parameter: Plant Line Value: 35A19
  misc_feature: MA Experiment 108529 PARAMETER Experiment Name: Zm_Imbibed_Seeds_P Parameter: Tissue Value: Roots vs. Embryo
  misc_feature: MA Experiment ID: 108535 Result: Down-regulated in Transcription
  misc_feature: MA Experiment 108535 PARAMETER Experiment Name: Zm_Meristem_P Parameter: Age (day) Value: 8
  misc_feature: MA Experiment 108535 PARAMETER Experiment Name: Zm_Meristem_P Parameter: Organism Value: Zea mays
  misc_feature: MA Experiment 108535 PARAMETER Experiment Name: Zm_Meristem_P Parameter: Plant Line Value: 35A19
  misc_feature: MA Experiment 108535 PARAMETER Experiment Name: Zm_Meristem_P Parameter: Tissue Value: Root Meristem vs. Above Root Meristem
gcccttccgcggctgtgctgtgctctgctctgctctgctccccgtctttcctcctctcccggtctttcctcctctccccttcccgcccagcgcgtccccacgaggaaccaaccccgcggcatggggatcgtggaggaggcgcacaacctgcgagtggtgggcgaggggaagcgcggggtcatcgtgctggcgcacggcttcggcaccgaccagtccgtgtggaagcacctggtgccgcacctcgtcgccgactaccgcgtcgtgctcttcgacaccatgggcgccggccccaccaacccggactacttcgacttctcccgctacgccacgctcgagggctacgcgctcgacctcctcgccatcctccaggagctcggcgtccgctcctgcatctacgtcggccactccgtctccgcggtcatcggcgcgctcgcctccatctccaggcctgacctcttcaccaagctcgtgctcctctccgcgtccccaaggtacctcaatgatgtggactactatggcgggtttgagcaagatgagcttgatgagctgtttgaggcgatgcgatcaaactacaaggcctggtgctcaggttttgcgcccctgtgtgttggcggagacatggaatcagtggcagttcaggagtttagcaggacgctcttcaatatacgtccggacattgcgcttagtgttgcccagacgatcttccagagcgacgtgcgcagcctcctcccgcacgtcactgtcccatgccacattgttcagagcaccaaggatctcgcggtgccggtcgtggtgtctgagtacctgcacaggcaccttggtggcgactccatcgtggaggtgatgccctctgaaggccatcttccccagcttagctctccggacattgtaatccctgtcttactccgacacatccagcacgatatcgcagtctaggttggtcaatcgttcctccaagacgatgagcatccgaagctgtctacttgtctgtttgtatcttgcttaattgttcaacgtaggatcgcatctatttgatgttctaataaggtttcaaaggtgttatgtagtgttggcggtggaaagtgtagcatatatgtatgtgttatccattggtcgtctaatgtaggctaccatgttggatgctctgacatctgaagtccttcagaagctcttc

SEQ ID NO: 7372 - protein, 311 aa, Zea mays subsp. mays
  peptide (1)..(311): Ceres Seq. ID no. 12412611
  misc_feature (85)..(303): Pfam Name: alpha/beta hydrolase fold Pfam Description: alpha/beta hydrolase fold
  misc_feature (165)..(311): Homolog of NCBI NO: 40736991 NR Description: putative hydrolases [Oryza sativa (japonica
  misc_feature (41)..(166): Homolog of NCBI NO: 40736991 NR Description: putative hydrolases [Oryza sativa (japonica
  misc_feature (41)..(311): Homolog of NCBI NO: 15235567 NR Description: putative protein; protein id: At4g37470.1, by cDNA: gi_15810302, supported by cDNA: gi_20259140 [Arabidopsis
  misc_feature (46)..(294): Homolog of NCBI NO: 18396732 NR Description: expressed protein; protein id: At3g03990.1, by cDNA: 6052., supported by cDNA: gi_17381266, supported by gi_20453358 [Arabidopsis thaliana]
  misc_feature (46)..(294): Homolog of NCBI NO: 21593927 NR Description: unknown [Arabidopsis thaliana]
  misc_feature (48)..(298): Homolog of NCBI NO: 24216360 NR Description: Predicted hydrolases or acyltransferases, hydrolase superfamily [Leptospira interrogans serovar lai str. >gi|24197640|gb|AAN50859.1|AE011521_5 Predicted hydrolases or
  misc_feature (47)..(306): Homolog of NCBI NO: 15230110 NR Description: unknown protein; protein id: At3g24420.1
  misc_feature (44)..(294): Homolog of NCBI NO: 22987307 NR Description: hypothetical protein [Burkholderia fungorum]
  misc_feature (49)..(301): Homolog of NCBI NO: 34912326 NR Description: P0451D05.26 [Oryza sativa (japonica
  misc_feature (61)..(305): Homolog of NCBI NO: 22298700 NR Description: ORF_ID:tlr1157~hypothetical protein
ALPRLCCALLCSAPRLSSSPGLSSSPLPAQRVPTRNQPRGMGIVEEAHNLRVVGEGKRGVIVLAHGFGTDQSVWKHLVPHLVADYRVVLFDTMGAGPTNPDYFDFSRYATLEGYALDLLAILQELGVRSCIYVGHSVSAVIGALASISRPDLFTKLVLLSASPRYLNDVDYYGGFEQDELDELFEAMRSNYKAWCSGFAPLCVGGDMESVAVQEFSRTLFNIRPDIALSVAQTIFQSDVRSLLPHVTVPCHIVQSTKDLAVPVVVSEYLHRHLGGDSIVEVMPSEGHLPQLSSPDIVIPVLLRHIQHDIAV

SEQ ID NO: 7373 - protein, 280 aa, Zea mays subsp. mays
  peptide (1)..(280): Ceres Seq. ID no. 12412612
  misc_feature (53)..(278): Pfam Name: Equine herpesvirus glycoprotein gp2 Pfam Description: Equine herpesvirus glycoprotein gp2
  misc_feature (1)..(210): Homolog of NCBI NO: 2135766 NR Description: mucin 5AC (clone JER47) - human (fragment)
  misc_feature (65)..(182): Homolog of NCBI NO: 6473880 NR Description: Hypothetical protein [Schizosaccharomyces pombe]
  misc_feature (1)..(210): Homolog of NCBI NO: 563375 NR Description: mucin [Homo sapiens]
  misc_feature (1)..(260): Homolog of NCBI NO: 17384256 NR Description: mucin 5 [Homo sapiens]
  misc_feature (1)..(279): Homolog of NCBI NO: 17384256 NR Description: mucin 5 [Homo sapiens]
  misc_feature (29)..(195): Homolog of NCBI NO: 11359723 NR Description: proteophosphoglycan, membrane-associated - Leishmania major (fragment) >gi|5420389|emb|CAB46680.1|
  misc_feature (30)..(280): Homolog of NCBI NO: 25011571 NR Description: Unknown [Streptococcus agalactiae NEM316]
  misc_feature (65)..(277): Homolog of NCBI NO: 11359723 NR Description: proteophosphoglycan, membrane-associated - Leishmania major (fragment) >gi|5420389|emb|CAB46680.1|
  misc_feature (30)..(280): Homolog of NCBI NO: 22537606 NR Description: cell wall surface anchor family protein agalactiae 2603V/R] >gi|22534491|gb|AAN00330.1|AE014259_1 cell
  misc_feature (30)..(280): Homolog of NCBI NO: 25011571 NR Description: Unknown [Streptococcus agalactiae NEM316]
PFRGCAVLCSALLPVFPPLPVFPPLPFPPSASPRGTNPAAWGSWRRRTTCEWWARGSAGSSCWRTASAPTSPCGSTWCRTSSPTTASCSSTPWAPAPPTRTTSTSPATPRSRATRSTSSPSSRSSASAPASTSATPSPRSSARSPPSPGLTSSPSSCSSPRPQGTSMMWTTMAGLSKMSLMSCLRRCDQTTRPGAQVLRPCVLAETWNQWQFRSLAGRSSIYVRTLRLVLPRRSSRATCAASSRTSLSHATLFRAPRISRCRSWCLSTCTGTLVATPSWR

SEQ ID NO: 7374 - protein, 271 aa, Zea mays subsp. mays
  peptide (1)..(271): Ceres Seq. ID no. 12412613
  misc_feature (45)..(263): Pfam Name: alpha/beta hydrolase fold Pfam Description: alpha/beta hydrolase fold
  misc_feature (125)..(271): Homolog of NCBI NO: 40736991 NR Description: putative hydrolases [Oryza sativa (japonica
  misc_feature (1)..(126): Homolog of NCBI NO: 40736991 NR Description: putative hydrolases [Oryza sativa (japonica
  misc_feature (1)..(271): Homolog of NCBI NO: 15235567 NR Description: putative protein; protein id: At4g37470.1, by cDNA: gi_15810302, supported by cDNA: gi_20259140 [Arabidopsis
  misc_feature (6)..(254): Homolog of NCBI NO: 18396732 NR Description: expressed protein; protein id: At3g03990.1, by cDNA: 6052., supported by cDNA: gi_17381266, supported by gi_20453358 [Arabidopsis thaliana]
  misc_feature (6)..(254): Homolog of NCBI NO: 21593927 NR Description: unknown [Arabidopsis thaliana]
  misc_feature (8)..(258): Homolog of NCBI NO: 24216360 NR Description: Predicted hydrolases or acyltransferases, hydrolase superfamily [Leptospira interrogans serovar lai str. >gi|24197640|gb|AAN50859.1|AE011521_5 Predicted hydrolases or
  misc_feature (7)..(266): Homolog of NCBI NO: 15230110 NR Description: unknown protein; protein id: At3g24420.1
  misc_feature (4)..(254): Homolog of NCBI NO: 22987307 NR Description: hypothetical protein [Burkholderia fungorum]
  misc_feature (9)..(261): Homolog of NCBI NO: 34912326 NR Description: P0451D05.26 [Oryza sativa (japonica
  misc_feature (21)..(265): Homolog of NCBI NO: 22298700 NR Description: ORF_ID:tlr1157~hypothetical protein
MGIVEEAHNLRVVGEGKRGVIVLAHGFGTDQSVWKHLVPHLVADYRVVLFDTMGAGPTNPDYFDFSRYATLEGYALDLLAILQELGVRSCIYVGHSVSAVIGALASISRPDLFTKLVLLSASPRYLNDVDYYGGFEQDELDELFEAMRSNYKAWCSGFAPLCVGGDMESVAVQEFSRTLFNIRPDIALSVAQTIFQSDVRSLLPHVTVPCHIVQSTKDLAVPVVVSEYLHRHLGGDSIVEVMPSEGHLPQLSSPDIVIPVLLRHIQHDIAV

SEQ ID NO: 7375 - DNA, 1511 bp, Zea mays subsp. mays
  misc_feature (1)..(1511): Ceres Seq. ID no. 12407681
  misc_feature: MA Experiment ID: 108522 Result: Down-regulated in Transcription
  misc_feature: MA Experiment 108522 PARAMETER Experiment Name: Zm_42deg_Heat_P Parameter: Age (day) Value: 8
  misc_feature: MA Experiment 108522 PARAMETER Experiment Name: Zm_42deg_Heat_P Parameter: Organism Value: Zea mays
  misc_feature: MA Experiment 108522 PARAMETER Experiment Name: Zm_42deg_Heat_P Parameter: Plant Line Value: 35A19
  misc_feature: MA Experiment 108522 PARAMETER Experiment Name: Zm_42deg_Heat_P Parameter: Temperature (deg C) Value: 42 vs. 22
  misc_feature: MA Experiment 108522 PARAMETER Experiment Name: Zm_42deg_Heat_P Parameter: Timepoint (hr) Value: 1
  misc_feature: MA Experiment 108522 PARAMETER Experiment Name: Zm_42deg_Heat_P Parameter: Tissue Value: Aerial
  misc_feature: MA Experiment ID: 108687 Result: Down-regulated in Transcription
  misc_feature: MA Experiment 108687 PARAMETER Experiment Name: Zm_Embryos-Flowers__P Parameter: Tissue Value: Embryo vs. Aerial+
  misc_feature: MA Experiment ID: 20000478 Result: Down-regulated in Transcription
  misc_feature: MA Experiment 20000478 PARAMETER Experiment Name: Zm_5mM_SA_P Parameter: Age (day) Value: 11
  misc_feature: MA Experiment 20000478 PARAMETER Experiment Name: Zm_5mM_SA_P Parameter: Organism Value: Zea mays
  misc_feature: MA Experiment 20000478 PARAMETER Experiment Name: Zm_5mM_SA_P Parameter: Plant Line Value: 35A19
  misc_feature: MA Experiment 20000478 PARAMETER Experiment Name: Zm_5mM_SA_P Parameter: Timepoint (hr) Value: 72
  misc_feature: MA Experiment 20000478 PARAMETER Experiment Name: Zm_5mM_SA_P Parameter: Tissue Value: Aerial
  misc_feature: MA Experiment 20000478 PARAMETER Experiment Name: Zm_5mM_SA_P Parameter: Treatment Value: 5mM SA vs. No Treatment
  misc_feature: MA Experiment ID: 20000479 Result: Down-regulated in Transcription
  misc_feature: MA Experiment 20000479 PARAMETER Experiment Name: Zm_Drought_P Parameter: Age (day) Value: 10
  misc_feature: MA Experiment 20000479 PARAMETER Experiment Name: Zm_Drought_P Parameter: Organism Value: Zea mays
  misc_feature: MA Experiment 20000479 PARAMETER Experiment Name: Zm_Drought_P Parameter: Plant Line Value: 35A19
  misc_feature: MA Experiment 20000479 PARAMETER Experiment Name: Zm_Drought_P Parameter: Timepoint (hr) Value: 48
  misc_feature: MA Experiment 20000479 PARAMETER Experiment Name: Zm_Drought_P Parameter: Tissue Value: Aerial
  misc_feature: MA Experiment 20000479 PARAMETER Experiment Name: Zm_Drought_P Parameter: Treatment Value: Drought vs. No Drought
  misc_feature: MA Experiment ID: 20000488 Result: Down-regulated in Transcription
  misc_feature: MA Experiment 20000488 PARAMETER Experiment Name: Zm_50mM_NH4NO3_L_to_H_P Parameter: Organism Value: Zea mays
  misc_feature: MA Experiment 20000488 PARAMETER Experiment Name: Zm_50mM_NH4NO3_L_to_H_P Parameter: Timepoint (hr) Value: 8
  misc_feature: MA Experiment 20000488 PARAMETER Experiment Name: Zm_50mM_NH4NO3_L_to_H_P Parameter: Tissue Value: Leaves
  misc_feature: MA Experiment 20000488 PARAMETER Experiment Name: Zm_50mM_NH4NO3_L_to_H_P Parameter: Treatment Value: 50mM NH4NO3 vs. 100mM Mannitol
  misc_feature: MA Experiment ID: 20000535 Result: Down-regulated in Transcription
  misc_feature: MA Experiment 20000535 PARAMETER Experiment Name: Zm_Hybrid_Seed_Dev_P Parameter: DAP Value: 30 vs. 12
  misc_feature: MA Experiment 20000535 PARAMETER Experiment Name: Zm_Hybrid_Seed_Dev_P Parameter: Organism Value: Zea mays
  misc_feature: MA Experiment 20000535 PARAMETER Experiment Name: Zm_Hybrid_Seed_Dev_P Parameter: Plant Line Value: 35A19
  misc_feature: MA Experiment 20000535 PARAMETER Experiment Name: Zm_Hybrid_Seed_Dev_P Parameter: Tissue Value: Embryo vs. Unfert Floret
  misc_feature: MA Experiment ID: 20000629 Result: Up-regulated in Transcription
  misc_feature: MA Experiment 20000629 PARAMETER Experiment Name: Zm_Herbicide-Treatments_P Parameter: Timepoint (hr) Value: 12
  misc_feature: MA Experiment 20000629 PARAMETER Experiment Name: Zm_Herbicide-Treatments_P Parameter: Tissue Value: Aerial
  misc_feature: MA Experiment 20000629 PARAMETER Experiment Name: Zm_Herbicide-Treatments_P Parameter: Treatment Value: Trimec vs. No Treatment
atcaaacggactcacagctcgcagcacctgcatgacattgagaaccagccagctaaccaaccaaccaaccggcggagccaaagccaagaaggaaggcaacgtgcccatccagtcaggatgtgcaactccaacgtcaagtccgcgggggtggcccagatcgacggccgcccggtgctgcagccggcgggcaaccgcgtggcggcgccggagccggacgcctcccgcccgctcaagaagtccctccagaagtcgctctccatgccggcctactacgacagcaatgccaccgcgggcgcccgtcctgcgccggccgagaacaccacccgtgcagcggctaattcgtctccgctgcctcccgcgaaggcggcgacgaaggcagcgggcgctttccccgcggagaagagcggcaggtccaaggcagccaggaggccaggcgccgtgccgccgccggtggtggcgttcgcggcgctggacgcgttggagccggcggggagcatcgccgcggcgcagcgggagcacgccgcgcaggcgcaggcgcagcgcaagctgcggatcgcgcactacggccgcaccgcgtccttctcccgggtggaggggcgagtagtcggcgccgcggccgccgcccccgagcgggccgtcaccgcctcccccgccgggcaggacgagaagcgctgcagcttcatcacgccctactcagaccccctgtatgtcgcgtaccacgacgaggagtggggagtgcccgtgcacgacgacgagttgctattcgagatgctcacactgtctggcgtgcaagtcggggccgactggacttccatcctcaagaaaagacacgtgtacagggaggcgttctccggcttcaacgtggatgcggtcgccaagtacaccgagaagcagatggcgtcgctgagcgccgactacgggctggatttgggcaccgtcagaggaaccgtcaacaacgcctgccggattatcgaggtgcggagggacttcggctcgctggacaggtacgtgtgggcgttcgtgaacaacaggccgctgtcgccgagctacaggtacagccggaagatcccggcgaagacgtccaagtcggagtgcatcagcaaggacatggtccggcgcaggttccgcttcgtcggccccaccgtcgtccactccttcatgcaggcggtcggcctcaccaacgaccacctcgtctcgtgcccgcgccaccgcgcctgctccgccgccgccgttaactgattctgctgaccaccgtccaccgatcaagagccagacgtaaggaagaaaagagaccttttatctaaggacacgtacaatacaaccgagaaaaaggagaaaggttagtagcctctagtagcactagatcgaagtagtagtatacgaaagggagagtgctggtttgcaagtgtgtgtgcatcatgtacgtatgatgatcgagtgtgcttgtgtagattagttacgcccccacccctaattattagtcaatgaatgagcttgcttgctgcgacttc

SEQ ID NO: 7376 - protein, 412 aa, Zea mays subsp. mays
  peptide (1)..(412): Ceres Seq. ID no. 12407682
  misc_feature (231)..(404): Pfam Name: Methyladenine glycosylase Pfam Description: Methyladenine glycosylase
  misc_feature (13)..(410): Homolog of NCBI NO: 34908920 NR Description: P0691E06.10 [Oryza sativa (japonica
  misc_feature (161)..(412): Homolog of NCBI NO: 18399721 NR Description: expressed protein; protein id: At3g12710.1,
  misc_feature (161)..(412): Homolog of NCBI NO: 21536975 NR Description: unknown [Arabidopsis thaliana]
  misc_feature (114)..(410): Homolog of NCBI NO: 15241554 NR Description: putative protein; protein id: At5g44680.1, by cDNA: 29551. [Arabidopsis thaliana]
  misc_feature (114)..(410): Homolog of NCBI NO: 21592537 NR Description: unknown [Arabidopsis thaliana]
  misc_feature (94)..(410): Homolog of NCBI NO: 38345034 NR Description: OSJNBa0029H02.18 [Oryza sativa (japonica
  misc_feature (210)..(406): Homolog of NCBI NO: 15242914 NR Description: putative protein; protein id: At5g57970.1
  misc_feature (163)..(410): Homolog of NCBI NO: 15218379 NR Description: hypothetical protein; protein id: At1g15970.1
  misc_feature (210)..(406): Homolog of NCBI NO: 15220860 NR Description: DNA-3-methyladenine glycosidase, putative; id: At1g80850.1 [Arabidopsis thaliana] >gi|25406698|pir||B96841
  misc_feature (134)..(407): Homolog of NCBI NO: 18410766 NR Description: putative DNA-3-methyladenine glycosylase I; id: At1g75090.1, supported by cDNA: gi_14334651, supported by gi_17104586 [Arabidopsis thaliana] >gi|14334652|gb|AAK59504.1|
IKRTHSSQHLHDIENQPANQPTNRRSQSQEGRQRAHPVRMCNSNVKSAGVAQIDGRPVLQPAGNRVAAPEPDASRPLKKSLQKSLSMPAYYDSNATAGARPAPAENTTRAAANSSPLPPAKAATKAAGAFPAEKSGRSKAARRPGAVPPPVVAFAALDALEPAGSIAAAQREHAAQAQAQRKLRIAHYGRTASFSRVEGRVVGAAAAAPERAVTASPAGQDEKRCSFITPYSDPLYVAYHDEEWGVPVHDDELLFEMLTLSGVQVGADWTSILKKRHVYREAFSGFNVDAVAKYTEKQMASLSADYGLDLGTVRGTVNNACRIIEVRRDFGSLDRYVWAFVNNRPLSPSYRYSRKIPAKTSKSECISKDMVRRRFRFVGPTVVHSFMQAVGLTNDHLVSCPRHRACSAAAVN

SEQ ID NO: 7377 - protein, 373 aa, Zea mays subsp. mays
  peptide (1)..(373): Ceres Seq. ID no. 12407683
  misc_feature (192)..(365): Pfam Name: Methyladenine glycosylase Pfam Description: Methyladenine glycosylase
  misc_feature (1)..(371): Homolog of NCBI NO: 34908920 NR Description: P0691E06.10 [Oryza sativa (japonica
  misc_feature (122)..(373): Homolog of NCBI NO: 18399721 NR Description: expressed protein; protein id: At3g12710.1,
  misc_feature (122)..(373): Homolog of NCBI NO: 21536975 NR Description: unknown [Arabidopsis thaliana]
  misc_feature (75)..(371): Homolog of NCBI NO: 15241554 NR Description: putative protein; protein id: At5g44680.1, by cDNA: 29551. [Arabidopsis thaliana]
  misc_feature (75)..(371): Homolog of NCBI NO: 21592537 NR Description: unknown [Arabidopsis thaliana]
  misc_feature (55)..(371): Homolog of NCBI NO: 38345034 NR Description: OSJNBa0029H02.18 [Oryza sativa (japonica
  misc_feature (171)..(367): Homolog of NCBI NO: 15242914 NR Description: putative protein; protein id: At5g57970.1
  misc_feature (124)..(371): Homolog of NCBI NO: 15218379 NR Description: hypothetical protein; protein id: At1g15970.1
  misc_feature (171)..(367): Homolog of NCBI NO: 15220860 NR Description: DNA-3-methyladenine glycosidase, putative; id: At1g80850.1 [Arabidopsis thaliana] >gi|25406698|pir||B96841
  misc_feature (95)..(368): Homolog of NCBI NO: 18410766 NR Description: putative DNA-3-methyladenine glycosylase I; id: At1g75090.1, supported by cDNA: gi_14334651, supported by gi_17104586 [Arabidopsis thaliana] >gi|14334652|gb|AAK59504.1|
MCNSNVKSAGVAQIDGRPVLQPAGNRVAAPEPDASRPLKKSLQKSLSMPAYYDSNATAGARPAPAENTTRAAANSSPLPPAKAATKAAGAFPAEKSGRSKAARRPGAVPPPVVAFAALDALEPAGSIAAAQREHAAQAQAQRKLRIAHYGRTASFSRVEGRVVGAAAAAPERAVTASPAGQDEKRCSFITPYSDPLYVAYHDEEWGVPVHDDELLFEMLTLSGVQVGADWTSILKKRHVYREAFSGFNVDAVAKYTEKQMASLSADYGLDLGTVRGTVNNACRIIEVRRDFGSLDRYVWAFVNNRPLSPSYRYSRKIPAKTSKSECISKDMVRRRFRFVGPTVVHSFMQAVGLTNDHLVSCPRHRACSAAAVN

SEQ ID NO: 7378 - protein, 326 aa, Zea mays subsp. mays
  peptide (1)..(326): Ceres Seq. ID no. 12407684
  misc_feature (145)..(318): Pfam Name: Methyladenine glycosylase Pfam Description: Methyladenine glycosylase
  misc_feature (1)..(324): Homolog of NCBI NO: 34908920 NR Description: P0691E06.10 [Oryza sativa (japonica
  misc_feature (75)..(326): Homolog of NCBI NO: 18399721 NR Description: expressed protein; protein id: At3g12710.1,
  misc_feature (75)..(326): Homolog of NCBI NO: 21536975 NR Description: unknown [Arabidopsis thaliana]
  misc_feature (28)..(324): Homolog of NCBI NO: 15241554 NR Description: putative protein; protein id: At5g44680.1, by cDNA: 29551. [Arabidopsis thaliana]
  misc_feature (28)..(324): Homolog of NCBI NO: 21592537 NR Description: unknown [Arabidopsis thaliana]
  misc_feature (8)..(324): Homolog of NCBI NO: 38345034 NR Description: OSJNBa0029H02.18 [Oryza sativa (japonica
  misc_feature (124)..(320): Homolog of NCBI NO: 15242914 NR Description: putative protein; protein id: At5g57970.1
  misc_feature (77)..(324): Homolog of NCBI NO: 15218379 NR Description: hypothetical protein; protein id: At1g15970.1
  misc_feature (124)..(320): Homolog of NCBI NO: 15220860 NR Description: DNA-3-methyladenine glycosidase, putative; id: At1g80850.1 [Arabidopsis thaliana] >gi|25406698|pir||B96841
  misc_feature (48)..(321): Homolog of NCBI NO: 18410766 NR Description: putative DNA-3-methyladenine glycosylase I; id: At1g75090.1, supported by cDNA: gi_14334651, supported by gi_17104586 [Arabidopsis thaliana] >gi|14334652|gb|AAK59504.1|
MPAYYDSNATAGARPAPAENTTRAAANSSPLPPAKAATKAAGAFPAEKSGRSKAARRPGAVPPPVVAFAALDALEPAGSIAAAQREHAAQAQAQRKLRIAHYGRTASFSRVEGRVVGAAAAAPERAVTASPAGQDEKRCSFITPYSDPLYVAYHDEEWGVPVHDDELLFEMLTLSGVQVGADWTSILKKRHVYREAFSGFNVDAVAKYTEKQMASLSADYGLDLGTVRGTVNNACRIIEVRRDFGSLDRYVWAFVNNRPLSPSYRYSRKIPAKTSKSECISKDMVRRRFRFVGPTVVHSFMQAVGLTNDHLVSCPRHRACSAAAVN

SEQ ID NO: 7379 - DNA, 1420 bp, Zea mays subsp. mays
  misc_feature (1)..(1420): Ceres Seq. ID no. 12362864
  misc_feature: MA Experiment ID: 108522 Result: Up-regulated in Transcription
  misc_feature: MA Experiment 108522 PARAMETER Experiment Name: Zm_42deg_Heat_P Parameter: Age (day) Value: 8
  misc_feature: MA Experiment 108522 PARAMETER Experiment Name: Zm_42deg_Heat_P Parameter: Organism Value: Zea mays
  misc_feature: MA Experiment 108522 PARAMETER Experiment Name: Zm_42deg_Heat_P Parameter: Plant Line Value: 35A19
  misc_feature: MA Experiment 108522 PARAMETER Experiment Name: Zm_42deg_Heat_P Parameter: Temperature (deg C) Value: 42 vs. 22
  misc_feature: MA Experiment 108522 PARAMETER Experiment Name: Zm_42deg_Heat_P Parameter: Timepoint (hr) Value: 1
  misc_feature: MA Experiment 108522 PARAMETER Experiment Name: Zm_42deg_Heat_P Parameter: Tissue Value: Aerial
gcacgagaccattacctagaacatcctaatcgaaaacttcgatcccacgtcttctcaacctttcttcttctctcctcgagaaccccaatccaaacccccaaccgccaaaattcctacgagatatatcacagaaatatcgtcttggctcagatcgtgcccgagtgaggaggcagtgagttttgaggggacgcaggatcatggcgtcgtcgctggccgaggaggaggaggccttcgagcacacgcttctggtggtgcgcgaggtgtcagtgtacaagatcccgccgcgcaccaccagcggcggctacaagtgcggcgagtggctgcagtcggacaagatctggtccgggcgcctccgcgtggtgtcctgcggtgaccgctgcgagatccggctcgaggacccggccacgggggagctcttcgccgcctgcttcgtgctgccggggcagcgggagagcgccgtcgagaccgtgctcgactcctcccgctacttcgtgctccgcatcgaggacggcagggggaagcatgccttcgtcgggctcggcttcaacgagcgcaacgaagcattcgacttcaacgtcgccctctctgaccacgagaaatacgtcaagagggagcaggagaaggagaccacgggcgctggcggcgaggagactggcggcggtgagattgatatacatccggctgtcaatcgccgactcaaggaaggtgaaaccattaggataactgtaaaaaacaagccatcaactggaagtggtatgctttcagctgctggtttatctggagggaccactgcaaaacccaagacaagcatgcttctcgcgccacctccaggtgcagctgggaagcttcgatctcctcttccaccaccacctaacgaccctgcagctgcaaggatgaattctggacatactgcaggaatcagggctccaaaagagcccaccaagagaaataacgaccctttttcagatctttctgctataaagcaaaatctaccttcatctgctgaacccggacaaacaaagagcacaggagctggatgggcagcattctgacgatggatgcatgatctactgctactattggcatttgtttatctgaagaaggggaatgggtagttgaagcaccgaacaaggatctggaactgctggatgcctctacccctttcgaaactgaatggttaaaatgattgatcaacctaccagttccagttgtcacttgtcagtcgagaaataaacctttcccagagttgtattacccgtctcaccacatgaatggatgctcacattttctggatttagatacagcgtcccatcttgtttttatgttattcgtgctatgtttcacaaagcaataccagaatcatactgacctcgatgtgtattttgcggcgaaagattggaaatactgttacaagtgtgtc

SEQ ID NO: 7380 - protein, 284 aa, Zea mays subsp. mays
  peptide (1)..(284): Ceres Seq. ID no. 12362865
  misc_feature (8)..(284): Homolog of NCBI NO: 13384758 NR Description: RIKEN cDNA 1110005F07 [Mus musculus] unnamed protein product [Mus musculus]
  misc_feature (5)..(269): Homolog of NCBI NO: 22760612 NR Description: unnamed protein product [Homo sapiens]
  misc_feature (5)..(269): Homolog of NCBI NO: 31542528 NR Description: DKFZP566B183 protein [Homo sapiens] unnamed protein product [Homo sapiens]
  misc_feature (1)..(284): Homolog of NCBI NO: 37535352 NR Description: unknown protein [Oryza sativa (japonica
  misc_feature (7)..(284): Homolog of NCBI NO: 18379172 NR Description: Expressed protein; protein id: At1g03900.1, by cDNA: gi_14596174, supported by cDNA: gi_18377527 [Arabidopsis
  misc_feature (7)..(264): Homolog of NCBI NO: 14596175 NR Description: Unknown protein [Arabidopsis thaliana]
  misc_feature (7)..(284): Homolog of NCBI NO: 25406749 NR Description: hypothetical protein [imported] - Arabidopsis >gi|4204313|gb|AAD10694.1| Hypothetical protein [Arabidopsis
  misc_feature (8)..(284): Homolog of NCBI NO: 10435511 NR Description: unnamed protein product [Homo sapiens]
  misc_feature (8)..(284): Homolog of NCBI NO: 8922416 NR Description: hypothetical protein FLJ10420 [Homo sapiens] unnamed protein product [Homo sapiens] hypothetical protein FLJ10420 [Homo sapiens]
  misc_feature (5)..(269): Homolog of NCBI NO: 22760576 NR Description: unnamed protein product [Homo sapiens]
MASSLAEEEEAFEHTLLVVREVSVYKIPPRTTSGGYKCGEWLQSDKIWSGRLRVVSCGDRCEIRLEDPATGELFAACFVLPGQRESAVETVLDSSRYFVLRIEDGRGKHAFVGLGFNERNEAFDFNVALSDHEKYVKREQEKETTGAGGEETGGGEIDIHPAVNRRLKEGETIRITVKNKPSTGSGMLSAAGLSGGTTAKPKTSMLLAPPPGAAGKLRSPLPPPPNDPAAARMNSGHTAGIRAPKEPTKRNNDPFSDLSAIKQNLPSSAEPGQTKSTGAGWAAF

SEQ ID NO: 7381 - DNA, 1314 bp, Zea mays subsp. mays
  misc_feature (1)..(1314): Ceres Seq. ID no. 12344243
  misc_feature: MA Experiment ID: 108523 Result: Down-regulated in Transcription
  misc_feature: MA Experiment 108523 PARAMETER Experiment Name: Zm_42deg_Heat_P Parameter: Age (day) Value: 8
  misc_feature: MA Experiment 108523 PARAMETER Experiment Name: Zm_42deg_Heat_P Parameter: Organism Value: Zea mays
  misc_feature: MA Experiment 108523 PARAMETER Experiment Name: Zm_42deg_Heat_P Parameter: Plant Line Value: 35A19
  misc_feature: MA Experiment 108523 PARAMETER Experiment Name: Zm_42deg_Heat_P Parameter: Temperature (deg C) Value: 42 vs. 22
  misc_feature: MA Experiment 108523 PARAMETER Experiment Name: Zm_42deg_Heat_P Parameter: Timepoint (hr) Value: 6
  misc_feature: MA Experiment 108523 PARAMETER Experiment Name: Zm_42deg_Heat_P Parameter: Tissue Value: Aerial
  misc_feature: MA Experiment ID: 108544 Result: Down-regulated in Transcription
  misc_feature: MA Experiment ID: 20000535 Result: Down-regulated in Transcription
  misc_feature: MA Experiment 20000535 PARAMETER Experiment Name: Zm_Hybrid_Seed_Dev_P Parameter: DAP Value: 30 vs. 12
  misc_feature: MA Experiment 20000535 PARAMETER Experiment Name: Zm_Hybrid_Seed_Dev_P Parameter: Organism Value: Zea mays
  misc_feature: MA Experiment 20000535 PARAMETER Experiment Name: Zm_Hybrid_Seed_Dev_P Parameter: Plant Line Value: 35A19
  misc_feature: MA Experiment 20000535 PARAMETER Experiment Name: Zm_Hybrid_Seed_Dev_P Parameter: Tissue Value: Embryo vs. Unfert Floret
atgcgcctcgcggccgcttcgacagtccctcgcgttccatttgcttcggctcatctcagatcaagctagcgcacctgacacccaccacctccctcccagatccaccaccccagccatggccaccgcctttgactccccgacctcctcccccgccgccgcgcccttccacgacgaccctttcctccatttcgacggctcggcccccgccgccgccgacggcttcccggcctccccggacgcctacgcgccctcccccttcggcatgccccactccaacggcgacctccacgacgaccctttcgccgcacctgctgactccaacggtgggcccatccttccgccgcccaccgagatgggccgcgaggagggattcctgctccgcgagtggtgccgacaaaatgctattcaccttgaggaaaaagagaagaaggagaaggagctgaggagccaaatcatcgttgatgctgaagagtttaagaaagcttttgttgagaagagaaagctcaatgctgagacaagtaagggccaaaaccgtgacagggagaagcttttcctagcaaaccaggaaaagttccatgctggtgcagataagcaatactggaaggcgatatctgaacttatcccacatgagattgctaacatcgagaagagaggggcaaggaaagacaaggagaagaagcctgggatcgtggtgatccagggaccgaagcctgggaagccaacggacatggcacggatgcggcagatattgctgaagctgaagcacactcccccaccacacatgaagccacctccgccacctgccgcagctaccggaaaggatggagcaccagctgccgccgggaaggatggagctaagccagcaaccgttgccaacggcagtgtccctgagatggaaaaggctgctgcggaggcatcagtgccagcggcagcaccaccagcagcaactgagccgatcgcagctgcttaatctaatcatctgtggtaggaggatgtgaaaaatctcttattggagttgttgcagaggcggtggtggtgagtgaaactgaaaacgtgtgaatttccggcatggtggaggcatgcactgtgtatttgttacctcgattcatttacattactgctactatatattgttattgcattttgtagagaaggggcgggcgtatcctggttcatggtaataataaggttgtattaggaggatgtttggctgtattatgtttcttcttccaagtgtttgtaaatttcccttttgttattaaaactgattgtattgttaaatttttctttgttattaaaactgattgtattgct

SEQ ID NO: 7382 - protein, 322 aa, Zea mays subsp. mays
  peptide (1)..(322): Ceres Seq. ID no. 12344244
  misc_feature (256)..(318): Pfam Name: Glycoprotein GG/GX Pfam Description: Glycoprotein GG/GX
  misc_feature (30)..(317): Homolog of NCBI NO: 32487391 NR Description: OSJNBb0017I01.5 [Oryza sativa (japonica
  misc_feature (93)..(321): Homolog of NCBI NO: 34394059 NR Description: hypothetical protein [Oryza sativa (japonica
  misc_feature (59)..(322): Homolog of NCBI NO: 21536711 NR Description: unknown [Arabidopsis thaliana]
  misc_feature (59)..(317): Homolog of NCBI NO: 18399468 NR Description: expressed protein; protein id: At2g20760.1, by cDNA: 108956., supported by cDNA: gi_15982816, supported by gi_16323100 [Arabidopsis thaliana] >gi|25411992|pir||A84593
  misc_feature (44)..(274): Homolog of NCBI NO: 18405251 NR Description: expressed protein; protein id: At2g40060.1, by cDNA: 5046., supported by cDNA: gi_20260191 [Arabidopsis >gi|25366606|pir||G84824 hypothetical protein At2g40060
  misc_feature (44)..(274): Homolog of NCBI NO: 21593842 NR Description: unknown [Arabidopsis thaliana]
  misc_feature (74)..(270): Homolog of NCBI NO: 18409442 NR Description: putative protein; protein id: At3g51890.1,
  misc_feature (74)..(270): Homolog of NCBI NO: 11291712 NR Description: hypothetical protein [imported] - Arabidopsis
  misc_feature (118)..(270): Homolog of NCBI NO: 21617999 NR Description: unknown [Arabidopsis thaliana]
  misc_feature (256)..(322): Homolog of NCBI NO: 27375632 NR Description: blr0521 [Bradyrhizobium japonicum]
CASRPLRQSLAFHLLRLISDQASAPDTHHLPPRSTTPAMATAFDSPTSSPAAAPFHDDPFLHFDGSAPAAADGFPASPDAYAPSPFGMPHSNGDLHDDPFAAPADSNGGPILPPPTEMGREEGFLLREWCRQNAIHLEEKEKKEKELRSQIIVDAEEFKKAFVEKRKLNAETSKGQNRDREKLFLANQEKFHAGADKQYWKAISELIPHEIANIEKRGARKDKEKKPGIVVIQGPKPGKPTDMARMRQILLKLKHTPPPHMKPPPPPAAATGKDGAPAAAGKDGAKPATVANGSVPEMEKAAAEASVPAAAPPAATEPIAAA

SEQ ID NO: 7383 - protein, 284 aa, Zea mays subsp. mays
  peptide (1)..(284): Ceres Seq. ID no. 12344245
  misc_feature (218)..(280): Pfam Name: Glycoprotein GG/GX Pfam Description: Glycoprotein GG/GX
  misc_feature (1)..(279): Homolog of NCBI NO: 32487391 NR Description: OSJNBb0017I01.5 [Oryza sativa (japonica
  misc_feature (55)..(283): Homolog of NCBI NO: 34394059 NR Description: hypothetical protein [Oryza sativa (japonica
  misc_feature (21)..(284): Homolog of NCBI NO: 21536711 NR Description: unknown [Arabidopsis thaliana]
  misc_feature (21)..(279): Homolog of NCBI NO: 18399468 NR Description: expressed protein; protein id: At2g20760.1, by cDNA: 108956., supported by cDNA: gi_15982816, supported by gi_16323100 [Arabidopsis thaliana] >gi|25411992|pir||A84593
  misc_feature (6)..(236): Homolog of NCBI NO: 18405251 NR Description: expressed protein; protein id: At2g40060.1, by cDNA: 5046., supported by cDNA: gi_20260191 [Arabidopsis >gi|25366606|pir||G84824 hypothetical protein At2g40060
  misc_feature (6)..(236): Homolog of NCBI NO: 21593842 NR Description: unknown [Arabidopsis thaliana]
  misc_feature (36)..(232): Homolog of NCBI NO: 18409442 NR Description: putative protein; protein id: At3g51890.1,
  misc_feature (36)..(232): Homolog of NCBI NO: 11291712 NR Description: hypothetical protein [imported] - Arabidopsis
  misc_feature (80)..(232): Homolog of NCBI NO: 21617999 NR Description: unknown [Arabidopsis thaliana]
  misc_feature (218)..(284): Homolog of NCBI NO: 27375632 NR Description: blr0521 [Bradyrhizobium japonicum]
MATAFDSPTSSPAAAPFHDDPFLHFDGSAPAAADGFPASPDAYAPSPFGMPHSNGDLHDDPFAAPADSNGGPILPPPTEMGREEGFLLREWCRQNAIHLEEKEKKEKELRSQIIVDAEEFKKAFVEKRKLNAETSKGQNRDREKLFLANQEKFHAGADKQYWKAISELIPHEIANIEKRGARKDKEKKPGIVVIQGPKPGKPTDMARMRQILLKLKHTPPPHMKPPPPPAAATGKDGAPAAAGKDGAKPATVANGSVPEMEKAAAEASVPAAAPPAATEPIAAA

SEQ ID NO: 7384 - protein, 235 aa, Zea mays subsp. mays
  peptide (1)..(235): Ceres Seq. ID no. 12344246
  misc_feature (169)..(231): Pfam Name: Glycoprotein GG/GX Pfam Description: Glycoprotein GG/GX
  misc_feature (1)..(230): Homolog of NCBI NO: 32487391 NR Description: OSJNBb0017I01.5 [Oryza sativa (japonica
  misc_feature (6)..(234): Homolog of NCBI NO: 34394059 NR Description: hypothetical protein [Oryza sativa (japonica
  misc_feature (1)..(235): Homolog of NCBI NO: 21536711 NR Description: unknown [Arabidopsis thaliana]
  misc_feature (1)..(230): Homolog of NCBI NO: 18399468 NR Description: expressed protein; protein id: At2g20760.1, by cDNA: 108956., supported by cDNA: gi_15982816, supported by gi_16323100 [Arabidopsis thaliana] >gi|25411992|pir||A84593
  misc_feature (1)..(187): Homolog of NCBI NO: 18405251 NR Description: expressed protein; protein id: At2g40060.1, by cDNA: 5046., supported by cDNA: gi_20260191 [Arabidopsis >gi|25366606|pir||G84824 hypothetical protein At2g40060
  misc_feature (1)..(187): Homolog of NCBI NO: 21593842 NR Description: unknown [Arabidopsis thaliana]
  misc_feature (1)..(183): Homolog of NCBI NO: 18409442 NR Description: putative protein; protein id: At3g51890.1,
  misc_feature (1)..(183): Homolog of NCBI NO: 11291712 NR Description: hypothetical protein [imported] - Arabidopsis
  misc_feature (31)..(183): Homolog of NCBI NO: 21617999 NR Description: unknown [Arabidopsis thaliana]
  misc_feature (169)..(235): Homolog of NCBI NO: 27375632 NR Description: blr0521 [Bradyrhizobium japonicum]
MPHSNGDLHDDPFAAPADSNGGPILPPPTEMGREEGFLLREWCRQNAIHLEEKEKKEKELRSQIIVDAEEFKKAFVEKRKLNAETSKGQNRDREKLFLANQEKFHAGADKQYWKAISELIPHEIANIEKRGARKDKEKKPGIVVIQGPKPGKPTDMARMRQILLKLKHTPPPHMKPPPPPAAATGKDGAPAAAGKDGAKPATVANGSVPEMEKAAAEASVPAAAPPAATEPIAAA

SEQ ID NO: 7385 - DNA, 1466 bp, Zea mays subsp. mays
  misc_feature (1)..(1466): Ceres Seq. ID no. 12387022
  misc_feature: MA Experiment ID: 108523 Result: Up-regulated in Transcription
  misc_feature: MA Experiment 108523 PARAMETER Experiment Name: Zm_42deg_Heat_P Parameter: Age (day) Value: 8
  misc_feature: MA Experiment 108523 PARAMETER Experiment Name: Zm_42deg_Heat_P Parameter: Organism Value: Zea mays
  misc_feature: MA Experiment 108523 PARAMETER Experiment Name: Zm_42deg_Heat_P Parameter: Plant Line Value: 35A19
  misc_feature: MA Experiment 108523 PARAMETER Experiment Name: Zm_42deg_Heat_P Parameter: Temperature (deg C) Value: 42 vs. 22
  misc_feature: MA Experiment 108523 PARAMETER Experiment Name: Zm_42deg_Heat_P Parameter: Timepoint (hr) Value: 6
  misc_feature: MA Experiment 108523 PARAMETER Experiment Name: Zm_42deg_Heat_P Parameter: Tissue Value: Aerial
  misc_feature: MA Experiment ID: 108527 Result: Up-regulated in Transcription
  misc_feature: MA Experiment 108527 PARAMETER Experiment Name: Zm_5mM_NO_P Parameter: Age (day) Value: 8
  misc_feature: MA Experiment 108527 PARAMETER Experiment Name: Zm_5mM_NO_P Parameter: Organism Value: Zea mays
  misc_feature: MA Experiment 108527 PARAMETER Experiment Name: Zm_5mM_NO_P Parameter: Plant Line Value: 35A19
  misc_feature: MA Experiment 108527 PARAMETER Experiment Name: Zm_5mM_NO_P Parameter: Timepoint (hr) Value: 6
  misc_feature: MA Experiment 108527 PARAMETER Experiment Name: Zm_5mM_NO_P Parameter: Tissue Value: Aerial
  misc_feature: MA Experiment 108527 PARAMETER Experiment Name: Zm_5mM_NO_P Parameter: Treatment Value: 5mM NO vs. No Treatment
  misc_feature: MA Experiment ID: 108528 Result: Down-regulated in Transcription
  misc_feature: MA Experiment 108528 PARAMETER Experiment Name: Zm_Imbibed_Seeds_P Parameter: Age (day) Value: 5 vs. 2
  misc_feature: MA Experiment 108528 PARAMETER Experiment Name: Zm_Imbibed_Seeds_P Parameter: Organism Value: Zea mays
  misc_feature: MA Experiment 108528 PARAMETER Experiment Name: Zm_Imbibed_Seeds_P Parameter: Plant Line Value: 35A19
  misc_feature: MA Experiment 108528 PARAMETER Experiment Name: Zm_Imbibed_Seeds_P Parameter: Tissue Value: Aerial vs. Embryo
  misc_feature: MA Experiment ID: 108543 Result: Up-regulated in Transcription
  misc_feature: MA Experiment ID: 108547 Result: Down-regulated in Transcription
  misc_feature: MA Experiment 108547 PARAMETER Experiment Name: Zm_Imbibed_Seeds_P Parameter: Age (day) Value: 4 vs. 2
  misc_feature: MA Experiment 108547 PARAMETER Experiment Name: Zm_Imbibed_Seeds_P Parameter: Organism Value: Zea mays
  misc_feature: MA Experiment 108547 PARAMETER Experiment Name: Zm_Imbibed_Seeds_P Parameter: Plant Line Value: 35A19
  misc_feature: MA Experiment 108547 PARAMETER Experiment Name: Zm_Imbibed_Seeds_P Parameter: Tissue Value: Aerial vs. Embryo
  misc_feature: MA Experiment ID: 108548 Result: Up-regulated in Transcription
  misc_feature: MA Experiment 108548 PARAMETER Experiment Name: Zm_20uM_KNO3_H-to-L_P Parameter: Age (day) Value: 11
  misc_feature: MA Experiment 108548 PARAMETER Experiment Name: Zm_20uM_KNO3_H-to-L_P Parameter: Organism Value: Zea mays
  misc_feature: MA Experiment 108548 PARAMETER Experiment Name: Zm_20uM_KNO3_H-to-L_P Parameter: Plant Line Value: 35A19
  misc_feature: MA Experiment 108548 PARAMETER Experiment Name: Zm_20uM_KNO3_H-to-L_P Parameter: Timepoint (hr) Value: 4
  misc_feature: MA Experiment 108548 PARAMETER Experiment Name: Zm_20uM_KNO3_H-to-L_P Parameter: Tissue Value: Roots
  misc_feature: MA Experiment 108548 PARAMETER Experiment Name: Zm_20uM_KNO3_H-to-L_P Parameter: Treatment Value: 20uM KNO3 vs. 60mM KNO3
  misc_feature: MA Experiment ID: 20000479 Result: Down-regulated in Transcription
  misc_feature: MA Experiment 20000479 PARAMETER Experiment Name: Zm_Drought_P Parameter: Age (day) Value: 10
  misc_feature: MA Experiment 20000479 PARAMETER Experiment Name: Zm_Drought_P Parameter: Organism Value: Zea mays
  misc_feature: MA Experiment 20000479 PARAMETER Experiment Name: Zm_Drought_P Parameter: Plant Line Value: 35A19
  misc_feature: MA Experiment 20000479 PARAMETER Experiment Name: Zm_Drought_P Parameter: Timepoint (hr) Value: 48
  misc_feature: MA Experiment 20000479 PARAMETER Experiment Name: Zm_Drought_P Parameter: Tissue Value: Aerial
  misc_feature: MA Experiment 20000479 PARAMETER Experiment Name: Zm_Drought_P Parameter: Treatment Value: Drought vs. No Drought
  misc_feature: MA Experiment ID: 20000488 Result: Up-regulated in Transcription
  misc_feature: MA Experiment 20000488 PARAMETER Experiment Name: Zm_50mM_NH4NO3_L_to_H_P Parameter: Organism Value: Zea mays
  misc_feature: MA Experiment 20000488 PARAMETER Experiment Name: Zm_50mM_NH4NO3_L_to_H_P Parameter: Timepoint (hr) Value: 8
  misc_feature: MA Experiment 20000488 PARAMETER Experiment Name: Zm_50mM_NH4NO3_L_to_H_P Parameter: Tissue Value: Leaves
  misc_feature: MA Experiment 20000488 PARAMETER Experiment Name: Zm_50mM_NH4NO3_L_to_H_P Parameter: Treatment Value: 50mM NH4NO3 vs. 100mM Mannitol
  misc_feature: MA Experiment ID: 20001613 Result: Up-regulated in Transcription
  misc_feature: MA Experiment 20001613 PARAMETER Experiment Name: Zm_50ppm_KNO3_L-to-H_P Parameter: Age (day) Value: 20
  misc_feature: MA Experiment 20001613 PARAMETER Experiment Name: Zm_50ppm_KNO3_L-to-H_P Parameter: Organism Value: Zea mays
  misc_feature: MA Experiment 20001613 PARAMETER Experiment Name: Zm_50ppm_KNO3_L-to-H_P Parameter: Plant Line Value: 35A19
  misc_feature: MA Experiment 20001613 PARAMETER Experiment Name: Zm_50ppm_KNO3_L-to-H_P Parameter: Timepoint (hr) Value: 24
  misc_feature: MA Experiment 20001613 PARAMETER Experiment Name: Zm_50ppm_KNO3_L-to-H_P Parameter: Tissue Value: Roots
  misc_feature: MA Experiment 20001613 PARAMETER Experiment Name: Zm_50ppm_KNO3_L-to-H_P Parameter: Treatment Value: 50ppm KNO3 vs. 50ppm KCl
  misc_feature: MA Experiment ID: 20001614 Result: Up-regulated in Transcription
  misc_feature: MA Experiment 20001614 PARAMETER Experiment Name: Zm_50ppm_KNO3_L-to-H_P Parameter: Age (day) Value: 21
  misc_feature: MA Experiment 20001614 PARAMETER Experiment Name: Zm_50ppm_KNO3_L-to-H_P Parameter: Organism Value: Zea mays
  misc_feature: MA Experiment 20001614 PARAMETER Experiment Name: Zm_50ppm_KNO3_L-to-H_P Parameter: Plant Line Value: 35A19
  misc_feature: MA Experiment 20001614 PARAMETER Experiment Name: Zm_50ppm_KNO3_L-to-H_P Parameter: Timepoint (hr) Value: 48
  misc_feature: MA Experiment 20001614 PARAMETER Experiment Name: Zm_50ppm_KNO3_L-to-H_P Parameter: Tissue Value: Roots
  misc_feature: MA Experiment 20001614 PARAMETER Experiment Name: Zm_50ppm_KNO3_L-to-H_P Parameter: Treatment Value: 50ppm KNO3 vs. 50ppm KCl
gcgtcaccatccatttgacgaggcggtttatcccccagcaccccaaccaacctttccacgtaccaccgggtttctgtccgcgccccgcccttcaaaagcaggtccgcacgccggccggcgagacagacgacaccaccacgccgggacgggaggcacaggtgcggtctgcgtcgagagttggtccactggcaggccggaatgaagaagtgcgcgtcggagctggagctggaggcgttcatccgggagagcggcgaggacgcccgcgccgccgccggaggtagcagtccggggtgcggtggatcaagcgatcccggagggagcggcgtcttctcacccggcttcggtttcgccgactcggacaccatggatggaggcagttggtggtacgggaacgtccgcacgccgaacccagtcatgtcgcaggcggcgtccatatccgctagccccgggctaaccacctcagccaatcatgctcttgaaagcgagtcagactccgacagcgaatcactgtatgaggtagagggagttccatacgagcgaggtaacagatccattgagacgaagcgaataagaaggatggtgtccaatagggagtctgcgcggcggtctaggaggaggaaacaggcacagttgtctgaccttgagtcacaggttgaacgactcaaaggtgaaaacgcaacactgttccagcaactttcagatgccaaccaacagttcagtactgcagtcacagacaacagaatcctcaaatccgatgtagaagcgttaagaattaaggtaaagatggcagaggatatggtagcgagaagtgctgtatcgtgtggcctaggcgaccttggcctggcaccatacgtgaactcaaggaagatgtgccaagctttgaatgtgctcacagggttggatttactagggagtgatgcgttcaggggtccaaccgcaggtacacgagtacagaactcaccagtacagagcactgcaagcctagagagtctggataaccgaaagtccaacgaggtgaccagttgcgcggcggacatttggccttgagcttcaagccattgatctgattcaaagcttgctccaccctcaaaaaaaggaccagagtttgtcaactcaaatagctggtggcttgagcagagcttctggcacgagttctcttgaaccatatttccacataagctttataggatgcatcactcttttgatgtcacttagtttcaagtataaaatgaagctgtctttgtacaaagctgcaaatgagaagtaaatgaaacgtcctggacaaacttgtgaagtaggaatgatacataggctctatttccaggtcagatgagacagttatgtttacaacaaaaagcaatacatgttgtttagaaaccgctattaattcacaggaatgttcaatccagtacaagtcatctagtagatttgcacccctaccttctagtagattcaaccatgttttc

SEQ ID NO: 7386 - protein, 282 aa, Zea mays subsp. mays
  peptide (1)..(282): Ceres Seq. ID no. 12387023
  misc_feature (118)..(179): Pfam Name: bZIP transcription factor Pfam Description: bZIP transcription factor
  misc_feature (1)..(282): Homolog of NCBI NO: 13365774 NR Description: RISBZ5 [Oryza sativa]
  misc_feature (23)..(252): Homolog of NCBI NO: 7489562 NR Description: probable transcription activator - rice
  misc_feature (76)..(248): Homolog of NCBI NO: 13365772 NR Description: RISBZ4 [Oryza sativa]
  misc_feature (95)..(248): Homolog of NCBI NO: 7489563 NR Description: probable transcription activator 2 - rice plasmid
  misc_feature (1)..(282): Homolog of NCBI NO: 18420842 NR Description: bZIP protein, G/HBF-1-related; protein id: supported by cDNA: gi_10954096 [Arabidopsis thaliana]
  misc_feature (119)..(203): Homolog of NCBI NO: 3287204 NR Description: RITA-1 protein [Oryza sativa]
  misc_feature (128)..(203): Homolog of NCBI NO: 3287202 NR Description: RITA-2 protein [Oryza sativa]
  misc_feature (1)..(203): Homolog of NCBI NO: 30691973 NR Description: bZIP family transcription factor [Arabidopsis >gi|15450641|gb|AAK96592.1| AT5g28770/T32B20_60 [Arabidopsis >gi|17386126|gb|AAL38609.1|AF446876_1 AT5g28770/T32B20_60
  misc_feature (1)..(203): Homolog of NCBI NO: 30691978 NR Description: bZIP family transcription factor [Arabidopsis
MKKCASELELEAFIRESGEDARAAAGGSSPGCGGSSDPGGSGVFSPGFGFADSDTMDGGSWWYGNVRTPNPVMSQAASISASPGLTTSANHALESESDSDSESLYEVEGVPYERGNRSIETKRIRRMVSNRESARRSRRRKQAQLSDLESQVERLKGENATLFQQLSDANQQFSTAVTDNRILKSDVEALRIKVKMAEDMVARSAVSCGLGDLGLAPYVNSRKMCQALNVLTGLDLLGSDAFRGPTAGTRVQNSPVQSTASLESLDNRKSNEVTSCAADIWP

SEQ ID NO: 7387 - protein, 227 aa, Zea mays subsp. mays
  peptide (1)..(227): Ceres Seq. ID no. 12387024
  misc_feature (63)..(124): Pfam Name: bZIP transcription factor Pfam Description: bZIP transcription factor
  misc_feature (1)..(227): Homolog of NCBI NO: 13365774 NR Description: RISBZ5 [Oryza sativa]
  misc_feature (1)..(197): Homolog of NCBI NO: 7489562 NR Description: probable transcription activator - rice
  misc_feature (21)..(193): Homolog of NCBI NO: 13365772 NR Description: RISBZ4 [Oryza sativa]
  misc_feature (40)..(193): Homolog of NCBI NO: 7489563 NR Description: probable transcription activator 2 - rice plasmid
  misc_feature (1)..(227): Homolog of NCBI NO: 18420842 NR Description: bZIP protein, G/HBF-1-related; protein id: supported by cDNA: gi_10954096 [Arabidopsis thaliana]
  misc_feature (64)..(148): Homolog of NCBI NO: 3287204 NR Description: RITA-1 protein [Oryza sativa]
  misc_feature (73)..(148): Homolog of NCBI NO: 3287202 NR Description: RITA-2 protein [Oryza sativa]
  misc_feature (1)..(148): Homolog of NCBI NO: 30691973 NR Description: bZIP family transcription factor [Arabidopsis >gi|15450641|gb|AAK96592.1| AT5g28770/T32B20_60 [Arabidopsis >gi|17386126|gb|AAL38609.1|AF446876_1 AT5g28770/T32B20_60
  misc_feature (1)..(148): Homolog of NCBI NO: 30691978 NR Description: bZIP family transcription factor [Arabidopsis
MDGGSWWYGNVRTPNPVMSQAASISASPGLTTSANHALESESDSDSESLYEVEGVPYERGNRSIETKRIRRMVSNRESARRSRRRKQAQLSDLESQVERLKGENATLFQQLSDANQQFSTAVTDNRILKSDVEALRIKVKMAEDMVARSAVSCGLGDLGLAPYVNSRKMCQALNVLTGLDLLGSDAFRGPTAGTRVQNSPVQSTASLESLDNRKSNEVTSCAADIWP

SEQ ID NO: 7388 - protein, 210 aa, Zea mays subsp. mays
  peptide (1)..(210): Ceres Seq. ID no. 12387025
  misc_feature (46)..(107): Pfam Name: bZIP transcription factor Pfam Description: bZIP transcription factor
  misc_feature (1)..(210): Homolog of NCBI NO: 13365774 NR Description: RISBZ5 [Oryza sativa]
  misc_feature (1)..(180): Homolog of NCBI NO: 7489562 NR Description: probable transcription activator - rice
  misc_feature (4)..(176): Homolog of NCBI NO: 13365772 NR Description: RISBZ4 [Oryza sativa]
  misc_feature (23)..(176): Homolog of NCBI NO: 7489563 NR Description: probable transcription activator 2 - rice plasmid
  misc_feature (1)..(210): Homolog of NCBI NO: 18420842 NR Description: bZIP protein, G/HBF-1-related; protein id: supported by cDNA: gi_10954096 [Arabidopsis thaliana]
  misc_feature (47)..(131): Homolog of NCBI NO: 3287204 NR Description: RITA-1 protein [Oryza sativa]
  misc_feature (56)..(131): Homolog of NCBI NO: 3287202 NR Description: RITA-2 protein [Oryza sativa]
  misc_feature (1)..(131): Homolog of NCBI NO: 30691973 NR Description: bZIP family transcription factor [Arabidopsis >gi|15450641|gb|AAK96592.1| AT5g28770/T32B20_60 [Arabidopsis >gi|17386126|gb|AAL38609.1|AF446876_1 AT5g28770/T32B20_60
  misc_feature (1)..(131): Homolog of NCBI NO: 30691978 NR Description: bZIP family transcription factor [Arabidopsis
MSQAASISASPGLTTSANHALESESDSDSESLYEVEGVPYERGNRSIETKRIRRMVSNRESARRSRRRKQAQLSDLESQVERLKGENATLFQQLSDANQQFSTAVTDNRILKSDVEALRIKVKMAEDMVARSAVSCGLGDLGLAPYVNSRKMCQALNVLTGLDLLGSDAFRGPTAGTRVQNSPVQSTASLESLDNRKSNEVTSCAADIWP

SEQ ID NO: 7389 - DNA, 1492 bp, Zea mays subsp. mays
  misc_feature (1)..(1492): Ceres Seq. ID no. 12408826
  misc_feature: MA Experiment ID: 108529 Result: Up-regulated in Transcription
  misc_feature: MA Experiment 108529 PARAMETER Experiment Name: Zm_Imbibed_Seeds_P Parameter: Age (day) Value: 5 vs. 2
  misc_feature: MA Experiment 108529 PARAMETER Experiment Name: Zm_Imbibed_Seeds_P Parameter: Organism Value: Zea mays
  misc_feature: MA Experiment 108529 PARAMETER Experiment Name: Zm_Imbibed_Seeds_P Parameter: Plant Line Value: 35A19
  misc_feature: MA Experiment 108529 PARAMETER Experiment Name: Zm_Imbibed_Seeds_P Parameter: Tissue Value: Roots vs. Embryo
  misc_feature: MA Experiment ID: 108535 Result: Down-regulated in Transcription
  misc_feature: MA Experiment 108535 PARAMETER Experiment Name: Zm_Meristem_P Parameter: Age (day) Value: 8
  misc_feature: MA Experiment 108535 PARAMETER Experiment Name: Zm_Meristem_P Parameter: Organism Value: Zea mays
  misc_feature: MA Experiment 108535 PARAMETER Experiment Name: Zm_Meristem_P Parameter: Plant Line Value: 35A19
  misc_feature: MA Experiment 108535 PARAMETER Experiment Name: Zm_Meristem_P Parameter: Tissue Value: Root Meristem vs. Above Root Meristem
  misc_feature: MA Experiment ID: 108543 Result: Up-regulated in Transcription
  misc_feature: MA Experiment ID: 108546 Result: Up-regulated in Transcription
  misc_feature: MA Experiment 108546 PARAMETER Experiment Name: Zm_Imbibed_Seeds_P Parameter: Age (day) Value: 3 vs. 2
  misc_feature: MA Experiment 108546 PARAMETER Experiment Name: Zm_Imbibed_Seeds_P Parameter: Organism Value: Zea mays
  misc_feature: MA Experiment 108546 PARAMETER Experiment Name: Zm_Imbibed_Seeds_P Parameter: Plant Line Value: 35A19
  misc_feature: MA Experiment 108546 PARAMETER Experiment Name: Zm_Imbibed_Seeds_P Parameter: Tissue Value: Roots vs. Embryo
  misc_feature: MA Experiment ID: 108559 Result: Down-regulated in Transcription
  misc_feature: MA Experiment 108559 PARAMETER Experiment Name: Zm_5mM_NO_P Parameter: Age (day) Value: 8
  misc_feature: MA Experiment 108559 PARAMETER Experiment Name: Zm_5mM_NO_P Parameter: Organism Value: Zea mays
  misc_feature: MA Experiment 108559 PARAMETER Experiment Name: Zm_5mM_NO_P Parameter: Plant Line Value: 35A19
  misc_feature: MA Experiment 108559 PARAMETER Experiment Name: Zm_5mM_NO_P Parameter: Timepoint (hr) Value: 12
  misc_feature: MA Experiment 108559 PARAMETER Experiment Name: Zm_5mM_NO_P Parameter: Tissue Value: Aerial
  misc_feature: MA Experiment 108559 PARAMETER Experiment Name: Zm_5mM_NO_P Parameter: Treatment Value: 5mM NO vs. No Treatment
  misc_feature: MA Experiment ID: 108689 Result: Up-regulated in Transcription
  misc_feature: MA Experiment 108689 PARAMETER Experiment Name: Zm_Drought_Roots_P Parameter: Age (day) Value: 9
  misc_feature: MA Experiment 108689 PARAMETER Experiment Name: Zm_Drought_Roots_P Parameter: Organism Value: Zea mays
  misc_feature: MA Experiment 108689 PARAMETER Experiment Name: Zm_Drought_Roots_P Parameter: Plant Line Value: 35A19
  misc_feature: MA Experiment 108689 PARAMETER Experiment Name: Zm_Drought_Roots_P Parameter: Timepoint (hr) Value: 24
  misc_feature: MA Experiment 108689 PARAMETER Experiment Name: Zm_Drought_Roots_P Parameter: Tissue Value: Roots
  misc_feature: MA Experiment 108689 PARAMETER Experiment Name: Zm_Drought_Roots_P Parameter: Treatment Value: Drought vs. No Drought
cccggacctctctctctctctctctcctcccttccatccaggctgccaagccgcctccggctccaccttaccggccggagataagaagaccctgatgcggctgcggccgcggcggccggaggcctgaggttggttggatatgggtggagtgacttcgtccgtggcctctaagatggccttcttccctcccgacccgccgtcttacggcgtggtggacgaggaggacgaggacgcggcgtgcaacaaggtggcaacaacgaggagggtggcgatgacgggcgtgcggtggagcgtgggcgtggaggcgaggcgggtgcgcacgcggcgaggctccgacatcatcgccgtctacgtgcggcaccccggggctagcctcaccctcctcttctcccacggcaacgccgccgacctcggcaagatgtacggcatcttcgtcgagctcagcgaacgactccacgtcaacctcatggggtatgattactctggttatgggcagtcatcaggcaagccaagtgaagctaatacctttgctgacatagaggctgcatacaagtgcctcgtggacgtctatggaactagggaagaagacattgttctgtatggccagtctgttggcagcggaccaacccttgatctagctgttcgtttcgatcgcgtaagagctgtggttctgcacagtccaatactgtctggattgcgtgtcatgtattctgtgaagaaaacgtactggtttgacatatacaagaacatcgacaaaatcccgcatgttaaatgcccggttttggtaatccatggcaccaaagatgacgtggtggactgctcccatggcaagcggctctacgagctgtgccagcacaagtacgaacccctgtggatcgagggaggtgaccatggcaacctggagaaattcccagtgttcattcgacatctgaagaagttcttactgtccgtaaagaagctgccatatgaaaaagacgccgcggccgagcacgagccacgggcagctgagaacagaacgcagcatggcggcgaagccatctccgaggctcctcctcgcatgatctcgcggaggctagagtcatcgaagaagagcacgatccatgaagcaaagcctaggccgagcagcgagcacacggataagcgcaggcgaagcacgggccacagggagaaggcgaggtccagcacagacaggagagagagatcgaggagaagcgtcgactgcttcgacagcatcctcgaacacgagcagccggaaaggccaaggaaaagcttcgacaggatcggagagaagattagagcaatgggtttgtgcaatgtcgactgcttcaaagagcctcctgatagcactgagctttccagaggtagttgagtggaaaaggaattctggttgctgtcagagtcagtatttttcttttcccttgctgctttagatacaaagaaaactacagctgtgtgatggcaatgttaatcataagatgttcacgaacagagc

SEQ ID NO: 7390 - protein, 409 aa, Zea mays subsp. mays
  peptide (1)..(409): Ceres Seq. ID no. 12408827
  misc_feature (110)..(178): Pfam Name: alpha/beta hydrolase fold Pfam Description: alpha/beta hydrolase fold
  misc_feature (1)..(365): Homolog of NCBI NO: 15232168 NR Description: unknown protein; protein id: At3g01690.1 thaliana] >gi|6016726|gb|AAF01552.1|AC009325_22 unknown protein thaliana] >gi|6091713|gb|AAF03425.1|AC010797_1 unknown protein
  misc_feature (1)..(387): Homolog of NCBI NO: 15241394 NR Description: putative protein; protein id: At5g14390.1, by cDNA: gi_17529313 [Arabidopsis thaliana]
  misc_feature (1)..(387): Homolog of NCBI NO: 15233975 NR Description: putative protein; protein id: At4g24760.1, by cDNA: 121159., supported by cDNA: gi_18175920 [Arabidopsis
  misc_feature (1)..(403): Homolog of NCBI NO: 15230760 NR Description: unknown protein; protein id: At3g30380.1 thaliana] >gi|9294341|dbj|BAB02238.1| contains similarity to
  misc_feature (1)..(337): Homolog of NCBI NO: 34911338 NR Description: P0519D04.38 [Oryza sativa (japonica
  misc_feature (1)..(340): Homolog of NCBI NO: 10177798 NR Description: emb|CAB87778.1~gene_id:MXA21.9~strong similarity unknown protein [Arabidopsis thaliana] unknown protein [Arabidopsis thaliana]
  misc_feature (1)..(271): Homolog of NCBI NO: 22330474 NR Description: hypothetical protein; protein id: At1g66900.1, by cDNA: gi_17979070 [Arabidopsis thaliana] unknown protein [Arabidopsis thaliana]
  misc_feature (1)..(359): Homolog of NCBI NO: 9802758 NR Description: Hypothetical protein [Arabidopsis thaliana]
  misc_feature (1)..(340): Homolog of NCBI NO: 15240861 NR Description: putative protein; protein id: At5g38220.1
  misc_feature (1)..(338): Homolog of NCBI NO: 25352159 NR Description: F21F23.4 protein - Arabidopsis thaliana Strong similarity to a hypothetical protein F22K18.40 gi|7485972
MGGVTSSVASKMAFFPPDPPSYGVVDEEDEDAACNKVATTRRVAMTGVRWSVGVEARRVRTRRGSDIIAVYVRHPGASLTLLFSHGNAADLGKMYGIFVELSERLHVNLMGYDYSGYGQSSGKPSEANTFADIEAAYKCLVDVYGTREEDIVLYGQSVGSGPTLDLAVRFDRVRAVVLHSPILSGLRVMYSVKKTYWFDIYKNIDKIPHVKCPVLVIHGTKDDVVDCSHGKRLYELCQHKYEPLWIEGGDHGNLEKFPVFIRHLKKFLLSVKKLPYEKDAAAEHEPRAAENRTQHGGEAISEAPPRMISRRLESSKKSTIHEAKPRPSSEHTDKRRRSTGHREKARSSTDRRERSRRSVDCFDSILEHEQPERPRKSFDRIGEKIRAMGLCNVDCFKEPPDSTELSRGS

SEQ ID NO: 7391 - protein, 398 aa, Zea mays subsp. mays
  peptide (1)..(398): Ceres Seq. ID no. 12408828
  misc_feature (99)..(167): Pfam Name: alpha/beta hydrolase fold Pfam Description: alpha/beta hydrolase fold
  misc_feature (1)..(354): Homolog of NCBI NO: 15232168 NR Description: unknown protein; protein id: At3g01690.1 thaliana] >gi|6016726|gb|AAF01552.1|AC009325_22 unknown protein thaliana] >gi|6091713|gb|AAF03425.1|AC010797_1 unknown protein
  misc_feature (1)..(376): Homolog of NCBI NO: 15241394 NR Description: putative protein; protein id: At5g14390.1, by cDNA: gi_17529313 [Arabidopsis thaliana]
  misc_feature (1)..(376): Homolog of NCBI NO: 15233975 NR Description: putative protein; protein id: At4g24760.1, by cDNA: 121159., supported by cDNA: gi_18175920 [Arabidopsis
  misc_feature (1)..(392): Homolog of NCBI NO: 15230760 NR Description: unknown protein; protein id: At3g30380.1 thaliana] >gi|9294341|dbj|BAB02238.1| contains similarity to
  misc_feature (1)..(326): Homolog of NCBI NO: 34911338 NR Description: P0519D04.38 [Oryza sativa (japonica
  misc_feature (1)..(329): Homolog of NCBI NO: 10177798 NR Description: emb|CAB87778.1~gene_id:MXA21.9~strong similarity unknown protein [Arabidopsis thaliana] unknown protein [Arabidopsis thaliana]
  misc_feature (1)..(260): Homolog of NCBI NO: 22330474 NR Description: hypothetical protein; protein id: At1g66900.1, by cDNA: gi_17979070 [Arabidopsis thaliana] unknown protein [Arabidopsis thaliana]
  misc_feature (1)..(348): Homolog of NCBI NO: 9802758 NR Description: Hypothetical protein [Arabidopsis thaliana]
  misc_feature (1)..(329): Homolog of NCBI NO: 15240861 NR Description: putative protein; protein id: At5g38220.1
  misc_feature (1)..(327): Homolog of NCBI NO: 25352159 NR Description: F21F23.4 protein - Arabidopsis thaliana Strong similarity to a hypothetical protein F22K18.40 gi|7485972
MAFFPPDPPSYGVVDEEDEDAACNKVATTRRVAMTGVRWSVGVEARRVRTRRGSDIIAVYVRHPGASLTLLFSHGNAADLGKMYGIFVELSERLHVNLMGYDYSGYGQSSGKPSEANTFADIEAAYKCLVDVYGTREEDIVLYGQSVGSGPTLDLAVRFDRVRAVVLHSPILSGLRVMYSVKKTYWFDIYKNIDKIPHVKCPVLVIHGTKDDVVDCSHGKRLYELCQHKYEPLWIEGGDHGNLEKFPVFIRHLKKFLLSVKKLPYEKDAAAEHEPRAAENRTQHGGEAISEAPPRMISRRLESSKKSTIHEAKPRPSSEHTDKRRRSTGHREKARSSTDRRERSRRSVDCFDSILEHEQPERPRKSFDRIGEKIRAMGLCNVDCFKEPPDSTELSRGS

SEQ ID NO: 7392 - protein, 365 aa, Zea mays subsp. mays
  peptide (1)..(365): Ceres Seq. ID no. 12408829
  misc_feature (66)..(134): Pfam Name: alpha/beta hydrolase fold Pfam Description: alpha/beta hydrolase fold
  misc_feature (1)..(321): Homolog of NCBI NO: 15232168 NR Description: unknown protein; protein id: At3g01690.1 thaliana] >gi|6016726|gb|AAF01552.1|AC009325_22 unknown protein thaliana] >gi|6091713|gb|AAF03425.1|AC010797_1 unknown protein
  misc_feature (1)..(343): Homolog of NCBI NO: 15241394 NR Description: putative protein; protein id: At5g14390.1, by cDNA: gi_17529313 [Arabidopsis thaliana]
  misc_feature (1)..(343): Homolog of NCBI NO: 15233975 NR Description: putative protein; protein id: At4g24760.1, by cDNA: 121159., supported by cDNA: gi_18175920 [Arabidopsis
  misc_feature (1)..(359): Homolog of NCBI NO: 15230760 NR Description: unknown protein; protein id: At3g30380.1 thaliana] >gi|9294341|dbj|BAB02238.1| contains similarity to
  misc_feature (1)..(293): Homolog of NCBI NO: 34911338 NR Description: P0519D04.38 [Oryza sativa (japonica
  misc_feature (1)..(296): Homolog of NCBI NO: 10177798 NR Description: emb|CAB87778.1~gene_id:MXA21.9~strong similarity unknown protein [Arabidopsis thaliana] unknown protein [Arabidopsis thaliana]
  misc_feature (1)..(227): Homolog of NCBI NO: 22330474 NR Description: hypothetical protein; protein id: At1g66900.1, by cDNA: gi_17979070 [Arabidopsis thaliana] unknown protein [Arabidopsis thaliana]
  misc_feature (1)..(315): Homolog of NCBI NO: 9802758 NR Description: Hypothetical protein [Arabidopsis thaliana]
  misc_feature (1)..(296): Homolog of NCBI NO: 15240861 NR Description: putative protein; protein id: At5g38220.1
  misc_feature (1)..(294): Homolog of NCBI NO: 25352159 NR Description: F21F23.4 protein - Arabidopsis thaliana Strong similarity to a hypothetical protein F22K18.40 gi|7485972
MTGVRWSVGVEARRVRTRRGSDIIAVYVRHPGASLTLLFSHGNAADLGKMYGIFVELSERLHVNLMGYDYSGYGQSSGKPSEANTFADIEAAYKCLVDVYGTREEDIVLYGQSVGSGPTLDLAVRFDRVRAVVLHSPILSGLRVMYSVKKTYWFDIYKNIDKIPHVKCPVLVIHGTKDDVVDCSHGKRLYELCQHKYEPLWIEGGDHGNLEKFPVFIRHLKKFLLSVKKLPYEKDAAAEHEPRAAENRTQHGGEAISEAPPRMISRRLESSKKSTIHEAKPRPSSEHTDKRRRSTGHREKARSSTDRRERSRRSVDCFDSILEHEQPERPRKSFDRIGEKIRAMGLCNVDCFKEPPDSTELSRGS

SEQ ID NO: 7393 - DNA, 1751 bp, Zea mays subsp. mays
  misc_feature (1)..(1751): Ceres Seq. ID no. 12408818
  misc_feature: MA Experiment ID: 108504 Result: Down-regulated in Transcription
  misc_feature: MA Experiment 108504 PARAMETER Experiment Name: Zm_Drought_P Parameter: Age (day) Value: 8
  misc_feature: MA Experiment 108504 PARAMETER Experiment Name: Zm_Drought_P Parameter: Organism Value: Zea mays
  misc_feature: MA Experiment 108504 PARAMETER Experiment Name: Zm_Drought_P Parameter: Plant Line Value: 35A19
  misc_feature: MA Experiment 108504 PARAMETER Experiment Name: Zm_Drought_P Parameter: Timepoint (hr) Value: 12
  misc_feature: MA Experiment 108504 PARAMETER Experiment Name: Zm_Drought_P Parameter: Tissue Value: Aerial
  misc_feature: MA Experiment 108504 PARAMETER Experiment Name: Zm_Drought_P Parameter: Treatment Value: Drought vs. No Drought
  misc_feature: MA Experiment ID: 108522 Result: Down-regulated in Transcription
  misc_feature: MA Experiment 108522 PARAMETER Experiment Name: Zm_42deg_Heat_P Parameter: Age (day) Value: 8
  misc_feature: MA Experiment 108522 PARAMETER Experiment Name: Zm_42deg_Heat_P Parameter: Organism Value: Zea mays
  misc_feature: MA Experiment 108522 PARAMETER Experiment Name: Zm_42deg_Heat_P Parameter: Plant Line Value: 35A19
  misc_feature: MA Experiment 108522 PARAMETER Experiment Name: Zm_42deg_Heat_P Parameter: Temperature (deg C) Value: 42 vs. 22
  misc_feature: MA Experiment 108522 PARAMETER Experiment Name: Zm_42deg_Heat_P Parameter: Timepoint (hr) Value: 1
  misc_feature: MA Experiment 108522 PARAMETER Experiment Name: Zm_42deg_Heat_P Parameter: Tissue Value: Aerial
  misc_feature: MA Experiment ID: 108523 Result: Down-regulated in Transcription
  misc_feature: MA Experiment 108523 PARAMETER Experiment Name: Zm_42deg_Heat_P Parameter: Age (day) Value: 8
  misc_feature: MA Experiment 108523 PARAMETER Experiment Name: Zm_42deg_Heat_P Parameter: Organism Value: Zea mays
  misc_feature: MA Experiment 108523 PARAMETER Experiment Name: Zm_42deg_Heat_P Parameter: Plant Line Value: 35A19
  misc_feature: MA Experiment 108523 PARAMETER Experiment Name: Zm_42deg_Heat_P Parameter: Temperature (deg C) Value: 42 vs. 22
  misc_feature: MA Experiment 108523 PARAMETER Experiment Name: Zm_42deg_Heat_P Parameter: Timepoint (hr) Value: 6
  misc_feature: MA Experiment 108523 PARAMETER Experiment Name: Zm_42deg_Heat_P Parameter: Tissue Value: Aerial
  misc_feature: MA Experiment ID: 108529 Result: Down-regulated in Transcription
  misc_feature: MA Experiment 108529 PARAMETER Experiment Name: Zm_Imbibed_Seeds_P Parameter: Age (day) Value: 5 vs. 2
  misc_feature: MA Experiment 108529 PARAMETER Experiment Name: Zm_Imbibed_Seeds_P Parameter: Organism Value: Zea mays
  misc_feature: MA Experiment 108529 PARAMETER Experiment Name: Zm_Imbibed_Seeds_P Parameter: Plant Line Value: 35A19
  misc_feature: MA Experiment 108529 PARAMETER Experiment Name: Zm_Imbibed_Seeds_P Parameter: Tissue Value: Roots vs. Embryo
  misc_feature: MA Experiment ID: 108536 Result: Down-regulated in Transcription
  misc_feature: MA Experiment 108536 PARAMETER Experiment Name: Zm_Meristem_P Parameter: Age (day) Value: 8
  misc_feature: MA Experiment 108536 PARAMETER Experiment Name: Zm_Meristem_P Parameter: Organism Value: Zea mays
  misc_feature: MA Experiment 108536 PARAMETER Experiment Name: Zm_Meristem_P Parameter: Plant Line Value: 35A19
  misc_feature: MA Experiment 108536 PARAMETER Experiment Name: Zm_Meristem_P Parameter: Tissue Value: Shoot Meristem vs. Above Shoot Meristem
  misc_feature: MA Experiment ID: 108543 Result: Down-regulated in Transcription
  misc_feature: MA Experiment ID: 108546 Result: Down-regulated in Transcription
  misc_feature: MA Experiment 108546 PARAMETER Experiment Name: Zm_Imbibed_Seeds_P Parameter: Age (day) Value: 3 vs. 2
  misc_feature: MA Experiment 108546 PARAMETER Experiment Name: Zm_Imbibed_Seeds_P Parameter: Organism Value: Zea mays
  misc_feature: MA Experiment 108546 PARAMETER Experiment Name: Zm_Imbibed_Seeds_P Parameter: Plant Line Value: 35A19
  misc_feature: MA Experiment 108546 PARAMETER Experiment Name: Zm_Imbibed_Seeds_P Parameter: Tissue Value: Roots vs. Embryo
  misc_feature: MA Experiment ID: 108556 Result: Down-regulated in Transcription
  misc_feature: MA Experiment 108556 PARAMETER Experiment Name: Zm_Drought_P Parameter: Age (day) Value: 9
  misc_feature: MA Experiment 108556 PARAMETER Experiment Name: Zm_Drought_P Parameter: Organism Value: Zea mays
  misc_feature: MA Experiment 108556 PARAMETER Experiment Name: Zm_Drought_P Parameter: Plant Line Value: 35A19
  misc_feature: MA Experiment 108556 PARAMETER Experiment Name: Zm_Drought_P Parameter: Timepoint (hr) Value: 24
  misc_feature: MA Experiment 108556 PARAMETER Experiment Name: Zm_Drought_P Parameter: Tissue Value: Aerial
  misc_feature: MA Experiment 108556 PARAMETER Experiment Name: Zm_Drought_P Parameter: Treatment Value: Drought vs. No Drought
  misc_feature: MA Experiment ID: 108597 Result: Down-regulated in Transcription
  misc_feature: MA Experiment 108597 PARAMETER Experiment Name: Zm_100uM_ABA_P Parameter: Age (day) Value: 9
  misc_feature: MA Experiment 108597 PARAMETER Experiment Name: Zm_100uM_ABA_P Parameter: Organism Value: Zea mays
  misc_feature: MA Experiment 108597 PARAMETER Experiment Name: Zm_100uM_ABA_P Parameter: Plant Line Value: 35A19
  misc_feature: MA Experiment 108597 PARAMETER Experiment Name: Zm_100uM_ABA_P Parameter: Timepoint (hr) Value: 24
  misc_feature: MA Experiment 108597 PARAMETER Experiment Name: Zm_100uM_ABA_P Parameter: Tissue Value: Aerial
  misc_feature: MA Experiment 108597 PARAMETER Experiment Name: Zm_100uM_ABA_P Parameter: Treatment Value: 100uM ABA vs. No Treatment
  misc_feature: MA Experiment ID: 108687 Result: Down-regulated in Transcription
  misc_feature: MA Experiment 108687 PARAMETER Experiment Name: Zm_Embryos-Flowers__P Parameter: Tissue Value: Embryo vs. Aerial+
  misc_feature: MA Experiment ID: 20000478 Result: Down-regulated in Transcription
  misc_feature: MA Experiment 20000478 PARAMETER Experiment Name: Zm_5mM_SA_P Parameter: Age (day) Value: 11
  misc_feature: MA Experiment 20000478 PARAMETER Experiment Name: Zm_5mM_SA_P Parameter: Organism Value: Zea mays
  misc_feature: MA Experiment 20000478 PARAMETER Experiment Name: Zm_5mM_SA_P Parameter: Plant Line Value: 35A19
  misc_feature: MA Experiment 20000478 PARAMETER Experiment Name: Zm_5mM_SA_P Parameter: Timepoint (hr) Value: 72
  misc_feature: MA Experiment 20000478 PARAMETER Experiment Name: Zm_5mM_SA_P Parameter: Tissue Value: Aerial
  misc_feature: MA Experiment 20000478 PARAMETER Experiment Name: Zm_5mM_SA_P Parameter: Treatment Value: 5mM SA vs. No Treatment
  misc_feature: MA Experiment ID: 20000479 Result: Down-regulated in Transcription
  misc_feature: MA Experiment 20000479 PARAMETER Experiment Name: Zm_Drought_P Parameter: Age (day) Value: 10
  misc_feature: MA Experiment 20000479 PARAMETER Experiment Name: Zm_Drought_P Parameter: Organism Value: Zea mays
  misc_feature: MA Experiment 20000479 PARAMETER Experiment Name: Zm_Drought_P Parameter: Plant Line Value: 35A19
  misc_feature: MA Experiment 20000479 PARAMETER Experiment Name: Zm_Drought_P Parameter: Timepoint (hr) Value: 48
  misc_feature: MA Experiment 20000479 PARAMETER Experiment Name: Zm_Drought_P Parameter: Tissue Value: Aerial
  misc_feature: MA Experiment 20000479 PARAMETER Experiment Name: Zm_Drought_P Parameter: Treatment Value: Drought vs. No Drought
  misc_feature: MA Experiment ID: 20000480 Result: Down-regulated in Transcription
  misc_feature: MA Experiment 20000480 PARAMETER Experiment Name: Zm_Drought_P Parameter: Age (day) Value: 11
  misc_feature: MA Experiment 20000480 PARAMETER Experiment Name: Zm_Drought_P Parameter: Organism Value: Zea mays
  misc_feature: MA Experiment 20000480 PARAMETER Experiment Name: Zm_Drought_P Parameter: Plant Line Value: 35A19
  misc_feature: MA Experiment 20000480 PARAMETER Experiment Name: Zm_Drought_P Parameter: Timepoint (hr) Value: 72
  misc_feature: MA Experiment 20000480 PARAMETER Experiment Name: Zm_Drought_P Parameter: Tissue Value: Aerial
  misc_feature: MA Experiment 20000480 PARAMETER Experiment Name: Zm_Drought_P Parameter: Treatment Value: Drought vs. No Drought
  misc_feature: MA Experiment ID: 20000535 Result: Up-regulated in Transcription
  misc_feature: MA Experiment 20000535 PARAMETER Experiment Name: Zm_Hybrid_Seed_Dev_P Parameter: DAP Value: 30 vs. 12
  misc_feature: MA Experiment 20000535 PARAMETER Experiment Name: Zm_Hybrid_Seed_Dev_P Parameter: Organism Value: Zea mays
  misc_feature: MA Experiment 20000535 PARAMETER Experiment Name: Zm_Hybrid_Seed_Dev_P Parameter: Plant Line Value: 35A19
  misc_feature: MA Experiment 20000535 PARAMETER Experiment Name: Zm_Hybrid_Seed_Dev_P Parameter: Tissue Value: Embryo vs. Unfert Floret
ataagagtaggtgcagtatatcagtaaccagtaaatacttggacccagcagtaaccaggaccaggagagatcatcaaagtaaccttgctgccttttgagaacagaagcgtcagcagcaccagcaagaagcatcttctctctggagcggcgcctccgagaagaggacgacggatcgggaccaggaggcatggatctatctggcacgcagggcgagctcgcgatcccaatgcacgccaacgtcgcgtcgccctacggaggcggcgtcggcggccatgtcctgcagctgcaccgtgacgaccacggcagcaacaacggccagtctccggcgccgctgctgccaccgccgcctgccgcggcggaggagacggagagctcggcgaagaagcgcggtccggcagccggggccggcggcggcggaggcagctccgcggtgaagtaccgggagtgcctcaagaatcacgcggcggccatcggcgggaacgccaccgacgggtgtggcgagttcatgccaagcggcgaggagggctcgttggaggcgctcaagtgctccgcctgcggctgccaccgcaatttccaccgcaaggaggtggacgacgaggacgacgacatgtacggcgccgccgaaggcttcagcggcctcggtctcggcctcggcctcgggcacggccaccgcgccgcccgccgcctcctggcccccgccatggcgcacccgcaccacaagagcggcggcggggggctcctgatctccggggccgacccctacgccgcgtacgcgtcggcgcgcgcgctccctccggcgctgccgccgccgccagggcacgcccaccaccaccaccagtacgtgatgccgctgaacatgatgcacacctcggagtccgacgacatggagggcggccgcggcggctgcggggacgcggcgcgcggcagcggcgggtcgtcgtcgtccaggaagcggttccgcaccaagttcaccccggagcagaaggcgcgcatgctggagttcgcggagcgcgtggggtggcgcctccagaagctggacgacggcatggtgcaggccttctgccaggagatcggcgtgaagcggcgcgtgctcaaggtgtggatgcacaacaacaagcacaacctcgccaccaagcgcctcgaggcctcgccggcgcaggagcaggcgatggcgggcatggcgtcgccgccgccgccgccgccacccccacagctgcacttgcctctgcagatgcccgctggagtcatgccgccgccgccgccgccgccgcaggccgggtcgtcctgtcaccgcggcggtcccggctccccgctgccgctcaagctcgagtgaccaccgacaacctgacaaaaaacaagaagagggtgaccaccattggtggccgttgatccgtcctggtggtaagtggtaaactagctagctagcagaccgacggaccgcatcgatggctatttcactgttccattagtccattccttcccaagtgatctatctaccgtcgtcgtccaagcagggagagaagtgggcgatgaacttttcttgaaacaacaaaacgaacaaagtccaggttattatcgtctcttttttttccttcccttttccggtgctcgttgctttgtcacaaggtaggggagcaagcaaccaagcatgcatgatagtagtagctgatttcgactggactggactgatttccttccaaaaatttttttcctgatggtgaagaaaactaaatatcctactagtttcctcc

SEQ ID NO: 7394 - protein, 381 aa, Zea mays subsp. mays
  peptide (1)..(381): Ceres Seq. ID no. 12408819
  misc_feature (82)..(137): Pfam Name: ZF-HD protein dimerisation region Pfam Description: ZF-HD protein dimerisation region
  misc_feature (202)..(350): Homolog of NCBI NO: 15238445 NR Description: hypothetical protein common family; protein id: [Arabidopsis thaliana] >gi|9759621|dbj|BAB11563.1| contains to unknown protein~gene_id:MNA5.14~pir||T05568 [Arabidopsis
  misc_feature (31)..(134): Homolog of NCBI NO: 15238445 NR Description: hypothetical protein common family; protein id: [Arabidopsis thaliana] >gi|9759621|dbj|BAB11563.1| contains to unknown protein~gene_id:MNA5.14~pir||T05568 [Arabidopsis
  misc_feature (205)..(316): Homolog of NCBI NO: 13374061 NR Description: ZF-HD homeobox protein [Flaveria bidentis]
  misc_feature (73)..(137): Homolog of NCBI NO: 13374061 NR Description: ZF-HD homeobox protein [Flaveria bidentis]
  misc_feature (1)..(137): Homolog of NCBI NO: 15223757 NR Description: hypothetical protein; protein id: At1g14440.1, by cDNA: gi_18377625, supported by cDNA: gi_20465766 [Arabidopsis
  misc_feature (176)..(316): Homolog of NCBI NO: 15223757 NR Description: hypothetical protein; protein id: At1g14440.1, by cDNA: gi_18377625, supported by cDNA: gi_20465766 [Arabidopsis
  misc_feature (217)..(316): Homolog of NCBI NO: 15226993 NR Description: hypothetical protein; protein id: At2g02540.1, by cDNA: gi_20148767 [Arabidopsis thaliana]
  misc_feature (217)..(316): Homolog of NCBI NO: 20148768 NR Description: hypothetical protein At2g02540/T822.16
  misc_feature (82)..(142): Homolog of NCBI NO: 15226993 NR Description: hypothetical protein; protein id: At2g02540.1, by cDNA: gi_20148767 [Arabidopsis thaliana]
  misc_feature (82)..(142): Homolog of NCBI NO: 20148768 NR Description: hypothetical protein At2g02540/T822.16
MDLSGTQGELAIPMHANVASPYGGGVGGHVLQLHRDDHGSNNGQSPAPLLPPPPAAAEETESSAKKRGPAAGAGGGGGSSAVKYRECLKNHAAAIGGNATDGCGEFMPSGEEGSLEALKCSACGCHRNFHRKEVDDEDDDMYGAAEGFSGLGLGLGLGHGHRAARRLLAPAMAHPHHKSGGGGLLISGADPYAAYASARALPPALPPPPGHAHHHHQYVMPLNMMHTSESDDMEGGRGGCGDAARGSGGSSSSRKRFRTKFTPEQKARMLEFAERVGWRLQKLDDGMVQAFCQEIGVKRRVLKVWMHNNKHNLATKRLEASPAQEQAMAGMASPPPPPPPPQLHLPLQMPAGVMPPPPPPPQAGSSCHRGGPGSPLPLKLE

SEQ ID NO: 7395 - protein, 368 aa, Zea mays subsp. mays
  peptide (1)..(368): Ceres Seq. ID no. 12408820
  misc_feature (69)..(124): Pfam Name: ZF-HD protein dimerisation region Pfam Description: ZF-HD protein dimerisation region
  misc_feature (1)..(124): Homolog of NCBI NO: 15223757 NR Description: hypothetical protein; protein id: At1g14440.1, by cDNA: gi_18377625, supported by cDNA: gi_20465766 [Arabidopsis
  misc_feature (163)..(303): Homolog of NCBI NO: 15223757 NR Description: hypothetical protein; protein id: At1g14440.1, by cDNA: gi_18377625, supported by cDNA: gi_20465766 [Arabidopsis
  misc_feature (189)..(337): Homolog of NCBI NO: 15238445 NR Description: hypothetical protein common family; protein id: [Arabidopsis thaliana] >gi|9759621|dbj|BAB11563.1| contains to unknown protein~gene_id:MNA5.14~pir||T05568 [Arabidopsis
  misc_feature (18)..(121): Homolog of NCBI NO: 15238445 NR Description: hypothetical protein common family; protein id: [Arabidopsis thaliana] >gi|9759621|dbj|BAB11563.1| contains to unknown protein~gene_id:MNA5.14~pir||T05568 [Arabidopsis
  misc_feature (192)..(303): Homolog of NCBI NO: 13374061 NR Description: ZF-HD homeobox protein [Flaveria bidentis]
  misc_feature (60)..(124): Homolog of NCBI NO: 13374061 NR Description: ZF-HD homeobox protein [Flaveria bidentis]
  misc_feature (204)..(303): Homolog of NCBI NO: 15226993 NR Description: hypothetical protein; protein id: At2g02540.1, by cDNA: gi_20148767 [Arabidopsis thaliana]
  misc_feature (204)..(303): Homolog of NCBI NO: 20148768 NR Description: hypothetical protein At2g02540/T822.16
  misc_feature (69)..(129): Homolog of NCBI NO: 15226993 NR Description: hypothetical protein; protein id: At2g02540.1, by cDNA: gi_20148767 [Arabidopsis thaliana]
  misc_feature (69)..(129): Homolog of NCBI NO: 20148768 NR Description: hypothetical protein At2g02540/T822.16
MHANVASPYGGGVGGHVLQLHRDDHGSNNGQSPAPLLPPPPAAAEETESSAKKRGPAAGAGGGGGSSAVKYRECLKNHAAAIGGNATDGCGEFMPSGEEGSLEALKCSACGCHRNFHRKEVDDEDDDMYGAAEGFSGLGLGLGLGHGHRAARRLLAPAMAHPHHKSGGGGLLISGADPYAAYASARALPPALPPPPGHAHHHHQYVMPLNMMHTSESDDMEGGRGGCGDAARGSGGSSSSRKRFRTKFTPEQKARMLEFAERVGWRLQKLDDGMVQAFCQEIGVKRRVLKVWMHNNKHNLATKRLEASPAQEQAMAGMASPPPPPPPPQLHLPLQMPAGVMPPPPPPPQAGSSCHRGGPGSPLPLKLE

SEQ ID NO: 7396 - protein, 275 aa, Zea mays subsp. mays
  peptide (1)..(275): Ceres Seq. ID no. 12408821
  misc_feature (1)..(31): Homolog of NCBI NO: 15223757 NR Description: hypothetical protein; protein id: At1g14440.1, by cDNA: gi_18377625, supported by cDNA: gi_20465766 [Arabidopsis
  misc_feature (70)..(210): Homolog of NCBI NO: 15223757 NR Description: hypothetical protein; protein id: At1g14440.1, by cDNA: gi_18377625, supported by cDNA: gi_20465766 [Arabidopsis
  misc_feature (96)..(244): Homolog of NCBI NO: 15238445 NR Description: hypothetical protein common family; protein id: [Arabidopsis thaliana] >gi|9759621|dbj|BAB11563.1| contains to unknown protein~gene_id:MNA5.14~pir||T05568 [Arabidopsis
  misc_feature (1)..(28): Homolog of NCBI NO: 15238445 NR Description: hypothetical protein common family; protein id: [Arabidopsis thaliana] >gi|9759621|dbj|BAB11563.1| contains to unknown protein~gene_id:MNA5.14~pir||T05568 [Arabidopsis
  misc_feature (99)..(210): Homolog of NCBI NO: 13374061 NR Description: ZF-HD homeobox protein [Flaveria bidentis]
  misc_feature (1)..(31): Homolog of NCBI NO: 13374061 NR Description: ZF-HD homeobox protein [Flaveria bidentis]
  misc_feature (111)..(210): Homolog of NCBI NO: 15226993 NR Description: hypothetical protein; protein id: At2g02540.1, by cDNA: gi_20148767 [Arabidopsis thaliana]
  misc_feature (111)..(210): Homolog of NCBI NO: 20148768 NR Description: hypothetical protein At2g02540/T822.16
  misc_feature (1)..(36): Homolog of NCBI NO: 15226993 NR Description: hypothetical protein; protein id: At2g02540.1, by cDNA: gi_20148767 [Arabidopsis thaliana]
  misc_feature (1)..(36): Homolog of NCBI NO: 20148768 NR Description: hypothetical protein At2g02540/T822.16
MPSGEEGSLEALKCSACGCHRNFHRKEVDDEDDDMYGAAEGFSGLGLGLGLGHGHRAARRLLAPAMAHPHHKSGGGGLLISGADPYAAYASARALPPALPPPPGHAHHHHQYVMPLNMMHTSESDDMEGGRGGCGDAARGSGGSSSSRKRFRTKFTPEQKARMLEFAERVGWRLQKLDDGMVQAFCQEIGVKRRVLKVWMHNNKHNLATKRLEASPAQEQAMAGMASPPPPPPPPQLHLPLQMPAGVMPPPPPPPQAGSSCHRGGPGSPLPLKLE

SEQ ID NO: 7397 - DNA, 1643 bp, Zea mays subsp. mays
  misc_feature (1)..(1643): Ceres Seq. ID no. 12408814
  misc_feature: MA Experiment ID: 108535 Result: Down-regulated in Transcription
  misc_feature: MA Experiment 108535 PARAMETER Experiment Name: Zm_Meristem_P Parameter: Age (day) Value: 8
  misc_feature: MA Experiment 108535 PARAMETER Experiment Name: Zm_Meristem_P Parameter: Organism Value: Zea mays
  misc_feature: MA Experiment 108535 PARAMETER Experiment Name: Zm_Meristem_P Parameter: Plant Line Value: 35A19
  misc_feature: MA Experiment 108535 PARAMETER Experiment Name: Zm_Meristem_P Parameter: Tissue Value: Root Meristem vs. Above Root Meristem
  misc_feature: MA Experiment ID: 108556 Result: Down-regulated in Transcription
  misc_feature: MA Experiment 108556 PARAMETER Experiment Name: Zm_Drought_P Parameter: Age (day) Value: 9
  misc_feature: MA Experiment 108556 PARAMETER Experiment Name: Zm_Drought_P Parameter: Organism Value: Zea mays
  misc_feature: MA Experiment 108556 PARAMETER Experiment Name: Zm_Drought_P Parameter: Plant Line Value: 35A19
  misc_feature: MA Experiment 108556 PARAMETER Experiment Name: Zm_Drought_P Parameter: Timepoint (hr) Value: 24
  misc_feature: MA Experiment 108556 PARAMETER Experiment Name: Zm_Drought_P Parameter: Tissue Value: Aerial
  misc_feature: MA Experiment 108556 PARAMETER Experiment Name: Zm_Drought_P Parameter: Treatment Value: Drought vs. No Drought
  misc_feature: MA Experiment ID: 20000480 Result: Down-regulated in Transcription
  misc_feature: MA Experiment 20000480 PARAMETER Experiment Name: Zm_Drought_P Parameter: Age (day) Value: 11
  misc_feature: MA Experiment 20000480 PARAMETER Experiment Name: Zm_Drought_P Parameter: Organism Value: Zea mays
  misc_feature: MA Experiment 20000480 PARAMETER Experiment Name: Zm_Drought_P Parameter: Plant Line Value: 35A19
  misc_feature: MA Experiment 20000480 PARAMETER Experiment Name: Zm_Drought_P Parameter: Timepoint (hr) Value: 72
  misc_feature: MA Experiment 20000480 PARAMETER Experiment Name: Zm_Drought_P Parameter: Tissue Value: Aerial
  misc_feature: MA Experiment 20000480 PARAMETER Experiment Name: Zm_Drought_P Parameter: Treatment Value: Drought vs. No Drought
gcacgagaccattacctagaacatcctaatcgaaagtctgccaacgccgctactcggcgcaccttggcttgctatttcgccaacaacctcctccctctttaccgcggcgtgccgcgtgcggcgggcgcggatggcaacggccgcctccgcctccccctcccccggcgcgttcggcgccaaaacccctgccccagcccgtgggctgagcacgcacccggtcctgaccccgagccccgcattcgcgaggtcttcgccgcgcacccccgcctgcggcaggtcccgcgccagcctccacatcggcggcctggggctcgaccagcagcagcagctgccgccgccgccggcaacggaaccgggctccacgtgccccccacggtcgcgccgctcgccgtgcctaagatggccggctccatgaagacccataagaacgtcctgctcttctactgcgaggagatgcgggacctcgcgcagcaggtggtcgcccggaacgatgacatcgaactgcgatccatctcatggaggacatttccggacggatacccgaatctgttcatctcgaatgcccataacattcgtgggcagcatgttgcctttttggcttcgtttagctcgcccagcgtcatatttgagcaactatctgtcatatataatctgccaaagttgtttatttcttcgtttactcttatactcccgtttttcccaaccgggacttctgagcgcatggaagatgagggagatgttgcaaccgcctttacacttgccagatttttgtcaaatataccaatatcacgaggcgggccatcgagtttagtaattttcgatatccatgctttgcaggagagattctactttggagactcagtcttaccatgttttgagagtggcatccccttgctgaaaagtaagcttcaggagctacctgattcccataatataactatagcatttccagatgacggtgcatggaaacgcttctataagcagcttcaacattttcctatggttatatgtaacaaagttagagaaggggagcagagaattgtacggataaaggagggagatcctagaggccgtcatgttgttatagtggatgacttggtccagtctggcagtactttgattgagtgccagaaagtactggctgctcatggagctgcaaaggtcagtgcatatgtgacacatggcattttccccaatagctcatgggagaaatttcagcatgacaatggagagggtccggagcatggcctgagccacttttggcttactgattcatgcccccttactgtcaaggcggtgaagggcagacggccatttgaaattctaagtctggccggacctattgcttctgctctccagatttaggcaaatctggtctgctcgatccttcgggatattgtgactattcagttagttcttctttcctttgttgctgttgaggaatttggtgttttcctttgtacagctattgagtgtctcgcaatgtatttactagaaaaccataaaatggcagatcttcactgcagggtctgcttggcagaaagcattcgtagtcgtagtattagctgttaataatttgactgagcaagtcaagcgttgatctgtgttctagtataaataaaactctcgaataagtttcagtg

SEQ ID NO: 7398 - protein, 454 aa, Zea mays subsp. mays
  peptide (1)..(454): Ceres Seq. ID no. 12408815
  misc_feature (72)..(454): Homolog of NCBI NO: 34910736 NR Description: putative phosphoribosyl pyrophosphate synthase
  misc_feature (137)..(454): Homolog of NCBI NO: 4902877 NR Description: phosphoribosyl pyrophosphate synthase isozyme 3
  misc_feature (123)..(454): Homolog of NCBI NO: 15220191 NR Description: phosphoribosyl diphosphate synthase; protein id: supported by cDNA: gi_16604385, supported by cDNA: gi_19699209 thaliana] >gi|16604386|gb|AAL24199.1| At1g10700/F20B24.13
  misc_feature (130)..(454): Homolog of NCBI NO: 25529012 NR Description: ribose-phosphate diphosphokinase (EC 2.7.6.1)
  misc_feature (123)..(454): Homolog of NCBI NO: 25402614 NR Description: hypothetical protein [imported] - Arabidopsis >gi|4874278|gb|AAD31343.1|AC007354_16 Strong similarity to
  misc_feature (123)..(312): Homolog of NCBI NO: 6573738 NR Description: F20B24.13 [Arabidopsis thaliana]
  misc_feature (308)..(411): Homolog of NCBI NO: 6573738 NR Description: F20B24.13 [Arabidopsis thaliana]
  misc_feature (408)..(454): Homolog of NCBI NO: 6573738 NR Description: F20B24.13 [Arabidopsis thaliana]
  misc_feature (139)..(454): Homolog of NCBI NO: 22671730 NR Description: phosphoribosyl pyrophosphate synthetase
  misc_feature (142)..(454): Homolog of NCBI NO: 15228027 NR Description: putative ribose phosphate pyrophosphokinase;
ARDHYLEHPNRKSANAATRRTLACYFANNLLPLYRGVPRAAGADGNGRLRLPLPRRVRRQNPCPSPWAEHAPGPDPEPRIREVFAAHPRLRQVPRQPPHRRPGARPAAAAAAAAGNGTGLHVPPTVAPLAVPKMAGSMKTHKNVLLFYCEEMRDLAQQVVARNDDIELRSISWRTFPDGYPNLFISNAHNIRGQHVAFLASFSSPSVIFEQLSVIYNLPKLFISSFTLILPFFPTGTSERMEDEGDVATAFTLARFLSNIPISRGGPSSLVIFDIHALQERFYFGDSVLPCFESGIPLLKSKLQELPDSHNITIAFPDDGAWKRFYKQLQHFPMVICNKVREGEQRIVRIKEGDPRGRHVVIVDDLVQSGSTLIECQKVLAAHGAAKVSAYVTHGIFPNSSWEKFQHDNGEGPEHGLSHFWLTDSCPLTVKAVKGRRPFEILSLAGPIASALQI

SEQ ID NO: 7399 - protein, 321 aa, Zea mays subsp. mays
  peptide (1)..(321): Ceres Seq. ID no. 12408816
  misc_feature (1)..(321): Homolog of NCBI NO: 34910736 NR Description: putative phosphoribosyl pyrophosphate synthase
  misc_feature (4)..(321): Homolog of NCBI NO: 4902877 NR Description: phosphoribosyl pyrophosphate synthase isozyme 3
  misc_feature (1)..(321): Homolog of NCBI NO: 15220191 NR Description: phosphoribosyl diphosphate synthase; protein id: supported by cDNA: gi_16604385, supported by cDNA: gi_19699209 thaliana] >gi|16604386|gb|AAL24199.1| At1g10700/F20B24.13
  misc_feature (1)..(321): Homolog of NCBI NO: 25529012 NR Description: ribose-phosphate diphosphokinase (EC 2.7.6.1)
  misc_feature (1)..(321): Homolog of NCBI NO: 25402614 NR Description: hypothetical protein [imported] - Arabidopsis >gi|4874278|gb|AAD31343.1|AC007354_16 Strong similarity to
  misc_feature (1)..(179): Homolog of NCBI NO: 6573738 NR Description: F20B24.13 [Arabidopsis thaliana]
  misc_feature (175)..(278): Homolog of NCBI NO: 6573738 NR Description: F20B24.13 [Arabidopsis thaliana]
  misc_feature (275)..(321): Homolog of NCBI NO: 6573738 NR Description: F20B24.13 [Arabidopsis thaliana]
  misc_feature (6)..(321): Homolog of NCBI NO: 22671730 NR Description: phosphoribosyl pyrophosphate synthetase
  misc_feature (9)..(321): Homolog of NCBI NO: 15228027 NR Description: putative ribose phosphate pyrophosphokinase;
MAGSMKTHKNVLLFYCEEMRDLAQQVVARNDDIELRSISWRTFPDGYPNLFISNAHNIRGQHVAFLASFSSPSVIFEQLSVIYNLPKLFISSFTLILPFFPTGTSERMEDEGDVATAFTLARFLSNIPISRGGPSSLVIFDIHALQERFYFGDSVLPCFESGIPLLKSKLQELPDSHNITIAFPDDGAWKRFYKQLQHFPMVICNKVREGEQRIVRIKEGDPRGRHVVIVDDLVQSGSTLIECQKVLAAHGAAKVSAYVTHGIFPNSSWEKFQHDNGEGPEHGLSHFWLTDSCPLTVKAVKGRRPFEILSLAGPIASALQI

SEQ ID NO: 7400 - protein, 317 aa, Zea mays subsp. mays
  peptide (1)..(317): Ceres Seq. ID no. 12408817
  misc_feature (1)..(317): Homolog of NCBI NO: 34910736 NR Description: putative phosphoribosyl pyrophosphate synthase
  misc_feature (1)..(317): Homolog of NCBI NO: 4902877 NR Description: phosphoribosyl pyrophosphate synthase isozyme 3
  misc_feature (1)..(317): Homolog of NCBI NO: 15220191 NR Description: phosphoribosyl diphosphate synthase; protein id: supported by cDNA: gi_16604385, supported by cDNA: gi_19699209 thaliana] >gi|16604386|gb|AAL24199.1| At1g10700/F20B24.13
  misc_feature (1)..(317): Homolog of NCBI NO: 25529012 NR Description: ribose-phosphate diphosphokinase (EC 2.7.6.1)
  misc_feature (1)..(317): Homolog of NCBI NO: 25402614 NR Description: hypothetical protein [imported] - Arabidopsis >gi|4874278|gb|AAD31343.1|AC007354_16 Strong similarity to
  misc_feature (1)..(175): Homolog of NCBI NO: 6573738 NR Description: F20B24.13 [Arabidopsis thaliana]
  misc_feature (171)..(274): Homolog of NCBI NO: 6573738 NR Description: F20B24.13 [Arabidopsis thaliana]
  misc_feature (271)..(317): Homolog of NCBI NO: 6573738 NR Description: F20B24.13 [Arabidopsis thaliana]
  misc_feature (2)..(317): Homolog of NCBI NO: 22671730 NR Description: phosphoribosyl pyrophosphate synthetase
  misc_feature (5)..(317): Homolog of NCBI NO: 15228027 NR Description: putative ribose phosphate pyrophosphokinase;
MKTHKNVLLFYCEEMRDLAQQVVARNDDIELRSISWRTFPDGYPNLFISNAHNIRGQHVAFLASFSSPSVIFEQLSVIYNLPKLFISSFTLILPFFPTGTSERMEDEGDVATAFTLARFLSNIPISRGGPSSLVIFDIHALQERFYFGDSVLPCFESGIPLLKSKLQELPDSHNITIAFPDDGAWKRFYKQLQHFPMVICNKVREGEQRIVRIKEGDPRGRHVVIVDDLVQSGSTLIECQKVLAAHGAAKVSAYVTHGIFPNSSWEKFQHDNGEGPEHGLSHFWLTDSCPLTVKAVKGRRPFEILSLAGPIASALQI

SEQ ID NO: 7401 - DNA, 2161 bp, Zea mays subsp. mays
  misc_feature (1)..(2161): Ceres Seq. ID no. 13494407
  misc_feature: MA Experiment ID: 108556 Result: Down-regulated in Transcription
  misc_feature: MA Experiment 108556 PARAMETER Experiment Name: Zm_Drought_P Parameter: Age (day) Value: 9
  misc_feature: MA Experiment 108556 PARAMETER Experiment Name: Zm_Drought_P Parameter: Organism Value: Zea mays
  misc_feature: MA Experiment 108556 PARAMETER Experiment Name: Zm_Drought_P Parameter: Plant Line Value: 35A19
  misc_feature: MA Experiment 108556 PARAMETER Experiment Name: Zm_Drought_P Parameter: Timepoint (hr) Value: 24
  misc_feature: MA Experiment 108556 PARAMETER Experiment Name: Zm_Drought_P Parameter: Tissue Value: Aerial
  misc_feature: MA Experiment 108556 PARAMETER Experiment Name: Zm_Drought_P Parameter: Treatment Value: Drought vs. No Drought
  misc_feature: MA Experiment ID: 20000477 Result: Down-regulated in Transcription
  misc_feature: MA Experiment 20000477 PARAMETER Experiment Name: Zm_5mM_SA_P Parameter: Age (day) Value: 10
  misc_feature: MA Experiment 20000477 PARAMETER Experiment Name: Zm_5mM_SA_P Parameter: Organism Value: Zea mays
  misc_feature: MA Experiment 20000477 PARAMETER Experiment Name: Zm_5mM_SA_P Parameter: Plant Line Value: 35A19
  misc_feature: MA Experiment 20000477 PARAMETER Experiment Name: Zm_5mM_SA_P Parameter: Timepoint (hr) Value: 48
  misc_feature: MA Experiment 20000477 PARAMETER Experiment Name: Zm_5mM_SA_P Parameter: Tissue Value: Aerial
  misc_feature: MA Experiment 20000477 PARAMETER Experiment Name: Zm_5mM_SA_P Parameter: Treatment Value: 5mM SA vs. No Treatment
  misc_feature: MA Experiment ID: 20000480 Result: Down-regulated in Transcription
  misc_feature: MA Experiment 20000480 PARAMETER Experiment Name: Zm_Drought_P Parameter: Age (day) Value: 11
  misc_feature: MA Experiment 20000480 PARAMETER Experiment Name: Zm_Drought_P Parameter: Organism Value: Zea mays
  misc_feature: MA Experiment 20000480 PARAMETER Experiment Name: Zm_Drought_P Parameter: Plant Line Value: 35A19
  misc_feature: MA Experiment 20000480 PARAMETER Experiment Name: Zm_Drought_P Parameter: Timepoint (hr) Value: 72
  misc_feature: MA Experiment 20000480 PARAMETER Experiment Name: Zm_Drought_P Parameter: Tissue Value: Aerial
  misc_feature: MA Experiment 20000480 PARAMETER Experiment Name: Zm_Drought_P Parameter: Treatment Value: Drought vs. No Drought
  misc_feature (1873)..(1873): n is a, c, t, g, unknown, or other
  misc_feature (1914)..(1914): n is a, c, t, g, unknown, or other
  misc_feature (1981)..(1981): n is a, c, t, g, unknown, or other
agaagaggcctccccgctccgcgttccccagcgccagcggtaacccaacccaactcctctgagctgtgacacagctgtcctcctccccccactccaggcgctcacacaccctccacttccctccacaggaatccgccgccataatctcctccgctccgctccactccgcattgcaggattgcgccgagcacgagcaccctcctccccgaagcctcttctttgctctgctttcggtggtatggtgggatgatgagcagggcggcagtgctgctgtgtctcctctgctgcctcgccgccgtcggcgaggcggcgtcagtggtgggcgagggcgaggcggcggagctggccgtgtcggtggacccgtcgtggcggttccctagccagcggctgcgggacgcgtacgtcgcgctgcagacctggaagcagcaggccatcttctccgaccccaggggtttcaccgccgactgggtgggcccgggggtatgcaactacaccggggtcttctgcgcgccgctgccgcgcggggtgccgggcgccggggagctcgccgtcgcgggcctcgacctcaaccacggcgacatcgcgggctacctcccgccggagctcggcctgctcgctgacctctcgctgctccacctcaactccaaccgcttctgcggcctcgtccccgccactctgcgccgcctccagcttctcgtcgagctcgacctcagcaacaaccgcctcgtcggggcattcccggccgtcgtgctggagctcccggcgctcaagttcctcgacctccgcttcaacgacttcgagggcgccatcccgccggagctcttcgaccgcccgctcgacgccatcttcctcaaccacaaccgcctccgctccccgctccccgacaacttcggcaactccccggcctccgttatcgtactcgccgacaacagcttcggcggatgcctcccggccagcctcggcaacatgtccggcacactcaacgagatcctcctcatcaacaacggcctcgactcctgcgtcccgccggaggtcggcttgctccgggaggtgaccgtcttcgacgtcagcttcaactcgctcgtcggcccgctgccgcagcaggtggccgggatgcgcaaggtggagcagctggacgtcgcgcacaaccgcctgtccggggccgtcccggaggccatctgcgccctcccgcggctcaagaacctgaccatctcctacaacttcttcaccggcgagccgccgtcctgcgcgcgcgtcgtgccttcggacggtgacaggaggaactgcctgcccaaccgccccacacagcgcacgccgcagcagtgcgccgcgttctactcgcagccgcccgtcgactgcgccgcgttccagtgcaagccgtttgtccctgttccgccgccgccgccgccatcataccccggcccgttgccaccggtataccctatgccgtacgcatcgcctccgccacctgcgcagtaccgatgattcgtcgaggagggagaagcactatcactttcaccttaattcaccaccaccgctgctgcgctggatgaagacagcaaagtttcaccgtcacaattgtacgtggtcagtcattgttgtgcttagattagtagtgttcttgattgatagctaccggcatatagaagattatattattataaggtgcatatatcgctcttgcttttgcattggtcgttctctgtttttcgcgttgatcggggtttgcgtcacggtgatggtgaaatagatggtcagatggaggtgaaaaggattggaaggaacnatttgagtttggattgattgctaattggctgactgcttgagagagagatcaggatgacgaggaggattggttggtgacttggcgccnccttgggcctcggatgtatagggggaattaagcttaagttnttcagttaagctactgctttcagttgggagcccggagataagttttcagaccaaggaatgtaccccncttaactattctttttgcatttttatgtcacagctacttactgttaatcgattgttatgatatatctgttttgattcttagaaggttttggtcctttgcttgctactcaatgttgtttagttcacatatttgtaacgcaatattcgtttaagtctaaccgtaatcagataccttaccgtg

SEQ ID NO: 7402 - protein, 412 aa, Zea mays subsp. mays
  peptide (1)..(412): Ceres Seq. ID no. 13494408
  misc_feature (352)..(408): Pfam Name: Extensin-like region Pfam Description: Extensin-like region
  misc_feature (2)..(409): Homolog of NCBI NO: 34906174 NR Description: putative extensin-like protein [Oryza sativa
  misc_feature (35)..(409): Homolog of NCBI NO: 34912294 NR Description: putative extensin-like protein [Oryza sativa
  misc_feature (28)..(408): Homolog of NCBI NO: 15233976 NR Description: leucine-rich repeat extensin family [Arabidopsis
  misc_feature (383)..(411): Homolog of NCBI NO: 15233976 NR Description: leucine-rich repeat extensin family [Arabidopsis
  misc_feature (29)..(409): Homolog of NCBI NO: 15235668 NR Description: leucine-rich repeat extensin family [Arabidopsis
  misc_feature (28)..(409): Homolog of NCBI NO: 15230120 NR Description: leucine-rich repeat extensin family [Arabidopsis
  misc_feature (47)..(408): Homolog of NCBI NO: 15228861 NR Description: leucine-rich repeat extensin family [Arabidopsis
  misc_feature (35)..(412): Homolog of NCBI NO: 7484956 NR Description: extensin homolog F24O1.18 - Arabidopsis thaliana T3P18.1 [Arabidopsis thaliana]
  misc_feature (35)..(412): Homolog of NCBI NO: 15220780 NR Description: leucine-rich repeat extensin family [Arabidopsis
  misc_feature (35)..(408): Homolog of NCBI NO: 15221178 NR Description: leucine-rich repeat extensin family [Arabidopsis
MMSRAAVLLCLLCCLAAVGEAASVVGEGEAAELAVSVDPSWRFPSQRLRDAYVALQTWKQQAIFSDPRGFTADWVGPGVCNYTGVFCAPLPRGVPGAGELAVAGLDLNHGDIAGYLPPELGLLADLSLLHLNSNRFCGLVPATLRRLQLLVELDLSNNRLVGAFPAVVLELPALKFLDLRFNDFEGAIPPELFDRPLDAIFLNHNRLRSPLPDNFGNSPASVIVLADNSFGGCLPASLGNMSGTLNEILLINNGLDSCVPPEVGLLREVTVFDVSFNSLVGPLPQQVAGMRKVEQLDVAHNRLSGAVPEAICALPRLKNLTISYNFFTGEPPSCARVVPSDGDRRNCLPNRPTQRTPQQCAAFYSQPPVDCAAFQCKPFVPVPPPPPPSYPGPLPPVYPMPYASPPPPAQYR

SEQ ID NO: 7403 - protein, 411 aa, Zea mays subsp. mays
  peptide (1)..(411): Ceres Seq. ID no. 13494409
  misc_feature (351)..(407): Pfam Name: Extensin-like region Pfam Description: Extensin-like region
  misc_feature (1)..(408): Homolog of NCBI NO: 34906174 NR Description: putative extensin-like protein [Oryza sativa
  misc_feature (34)..(408): Homolog of NCBI NO: 34912294 NR Description: putative extensin-like protein [Oryza sativa
  misc_feature (27)..(407): Homolog of NCBI NO: 15233976 NR Description: leucine-rich repeat extensin family [Arabidopsis
  misc_feature (382)..(410): Homolog of NCBI NO: 15233976 NR Description: leucine-rich repeat extensin family [Arabidopsis
  misc_feature (28)..(408): Homolog of NCBI NO: 15235668 NR Description: leucine-rich repeat extensin family [Arabidopsis
  misc_feature (27)..(408): Homolog of NCBI NO: 15230120 NR Description: leucine-rich repeat extensin family [Arabidopsis
  misc_feature (46)..(407): Homolog of NCBI NO: 15228861 NR Description: leucine-rich repeat extensin family [Arabidopsis
  misc_feature (34)..(411): Homolog of NCBI NO: 7484956 NR Description: extensin homolog F24O1.18 - Arabidopsis thaliana T3P18.1 [Arabidopsis thaliana]
  misc_feature (34)..(411): Homolog of NCBI NO: 15220780 NR Description: leucine-rich repeat extensin family [Arabidopsis
  misc_feature (34)..(407): Homolog of NCBI NO: 15221178 NR Description: leucine-rich repeat extensin family [Arabidopsis
MSRAAVLLCLLCCLAAVGEAASVVGEGEAAELAVSVDPSWRFPSQRLRDAYVALQTWKQQAIFSDPRGFTADWVGPGVCNYTGVFCAPLPRGVPGAGELAVAGLDLNHGDIAGYLPPELGLLADLSLLHLNSNRFCGLVPATLRRLQLLVELDLSNNRLVGAFPAVVLELPALKFLDLRFNDFEGAIPPELFDRPLDAIFLNHNRLRSPLPDNFGNSPASVIVLADNSFGGCLPASLGNMSGTLNEILLINNGLDSCVPPEVGLLREVTVFDVSFNSLVGPLPQQVAGMRKVEQLDVAHNRLSGAVPEAICALPRLKNLTISYNFFTGEPPSCARVVPSDGDRRNCLPNRPTQRTPQQCAAFYSQPPVDCAAFQCKPFVPVPPPPPPSYPGPLPPVYPMPYASPPPPAQYR

SEQ ID NO: 7404 - DNA, 789 bp, Zea mays subsp. mays
  misc_feature (1)..(789): Ceres Seq. ID no. 14312670
  misc_feature: MA Experiment ID: 108522 Result: Up-regulated in Transcription
  misc_feature: MA Experiment 108522 PARAMETER Experiment Name: Zm_42deg_Heat_P Parameter: Age (day) Value: 8
  misc_feature: MA Experiment 108522 PARAMETER Experiment Name: Zm_42deg_Heat_P Parameter: Organism Value: Zea mays
  misc_feature: MA Experiment 108522 PARAMETER Experiment Name: Zm_42deg_Heat_P Parameter: Plant Line Value: 35A19
  misc_feature: MA Experiment 108522 PARAMETER Experiment Name: Zm_42deg_Heat_P Parameter: Temperature (deg C) Value: 42 vs. 22
  misc_feature: MA Experiment 108522 PARAMETER Experiment Name: Zm_42deg_Heat_P Parameter: Timepoint (hr) Value: 1
  misc_feature: MA Experiment 108522 PARAMETER Experiment Name: Zm_42deg_Heat_P Parameter: Tissue Value: Aerial
tcgaaaaactccaaccgccgagccagaggcacccggagcagcgcacagcaagtcagcaacagagcgcacaccgtcgccgcatccgcctccgcagcagcagcaatggcgcgcgccggcgctctctgcctggtgctgctctgcctcgtggccgcgcactcagccgcagcgcagaagtccacgacggccccggccgccgcgccggccgccgccaccaccccgccggcgaccccgaccaagaagacgcccgcgcccgccgccgcgccgcccaccaccccggccaccctggccccggccgccgccccgcccaccacgccggccacccccgcgcccgtcgctgcggcgcccactaccccggccaccctggcacccgccgcggcgccgtgatggcggtggcggctacggcggtggcggcggctacggtggcggcggcggctacggtggtggtggcggcggctacggcggtggcaaccgtggcggcggctacggcaactccgacgggaactggaggaactgagcggtggggcccgcgcggccaagttatcctgttcgctaccgtgatgtttaccctagtccagagggtttatcttcgttcgtgtcgtgtttgttgttgcccatctgtgtttttgattgcaaggtcgctctgtgtcagttgttagtgctgtgttcatcctcggtttcagcagacccatgcatcaaacagcatggactgcggatcgatggatgctgttacccccgtcaggctttattctaagttaatcttaaggaaaaaatggtgcttcttggtgctgc

SEQ ID NO: 7405 - protein, 217 aa, Zea mays subsp. mays
  peptide (1)..(217): Ceres Seq. ID no. 14312671
  misc_feature (124)..(164): Homolog of NCBI NO: 11360494 NR Description: antifreeze glycopeptide AFGP polyprotein precursor
  misc_feature (124)..(164): Homolog of NCBI NO: 11360494 NR Description: antifreeze glycopeptide AFGP polyprotein precursor
  misc_feature (120)..(170): Homolog of NCBI NO: 5001993 NR Description: chimeric AFGP/trypsinogen-like serine protease
  misc_feature (126)..(168): Homolog of NCBI NO: 5001993 NR Description: chimeric AFGP/trypsinogen-like serine protease
  misc_feature (126)..(170): Homolog of NCBI NO: 5001993 NR Description: chimeric AFGP/trypsinogen-like serine protease
  misc_feature (126)..(164): Homolog of NCBI NO: 11360494 NR Description: antifreeze glycopeptide AFGP polyprotein precursor
  misc_feature (126)..(164): Homolog of NCBI NO: 11360494 NR Description: antifreeze glycopeptide AFGP polyprotein precursor
  misc_feature (126)..(163): Homolog of NCBI NO: 5001993 NR Description: chimeric AFGP/trypsinogen-like serine protease
  misc_feature (126)..(163): Homolog of NCBI NO: 5001993 NR Description: chimeric AFGP/trypsinogen-like serine protease
  misc_feature (109)..(175): Homolog of NCBI NO: 11360494 NR Description: antifreeze glycopeptide AFGP polyprotein precursor
EKLQPPSQRHPEQRTASQQQSAHRRRIRLRSSSNGARRRSLPGAALPRGRALSRSAEVHDGPGRRAGRRHHPAGDPDQEDARARRRAAHHPGHPGPGRRPAHHAGHPRARRCGAHYPGHPGTRRGAVMAVAATAVAAATVAAAATVVVAAATAVATVAAATATPTGTGGTERWGPRGQVILFATVMFTLVQRVYLRSCRVCCCPSVFLIARSLCVSC

SEQ ID NO: 7406 - protein, 170 aa, Zea mays subsp. mays
  peptide (1)..(170): Ceres Seq. ID no. 14312672
  misc_feature (4)..(162): Pfam Name: Formin Homology 2 Domain Pfam Description: Formin Homology 2 Domain
  misc_feature (126)..(170): Homolog of NCBI NO: 82696 NR Description: glycine-rich protein - maize
  misc_feature (126)..(170): Homolog of NCBI NO: 20257675 NR Description: glycine-rich RNA binding protein [Zea mays]
  misc_feature (126)..(170): Homolog of NCBI NO: 20257693 NR Description: glycine-rich RNA binding protein [Zea mays]
  misc_feature (126)..(170): Homolog of NCBI NO: 20257709 NR Description: glycine-rich RNA binding protein [Zea mays]
  misc_feature (126)..(170): Homolog of NCBI NO: 20257699 NR Description: glycine-rich RNA binding protein [Zea mays]
  misc_feature (126)..(170): Homolog of NCBI NO: 20257691 NR Description: glycine-rich RNA binding protein [Zea mays]
  misc_feature (126)..(170): Homolog of NCBI NO: 20257683 NR Description: glycine-rich RNA binding protein [Zea mays]
  misc_feature (126)..(170): Homolog of NCBI NO: 20257687 NR Description: glycine-rich RNA binding protein [Zea mays]
  misc_feature (16)..(124): Homolog of NCBI NO: 2129478 NR Description: chitinase (EC 3.2.1.14) precursor - beet chitinase [Beta vulgaris subsp. vulgaris]
  misc_feature (126)..(170): Homolog of NCBI NO: 544421 NR Description: Glycine-rich RNA-binding protein 1
RKTPTAEPEAPGAAHSKSATERTPSPHPPPQQQQWRAPALSAWCCSASWPRTQPQRRSPRRPRPPRRPPPPPRRRPRPRRRPRPPPRRPPPRPPWPRPPPRPPRRPPPRPSLRRPLPRPPWHPPRRRDGGGGYGGGGGYGGGGGYGGGGGGYGGGNRGGGYGNSDGNWRN

SEQ ID NO: 7407 - protein, 127 aa, Zea mays subsp. mays
  peptide (1)..(127): Ceres Seq. ID no. 14312673
  misc_feature (24)..(125): Pfam Name: Equine herpesvirus glycoprotein gp2 Pfam Description: Equine herpesvirus glycoprotein gp2
  misc_feature (11)..(127): Homolog of NCBI NO: 11360494 NR Description: antifreeze glycopeptide AFGP polyprotein precursor
  misc_feature (35)..(127): Homolog of NCBI NO: 10945615 NR Description: arabinogalactan protein [Nicotiana alata]
  misc_feature (11)..(127): Homolog of NCBI NO: 5001993 NR Description: chimeric AFGP/trypsinogen-like serine protease
  misc_feature (11)..(127): Homolog of NCBI NO: 5001993 NR Description: chimeric AFGP/trypsinogen-like serine protease
  misc_feature (11)..(127): Homolog of NCBI NO: 5001993 NR Description: chimeric AFGP/trypsinogen-like serine protease
  misc_feature (8)..(127): Homolog of NCBI NO: 11360494 NR Description: antifreeze glycopeptide AFGP polyprotein precursor
  misc_feature (8)..(127): Homolog of NCBI NO: 11360494 NR Description: antifreeze glycopeptide AFGP polyprotein precursor
  misc_feature (11)..(127): Homolog of NCBI NO: 5001993 NR Description: chimeric AFGP/trypsinogen-like serine protease
  misc_feature (6)..(125): Homolog of NCBI NO: 11360494 NR Description: antifreeze glycopeptide AFGP polyprotein precursor
  misc_feature (35)..(127): Homolog of NCBI NO: 1362097 NR Description: probable arabinogalactan protein precursor -
SKNSNRRARGTRSSAQQVSNRAHTVAASASAAAAMARAGALCLVLLCLVAAHSAAAQKSTTAPAAAPAAATTPPATPTKKTPAPAAAPPTTPATLAPAAAPPTTPATPAPVAAAPTTPATLAPAAAP

SEQ ID NO: 7408 - DNA, 895 bp, Zea mays subsp. mays
  misc_feature (1)..(895): Ceres Seq. ID no. 12343628
  misc_feature: MA Experiment ID: 20000487 Result: Up-regulated in Transcription
  misc_feature: MA Experiment 20000487 PARAMETER Experiment Name: Zm_50mM_NH4NO3_L_to_H_P Parameter: Organism Value: Zea mays
  misc_feature: MA Experiment 20000487 PARAMETER Experiment Name: Zm_50mM_NH4NO3_L_to_H_P Parameter: Timepoint (hr) Value: 4
  misc_feature: MA Experiment 20000487 PARAMETER Experiment Name: Zm_50mM_NH4NO3_L_to_H_P Parameter: Tissue Value: Leaves
  misc_feature: MA Experiment 20000487 PARAMETER Experiment Name: Zm_50mM_NH4NO3_L_to_H_P Parameter: Treatment Value: 50mM NH4NO3 vs. 100mM Mannitol
aaattgtatctgcagtcgcccacctccatgccaacggtattatgcatagagatttgaagcctgagaacatcttactggatgctgatggtcatgctatgctgactgactttggtgtggcaaaagaatttgatgaaaacactagatcaaactcaatgtgtggtactgttgaatacatggccccagaaattgttcagggccgaggtcatgataaggctgcagactggtggagtgtgggagtccttctttttgaaatgcttacaggaaagccaccgtttgttggtggaaacagagacaagattcagcagaagatagtaaaggagaagataaagctgccaacatatttatctagtgaagttcactcaatgttgaaaggattattgcacaaagaagctggcagacggctgggaagcggaccaggcggcagtgacgaaatcaagaaccacaagtggttcaagtctgtaaactggaagaggctggaggcccggcagatcgagccaagcttccggccgaatgttgctggcaagacctgcattgcgaactttgacgagtgctggacgaacatgcccgtgcttgattctccggtggccagccctgttgcggccaacagcaactttgtggggttcagttatgtgaggcccgcaccgttcctccagaagccgagtccacttggctaaagaactacttccgtgatctgatatctaacccggagttcaaataactatctttgagtctgaatcctatgtatttcttcaagacattagtgatgggaatctaaccttattgttgtgttgtgggtaggccagccaagcgcctattgcttgagaacaacagcttggcaagtgacaatgtgcaatattgccagaagttcttattgaagcgccataataattctcct

SEQ ID NO: 7409 - protein, 223 aa, Zea mays subsp. mays
  peptide (1)..(223): Ceres Seq. ID no. 12343629
  misc_feature (1)..(150): Pfam Name: Protein kinase domain Pfam Description: Protein kinase domain
  misc_feature (1)..(218): Homolog of NCBI NO: 21537155 NR Description: putative ribosomal-protein S6 kinase ATPK6
  misc_feature (1)..(218): Homolog of NCBI NO: 2129541 NR Description: protein kinase ATPK19 (EC 2.7.1.-) - Arabidopsis
  misc_feature (1)..(223): Homolog of NCBI NO: 1362152 NR Description: ribosomal protein S6 kinase homolog (clone - oat >gi|871986|emb|CAA56313.1| putative pp70 ribosomal protein
  misc_feature (1)..(223): Homolog of NCBI NO: 7649389 NR Description: S6 ribosomal protein kinase [Asparagus
  misc_feature (1)..(218): Homolog of NCBI NO: 15231959 NR Description: putative ribosomal-protein S6 kinase (ATPK19); id: At3g08720.1, supported by cDNA: gi_13272446, supported by
  misc_feature (1)..(218): Homolog of NCBI NO: 15231960 NR Description: putative ribosomal-protein S6 kinase (ATPK6); id: At3g08730.1, supported by cDNA: 122224., supported by cDNA: supported by cDNA: gi_508307, supported by cDNA: protein kinase
  misc_feature (1)..(223): Homolog of NCBI NO: 37575481 NR Description: ribosomal protein S6 kinase [Zea mays]
  misc_feature (1)..(221): Homolog of NCBI NO: 33146662 NR Description: putative S6 ribosomal protein kinase [Oryza
  misc_feature (1)..(213): Homolog of NCBI NO: 109371 NR Description: probable ribosomal protein S6 kinase (EC
  misc_feature (1)..(213): Homolog of NCBI NO: 125695 NR Description: Ribosomal protein S6 kinase (S6K) (p70-S6K)
IVSAVAHLHANGIMHRDLKPENILLDADGHAMLTDFGVAKEFDENTRSNSMCGTVEYMAPEIVQGRGHDKAADWWSVGVLLFEMLTGKPPFVGGNRDKIQQKIVKEKIKLPTYLSSEVHSMLKGLLHKEAGRRLGSGPGGSDEIKNHKWFKSVNWKRLEARQIEPSFRPNVAGKTCIANFDECWTNMPVLDSPVASPVAANSNFVGFSYVRPAPFLQKPSPLG

SEQ ID NO: 7410 - protein, 210 aa, Zea mays subsp. mays
  peptide (1)..(210): Ceres Seq. ID no. 12343630
  misc_feature (1)..(137): Pfam Name: Protein kinase domain Pfam Description: Protein kinase domain
  misc_feature (1)..(210): Homolog of NCBI NO: 1362152 NR Description: ribosomal protein S6 kinase homolog (clone - oat >gi|871986|emb|CAA56313.1| putative pp70 ribosomal protein
  misc_feature (1)..(208): Homolog of NCBI NO: 33146662 NR Description: putative S6 ribosomal protein kinase [Oryza
  misc_feature (1)..(210): Homolog of NCBI NO: 7649389 NR Description: S6 ribosomal protein kinase [Asparagus
  misc_feature (1)..(210): Homolog of NCBI NO: 37575481 NR Description: ribosomal protein S6 kinase [Zea mays]
  misc_feature (1)..(205): Homolog of NCBI NO: 15231959 NR Description: putative ribosomal-protein S6 kinase (ATPK19); id: At3g08720.1, supported by cDNA: gi_13272446, supported by
  misc_feature (1)..(205): Homolog of NCBI NO: 15231960 NR Description: putative ribosomal-protein S6 kinase (ATPK6); id: At3g08730.1, supported by cDNA: 122224., supported by cDNA: supported by cDNA: gi_508307, supported by cDNA: protein kinase
  misc_feature (1)..(205): Homolog of NCBI NO: 21537155 NR Description: putative ribosomal-protein S6 kinase ATPK6
  misc_feature (1)..(205): Homolog of NCBI NO: 2129541 NR Description: protein kinase ATPK19 (EC 2.7.1.-) - Arabidopsis
  misc_feature (1)..(200): Homolog of NCBI NO: 109371 NR Description: probable ribosomal protein S6 kinase (EC
  misc_feature (1)..(200): Homolog of NCBI NO: 125696 NR Description: Ribosomal protein S6 kinase I (S6K) (P70-S6K)
MHRDLKPENILLDADGHAMLTDFGVAKEFDENTRSNSMCGTVEYMAPEIVQGRGHDKAADWWSVGVLLFEMLTGKPPFVGGNRDKIQQKIVKEKIKLPTYLSSEVHSMLKGLLHKEAGRRLGSGPGGSDEIKNHKWFKSVNWKRLEARQIEPSFRPNVAGKTCIANFDECWTNMPVLDSPVASPVAANSNFVGFSYVRPAPFLQKPSPLG

SEQ ID NO: 7411 - protein, 192 aa, Zea mays subsp. mays
  peptide (1)..(192): Ceres Seq. ID no. 12343631
  misc_feature (1)..(119): Pfam Name: Protein kinase domain Pfam Description: Protein kinase domain
  misc_feature (1)..(192): Homolog of NCBI NO: 1362152 NR Description: ribosomal protein S6 kinase homolog (clone - oat >gi|871986|emb|CAA56313.1| putative pp70 ribosomal protein
  misc_feature (1)..(190): Homolog of NCBI NO: 33146662 NR Description: putative S6 ribosomal protein kinase [Oryza
  misc_feature (1)..(192): Homolog of NCBI NO: 7649389 NR Description: S6 ribosomal protein kinase [Asparagus
  misc_feature (1)..(192): Homolog of NCBI NO: 37575481 NR Description: ribosomal protein S6 kinase [Zea mays]
  misc_feature (1)..(187): Homolog of NCBI NO: 15231959 NR Description: putative ribosomal-protein S6 kinase (ATPK19); id: At3g08720.1, supported by cDNA: gi_13272446, supported by
  misc_feature (1)..(187): Homolog of NCBI NO: 15231960 NR Description: putative ribosomal-protein S6 kinase (ATPK6); id: At3g08730.1, supported by cDNA: 122224., supported by cDNA: supported by cDNA: gi_508307, supported by cDNA: protein kinase
  misc_feature (1)..(187): Homolog of NCBI NO: 21537155 NR Description: putative ribosomal-protein S6 kinase ATPK6
  misc_feature (1)..(187): Homolog of NCBI NO: 2129541 NR Description: protein kinase ATPK19 (EC 2.7.1.-) - Arabidopsis
  misc_feature (1)..(182): Homolog of NCBI NO: 109371 NR Description: probable ribosomal protein S6 kinase (EC
  misc_feature (1)..(182): Homolog of NCBI NO: 125695 NR Description: Ribosomal protein S6 kinase (S6K) (p70-S6K)
MLTDFGVAKEFDENTRSNSMCGTVEYMAPEIVQGRGHDKAADWWSVGVLLFEMLTGKPPFVGGNRDKIQQKIVKEKIKLPTYLSSEVHSMLKGLLHKEAGRRLGSGPGGSDEIKNHKWFKSVNWKRLEARQIEPSFRPNVAGKTCIANFDECWTNMPVLDSPVASPVAANSNFVGFSYVRPAPFLQKPSPLG

SEQ ID NO: 7412 - DNA, 1109 bp, Zea mays subsp. mays
  misc_feature (1)..(1109): Ceres Seq. ID no. 12353933
  misc_feature: MA Experiment ID: 108535 Result: Up-regulated in Transcription
  misc_feature: MA Experiment 108535 PARAMETER Experiment Name: Zm_Meristem_P Parameter: Age (day) Value: 8
  misc_feature: MA Experiment 108535 PARAMETER Experiment Name: Zm_Meristem_P Parameter: Organism Value: Zea mays
  misc_feature: MA Experiment 108535 PARAMETER Experiment Name: Zm_Meristem_P Parameter: Plant Line Value: 35A19
  misc_feature: MA Experiment 108535 PARAMETER Experiment Name: Zm_Meristem_P Parameter: Tissue Value: Root Meristem vs. Above Root Meristem
gcacagtgccactgaccactgcgagctctccctccagtttcacacaccctgatctgttcgcatcagtctcccggtcgcaagcgcctccgaaaccctagactcgcctcgcgagttgcttcgcttctcctgcccccgatggagccgtccccggcggtcgctgcggagctctggtgctcaccgcacctcgccgcgggcggcggccgcccgttggaggcgacctcggccgtcacggagaagagcagcggcggccgcggaggaggcggcgccgtccggaggaggccgagggagaccccggtgtccgaggatgactcgtcccggatcgtctccacttccggcggtggcggcggccaggatttgactgatctagaagcaaagcgttccaaaacaaataagtccagtaataataaaggcagtctaagaacagaggttgaaactgactcaagaagtgctggcaaggctgttagtaaaaacattccagcagcagagccaccaaaacaagattatatccatgtcagggcaaggaggggtcaagcaactgatagtcatagtcttgcagagagggcacgtcgtgagaaaataagtgaacgaatgaaagttctccaagatcttgtgcctggatgcaacaaggttattggcaaagcatcagtacttgatgagataattaattacatccagtcgttgcaatgtcaagttgagttcctgtccatgaaactagaggcagtgaatgcccaggcaaaccagggagttgaagtatttccagccaaagattacggttctcagacatacaacacagctcctgggctgacatttgatacgcaaaccagtagagaatacgcccagggcacgtcgacctcggaatggcttcacatgcagattggcagtggctatgaaagggtttcatgaacgagatgaatccaggcagccgctaaataaagtgaaccatgatcaatcatggccgtgcttgtagatcattctttttcattttttttgaaaccatcatgttccagacgcattttttattcatgcttggagctgtaattccagccggaacatgtatttttgatgaggcgctcatttgtttccccatctgaatctcaagactgtttctg

SEQ ID NO: 7413 - protein, 255 aa, Zea mays subsp. mays
  peptide (1)..(255): Ceres Seq. ID no. 12353934
  misc_feature (133)..(183): Pfam Name: Helix-loop-helix DNA-binding domain Pfam Description: Helix-loop-helix DNA-binding domain
  misc_feature (1)..(255): Homolog of NCBI NO: 29150361 NR Description: hypothetical protein [Oryza sativa (japonica
  misc_feature (56)..(255): Homolog of NCBI NO: 33339703 NR Description: MYC1 [Catharanthus roseus]
  misc_feature (56)..(255): Homolog of NCBI NO: 18406408 NR Description: bHLH protein; protein id: At1g59640.1, supported cDNA: 24644. [Arabidopsis thaliana] >gi|28393152|gb|AAO42009.1| bHLH protein [Arabidopsis thaliana] >gi|28827506|gb|AAO50597.1|
  misc_feature (56)..(255): Homolog of NCBI NO: 21592490 NR Description: unknown [Arabidopsis thaliana]
  misc_feature (21)..(255): Homolog of NCBI NO: 15241896 NR Description: putative protein; protein id: At5g62610.1, by cDNA: 112281., supported by cDNA: gi_18175778 [Arabidopsis
  misc_feature (56)..(211): Homolog of NCBI NO: 25404871 NR Description: protein T30E16.21 [imported] - Arabidopsis >gi|8778763|gb|AAF79771.1|AC009317_30 T30E16.21 [Arabidopsis
  misc_feature (56)..(211): Homolog of NCBI NO: 25453562 NR Description: helix-loop-helix protein homolog [imported] -
  misc_feature (56)..(211): Homolog of NCBI NO: 30696324 NR Description: bHLH protein [Arabidopsis thaliana]
  misc_feature (18)..(230): Homolog of NCBI NO: 34906952 NR Description: DNA-binding protein-like protein [Oryza sativa
  misc_feature (42)..(211): Homolog of NCBI NO: 15239013 NR Description: putative protein; protein id: At5g48560.1, by cDNA: gi_20127084 [Arabidopsis thaliana] contains similarity to unknown
MEPSPAVAAELWCSPHLAAGGGRPLEATSAVTEKSSGGRGGGGAVRRRPRETPVSEDDSSRIVSTSGGGGGQDLTDLEAKRSKTNKSSNNKGSLRTEVETDSRSAGKAVSKNIPAAEPPKQDYIHVRARRGQATDSHSLAERARREKISERMKVLQDLVPGCNKVIGKASVLDEIINYIQSLQCQVEFLSMKLEAVNAQANQGVEVFPAKDYGSQTYNTAPGLTFDTQTSREYAQGTSTSEWLHMQIGSGYERVS

SEQ ID NO: 7414 - DNA, 1657 bp, Zea mays subsp. mays
  misc_feature (1)..(1657): Ceres Seq. ID no. 12548275
  misc_feature: MA Experiment ID: 108527 Result: Down-regulated in Transcription
  misc_feature: MA Experiment 108527 PARAMETER Experiment Name: Zm_5mM_NO_P Parameter: Age (day) Value: 8
  misc_feature: MA Experiment 108527 PARAMETER Experiment Name: Zm_5mM_NO_P Parameter: Organism Value: Zea mays
  misc_feature: MA Experiment 108527 PARAMETER Experiment Name: Zm_5mM_NO_P Parameter: Plant Line Value: 35A19
  misc_feature: MA Experiment 108527 PARAMETER Experiment Name: Zm_5mM_NO_P Parameter: Timepoint (hr) Value: 6
  misc_feature: MA Experiment 108527 PARAMETER Experiment Name: Zm_5mM_NO_P Parameter: Tissue Value: Aerial
  misc_feature: MA Experiment 108527 PARAMETER Experiment Name: Zm_5mM_NO_P Parameter: Treatment Value: 5mM NO vs. No Treatment
  misc_feature: MA Experiment ID: 108528 Result: Up-regulated in Transcription
  misc_feature: MA Experiment 108528 PARAMETER Experiment Name: Zm_Imbibed_Seeds_P Parameter: Age (day) Value: 5 vs. 2
  misc_feature: MA Experiment 108528 PARAMETER Experiment Name: Zm_Imbibed_Seeds_P Parameter: Organism Value: Zea mays
  misc_feature: MA Experiment 108528 PARAMETER Experiment Name: Zm_Imbibed_Seeds_P Parameter: Plant Line Value: 35A19
  misc_feature: MA Experiment 108528 PARAMETER Experiment Name: Zm_Imbibed_Seeds_P Parameter: Tissue Value: Aerial vs. Embryo
  misc_feature: MA Experiment ID: 108529 Result: Down-regulated in Transcription
  misc_feature: MA Experiment 108529 PARAMETER Experiment Name: Zm_Imbibed_Seeds_P Parameter: Age (day) Value: 5 vs. 2
  misc_feature: MA Experiment 108529 PARAMETER Experiment Name: Zm_Imbibed_Seeds_P Parameter: Organism Value: Zea mays
  misc_feature: MA Experiment 108529 PARAMETER Experiment Name: Zm_Imbibed_Seeds_P Parameter: Plant Line Value: 35A19
  misc_feature: MA Experiment 108529 PARAMETER Experiment Name: Zm_Imbibed_Seeds_P Parameter: Tissue Value: Roots vs. Embryo
  misc_feature: MA Experiment ID: 108530 Result: Up-regulated in Transcription
  misc_feature: MA Experiment 108530 PARAMETER Experiment Name: Zm_Imbibed_Seeds_P Parameter: Age (day) Value: 6 vs. 2
  misc_feature: MA Experiment 108530 PARAMETER Experiment Name: Zm_Imbibed_Seeds_P Parameter: Organism Value: Zea mays
  misc_feature: MA Experiment 108530 PARAMETER Experiment Name: Zm_Imbibed_Seeds_P Parameter: Plant Line Value: 35A19
  misc_feature: MA Experiment 108530 PARAMETER Experiment Name: Zm_Imbibed_Seeds_P Parameter: Tissue Value: Aerial vs. Embryo
  misc_feature: MA Experiment ID: 108536 Result: Down-regulated in Transcription
  misc_feature: MA Experiment 108536 PARAMETER Experiment Name: Zm_Meristem_P Parameter: Age (day) Value: 8
  misc_feature: MA Experiment 108536 PARAMETER Experiment Name: Zm_Meristem_P Parameter: Organism Value: Zea mays
  misc_feature: MA Experiment 108536 PARAMETER Experiment Name: Zm_Meristem_P Parameter: Plant Line Value: 35A19
  misc_feature: MA Experiment 108536 PARAMETER Experiment Name: Zm_Meristem_P Parameter: Tissue Value: Shoot Meristem vs. Above Shoot Meristem
  misc_feature: MA Experiment ID: 108544 Result: Down-regulated in Transcription
  misc_feature: MA Experiment ID: 108545 Result: Up-regulated in Transcription
  misc_feature: MA Experiment 108545 PARAMETER Experiment Name: Zm_Imbibed_Seeds_P Parameter: Age (day) Value: 3 vs. 2
  misc_feature: MA Experiment 108545 PARAMETER Experiment Name: Zm_Imbibed_Seeds_P Parameter: Organism Value: Zea mays
  misc_feature: MA Experiment 108545 PARAMETER Experiment Name: Zm_Imbibed_Seeds_P Parameter: Plant Line Value: 35A19
  misc_feature: MA Experiment 108545 PARAMETER Experiment Name: Zm_Imbibed_Seeds_P Parameter: Tissue Value: Aerial vs. Embryo
  misc_feature: MA Experiment ID: 108546 Result: Down-regulated in Transcription
  misc_feature: MA Experiment 108546 PARAMETER Experiment Name: Zm_Imbibed_Seeds_P Parameter: Age (day) Value: 3 vs. 2
  misc_feature: MA Experiment 108546 PARAMETER Experiment Name: Zm_Imbibed_Seeds_P Parameter: Organism Value: Zea mays
  misc_feature: MA Experiment 108546 PARAMETER Experiment Name: Zm_Imbibed_Seeds_P Parameter: Plant Line Value: 35A19
  misc_feature: MA Experiment 108546 PARAMETER Experiment Name: Zm_Imbibed_Seeds_P Parameter: Tissue Value: Roots vs. Embryo
  misc_feature: MA Experiment ID: 108547 Result: Up-regulated in Transcription
  misc_feature: MA Experiment 108547 PARAMETER Experiment Name: Zm_Imbibed_Seeds_P Parameter: Age (day) Value: 4 vs. 2
  misc_feature: MA Experiment 108547 PARAMETER Experiment Name: Zm_Imbibed_Seeds_P Parameter: Organism Value: Zea mays
  misc_feature: MA Experiment 108547 PARAMETER Experiment Name: Zm_Imbibed_Seeds_P Parameter: Plant Line Value: 35A19
  misc_feature: MA Experiment 108547 PARAMETER Experiment Name: Zm_Imbibed_Seeds_P Parameter: Tissue Value: Aerial vs. Embryo
  misc_feature: MA Experiment ID: 108559 Result: Down-regulated in Transcription
  misc_feature: MA Experiment 108559 PARAMETER Experiment Name: Zm_5mM_NO_P Parameter: Age (day) Value: 8
  misc_feature: MA Experiment 108559 PARAMETER Experiment Name: Zm_5mM_NO_P Parameter: Organism Value: Zea mays
  misc_feature: MA Experiment 108559 PARAMETER Experiment Name: Zm_5mM_NO_P Parameter: Plant Line Value: 35A19
  misc_feature: MA Experiment 108559 PARAMETER Experiment Name: Zm_5mM_NO_P Parameter: Timepoint (hr) Value: 12
  misc_feature: MA Experiment 108559 PARAMETER Experiment Name: Zm_5mM_NO_P Parameter: Tissue Value: Aerial
  misc_feature: MA Experiment 108559 PARAMETER Experiment Name: Zm_5mM_NO_P Parameter: Treatment Value: 5mM NO vs. No Treatment
  misc_feature: MA Experiment ID: 108688 Result: Down-regulated in Transcription
  misc_feature: MA Experiment 108688 PARAMETER Experiment Name: Zm_Embryos-Flowers__P Parameter: Tissue Value: Immature Flowers vs. Aerial+
cttctagataagcagcgcaaacccctactctctcgcctctccctatccatccccaaataatccccacctcccgctcatcctccgcctccgccgcccgccatggcctccctcacctcggcctccacctcactcctcttcccgcaggcctcctcatccaggagccgcgtccggctctccacctccctgggcttctccgcgcagccggcgcggctgcggagccgggcggcggcaggagggcagcggcgcgggagcctgctggtggtgcgcgcggcgaggggaaagttcgagcgcaccaagccgcacgtaaacatcggcaccatcggtcacgtcgaccacggcaagaccaccctcaccgccgcgctcaccatggtgctcgcctccgtcggcggcagcgcgcccaagaagtacgacgagatcgatgccgcccccgaggagcgtgcccgcggtatcaccatcaacaccgccaccgtcgagtacgagaccgagacccgccactacgcgcacgtcgactgccccggccacgccgactatgtcaagaacatgatcaccggcgctgcgcagatggacggcgccatcctcgtcgtctctggcgccgacggtcccatgccgcagaccaaagagcacattctcctcgccaagcaggtcggcgttcccaagatcgttgtcttcctcaacaagaaggacatggtcgacgacgaggagctgctcgagctcgtcgagctggaagtccgcgagctgctcagcaactatgagtacgacggcgacgaggtgccaatcgtcgctggctccgccctcaaggcgctcgaggccctcatgggcaaccctaccctgaagcgcggcgacgatgagtgggtggactgcatcttcaagctggttgattctgtggattcctacattccagtgccacagcggcagaccgacctcccgttcttactcgctgttgaagatgtcttctccatcaccggtcgtggtacagttgccactggccgtatcgagcgtggcaccgtcaagattggtgacacagtcgatatcgttggaatccgggacacccggaactgcaccgtgactggcgttgagatgttccagaagaccatggacgatgccatggctggagacaatgtcggactgctgctccgtggtatgcagaaggatgacattgagagaggcatggtgctggcaaagcccggctctatcacaccgcacaccaagtttgaggctgttgtgtatgtgcttaagaaggaagagggtggccggcactcacctttcttccctggttaccgcccgcagttctacatgaggacaaccgatgtgacagggaatgtgactgtgattatgaatgacaaagatgaggaggcgaagatgtgcatgcctggtgaccgtatcaagatggttgttcagctcatccagcctgttgcttgtgagcagggtatgaggtttgctatccgtgagggtggtaagactgttggtgctggtgtcatcaacaaaatcattgagtaaactggatatatcacatccaccacgagaattttccttgtttactcaaagcgaaatgctctgtagttgttattatgtgttgagttttaggggttgttcatgtgaaattgtagtatgacactctttcgccaagtgaatttgcataatttatgacattcacggc

SEQ ID NO: 7415 - protein, 465 aa, Zea mays subsp. mays
  peptide (1)..(465): Ceres Seq. ID no. 12548276
  misc_feature (66)..(270): Pfam Name: Elongation factor Tu GTP binding domain Pfam Description: Elongation factor Tu GTP binding domain
  misc_feature (1)..(465): Homolog of NCBI NO: 17225494 NR Description: translational elongation factor Tu [Oryza sativa]
  misc_feature (1)..(465): Homolog of NCBI NO: 6525065 NR Description: chloroplast translational elongation factor Tu
  misc_feature (1)..(465): Homolog of NCBI NO: 459241 NR Description: chloroplast elongation factor TuB(EF-TuB)
  misc_feature (3)..(465): Homolog of NCBI NO: 12830555 NR Description: chloroplast translational elongation factor Tu
MASLTSASTSLLFPQASSSRSRVRLSTSLGFSAQPARLRSRAAAGGQRRGSLLVVRAARGKFERTKPHVNIGTIGHVDHGKTTLTAALTMVLASVGGSAPKKYDEIDAAPEERARGITINTATVEYETETRHYAHVDCPGHADYVKNMITGAAQMDGAILVVSGADGPMPQTKEHILLAKQVGVPKIVVFLNKKDMVDDEELLELVELEVRELLSNYEYDGDEVPIVAGSALKALEALMGNPTLKRGDDEWVDCIFKLVDSVDSYIPVPQRQTDLPFLLAVEDVFSITGRGTVATGRIERGTVKIGDTVDIVGIRDTRNCTVTGVEMFQKTMDDAMAGDNVGLLLRGMQKDDIERGMVLAKPGSITPHTKFEAVVYVLKKEEGGRHSPFFPGYRPQFYMRTTDVTGNVTVIMNDKDEEAKMCMPGDRIKMVVQLIQPVACEQGMRFAIREGGKTVGAGVINKIIE

SEQ ID NO: 7416 - protein, 376 aa, Zea mays subsp. mays
  peptide (1)..(376): Ceres Seq. ID no. 12548277
  misc_feature (1)..(181): Pfam Name: Elongation factor Tu GTP binding domain Pfam Description: Elongation factor Tu GTP binding domain
  misc_feature (1)..(376): Homolog of NCBI NO: 17225494 NR Description: translational elongation factor Tu [Oryza sativa]
  misc_feature (1)..(376): Homolog of NCBI NO: 6525065 NR Description: chloroplast translational elongation factor Tu
  misc_feature (1)..(376): Homolog of NCBI NO: 459241 NR Description: chloroplast elongation factor TuB(EF-TuB)
  misc_feature (1)..(376): Homolog of NCBI NO: 12830555 NR Description: chloroplast translational elongation factor Tu
MVLASVGGSAPKKYDEIDAAPEERARGITINTATVEYETETRHYAHVDCPGHADYVKNMITGAAQMDGAILVVSGADGPMPQTKEHILLAKQVGVPKIVVFLNKKDMVDDEELLELVELEVRELLSNYEYDGDEVPIVAGSALKALEALMGNPTLKRGDDEWVDCIFKLVDSVDSYIPVPQRQTDLPFLLAVEDVFSITGRGTVATGRIERGTVKIGDTVDIVGIRDTRNCTVTGVEMFQKTMDDAMAGDNVGLLLRGMQKDDIERGMVLAKPGSITPHTKFEAVVYVLKKEEGGRHSPFFPGYRPQFYMRTTDVTGNVTVIMNDKDEEAKMCMPGDRIKMVVQLIQPVACEQGMRFAIREGGKTVGAGVINKIIE

SEQ ID NO: 7417 - protein, 318 aa, Zea mays subsp. mays
  peptide (1)..(318): Ceres Seq. ID no. 12548278
  misc_feature (1)..(123): Pfam Name: Elongation factor Tu GTP binding domain Pfam Description: Elongation factor Tu GTP binding domain
  misc_feature (1)..(318): Homolog of NCBI NO: 17225494 NR Description: translational elongation factor Tu [Oryza sativa]
  misc_feature (1)..(318): Homolog of NCBI NO: 6525065 NR Description: chloroplast translational elongation factor Tu
  misc_feature (1)..(318): Homolog of NCBI NO: 459241 NR Description: chloroplast elongation factor TuB(EF-TuB)
  misc_feature (1)..(318): Homolog of NCBI NO: 12830555 NR Description: chloroplast translational elongation factor Tu
MITGAAQMDGAILVVSGADGPMPQTKEHILLAKQVGVPKIVVFLNKKDMVDDEELLELVELEVRELLSNYEYDGDEVPIVAGSALKALEALMGNPTLKRGDDEWVDCIFKLVDSVDSYIPVPQRQTDLPFLLAVEDVFSITGRGTVATGRIERGTVKIGDTVDIVGIRDTRNCTVTGVEMFQKTMDDAMAGDNVGLLLRGMQKDDIERGMVLAKPGSITPHTKFEAVVYVLKKEEGGRHSPFFPGYRPQFYMRTTDVTGNVTVIMNDKDEEAKMCMPGDRIKMVVQLIQPVACEQGMRFAIREGGKTVGAGVINKIIE

SEQ ID NO: 7418 - DNA, 1197 bp, Zea mays subsp. mays
  misc_feature (1)..(1197): Ceres Seq. ID no. 12408810
  misc_feature: MA Experiment ID: 108528 Result: Up-regulated in Transcription
  misc_feature: MA Experiment 108528 PARAMETER Experiment Name: Zm_Imbibed_Seeds_P Parameter: Age (day) Value: 5 vs. 2
  misc_feature: MA Experiment 108528 PARAMETER Experiment Name: Zm_Imbibed_Seeds_P Parameter: Organism Value: Zea mays
  misc_feature: MA Experiment 108528 PARAMETER Experiment Name: Zm_Imbibed_Seeds_P Parameter: Plant Line Value: 35A19
  misc_feature: MA Experiment 108528 PARAMETER Experiment Name: Zm_Imbibed_Seeds_P Parameter: Tissue Value: Aerial vs. Embryo
  misc_feature: MA Experiment ID: 108530 Result: Up-regulated in Transcription
  misc_feature: MA Experiment 108530 PARAMETER Experiment Name: Zm_Imbibed_Seeds_P Parameter: Age (day) Value: 6 vs. 2
  misc_feature: MA Experiment 108530 PARAMETER Experiment Name: Zm_Imbibed_Seeds_P Parameter: Organism Value: Zea mays
  misc_feature: MA Experiment 108530 PARAMETER Experiment Name: Zm_Imbibed_Seeds_P Parameter: Plant Line Value: 35A19
  misc_feature: MA Experiment 108530 PARAMETER Experiment Name: Zm_Imbibed_Seeds_P Parameter: Tissue Value: Aerial vs. Embryo
  misc_feature: MA Experiment ID: 108543 Result: Up-regulated in Transcription
  misc_feature: MA Experiment ID: 108547 Result: Up-regulated in Transcription
  misc_feature: MA Experiment 108547 PARAMETER Experiment Name: Zm_Imbibed_Seeds_P Parameter: Age (day) Value: 4 vs. 2
  misc_feature: MA Experiment 108547 PARAMETER Experiment Name: Zm_Imbibed_Seeds_P Parameter: Organism Value: Zea mays
  misc_feature: MA Experiment 108547 PARAMETER Experiment Name: Zm_Imbibed_Seeds_P Parameter: Plant Line Value: 35A19
  misc_feature: MA Experiment 108547 PARAMETER Experiment Name: Zm_Imbibed_Seeds_P Parameter: Tissue Value: Aerial vs. Embryo
tagaacatcctaatcgaaaaaggcgggcccaaggtcgtgactaggcacagtcgcacagaccactagaccagcacacggccacagtaccacacagaacagtagcaccgggctccgggcaccagggcaggcgaattcctaggttcgctggagcctggagcgagggatggccgccgcctcgctcgcgttggcgagtcctttccggcttctcctccgcgcccctcacccgcgcggagccatccccgtcccgtgctactttatctcgcgaggacggtatagcaccgccattgccgtcgcagcagcgagggattcggcggtgaaaggaagcgtggacaggaattcagcggaggaagtcaggaacattctgaatatggcagaaagggcttcccaacgaagagatgtttttcacaccaattttcttactccacctatagtgaaagagactatgctggcacttgaaaagtttgcagataccaaagcagtagctcagggtggctaccctcaggctgagaggtgccgaatatctgttgggcacccggacgtcatgacaagtaacccagatgtggttgctgctttgagcatctcagggaatttccggttggaatcttgttctcatggtgactttcttggtgctattcttgggacaggaataacaagggagaaagttggagatattcttttgcagggggaacgaggtgcccaggtccttgttgacccagaacttgttgactatctgatttctacccttgaaaaggtggggaaagttggtgtttcatgcactcagattcctttgcttgctctagaatatgaaccgccaaggaccaattcatttaaaactgtagaatcatcgctcagggttgatgcccttgccagtgcaggatttaaaatctcacgcacgaagcttgctagcttgataagttctggtgatgttcgtgtgaattggacaccaacaacaaaaaatggagttaccctcaaatctagagatgttgtttctgttagtgggatgggaaggttaaagattggggaaattgtgactacgaggaaaggaaaatatgcggtttgagttgattcgctatttgtaatcatgggactggtctactttcatgtctgaaactctgaatttaacggtacacattttctcctatatgtgatgagaatcatgtattaagtattacttctcagtgaagttgaaagtgatgc

SEQ ID NO: 7419 - protein, 298 aa, Zea mays subsp. mays
  peptide (1)..(298): Ceres Seq. ID no. 12408811
  misc_feature (229)..(275): Pfam Name: S4 domain Pfam Description: S4 domain
  misc_feature (1)..(298): Homolog of NCBI NO: 18404337 NR Description: expressed protein; protein id: At1g53120.1, by cDNA: gi_16648938 [Arabidopsis thaliana] Unknown protein [Arabidopsis thaliana]
  misc_feature (173)..(298): Homolog of NCBI NO: 34909484 NR Description: P0481E12.12 [Oryza sativa (japonica
  misc_feature (47)..(298): Homolog of NCBI NO: 16330752 NR Description: hypothetical protein [Synechocystis sp. PCC 6803]
  misc_feature (47)..(298): Homolog of NCBI NO: 17230382 NR Description: hypothetical protein [Nostoc sp. PCC 7120]
  misc_feature (47)..(298): Homolog of NCBI NO: 23125059 NR Description: hypothetical protein [Nostoc punctiforme]
  misc_feature (47)..(298): Homolog of NCBI NO: 23042582 NR Description: hypothetical protein [Trichodesmium erythraeum
  misc_feature (47)..(298): Homolog of NCBI NO: 37519960 NR Description: hypothetical protein gll0391 [Gloeobacter
  misc_feature (1)..(255): Homolog of NCBI NO: 25405622 NR Description: hypothetical protein F8L10.3 [imported] - thaliana >gi|9454543|gb|AAF87866.1|AC022520_10 Unknown protein
  misc_feature (79)..(298): Homolog of NCBI NO: 22299704 NR Description: ORF_ID:tlr2161~hypothetical protein
  misc_feature (194)..(293): Homolog of NCBI NO: 25405622 NR Description: hypothetical protein F8L10.3 [imported] - thaliana >gi|9454543|gb|AAF87866.1|AC022520_10 Unknown protein
MAAASLALASPFRLLLRAPHPRGAIPVPCYFISRGRYSTAIAVAAARDSAVKGSVDRNSAEEVRNILNMAERASQRRDVFHTNFLTPPIVKETMLALEKFADTKAVAQGGYPQAERCRISVGHPDVMTSNPDVVAALSISGNFRLESCSHGDFLGAILGTGITREKVGDILLQGERGAQVLVDPELVDYLISTLEKVGKVGVSCTQIPLLALEYEPPRTNSFKTVESSLRVDALASAGFKISRTKLASLISSGDVRVNWTPTTKNGVTLKSRDVVSVSGMGRLKIGEIVTTRKGKYAV

SEQ ID NO: 7420 - protein, 230 aa, Zea mays subsp. mays
  peptide (1)..(230): Ceres Seq. ID no. 12408812
  misc_feature (161)..(207): Pfam Name: S4 domain Pfam Description: S4 domain
  misc_feature (1)..(230): Homolog of NCBI NO: 18404337 NR Description: expressed protein; protein id: At1g53120.1, by cDNA: gi_16648938 [Arabidopsis thaliana] Unknown protein [Arabidopsis thaliana]
  misc_feature (105)..(230): Homolog of NCBI NO: 34909484 NR Description: P0481E12.12 [Oryza sativa (japonica
  misc_feature (1)..(230): Homolog of NCBI NO: 16330752 NR Description: hypothetical protein [Synechocystis sp. PCC 6803]
  misc_feature (1)..(230): Homolog of NCBI NO: 17230382 NR Description: hypothetical protein [Nostoc sp. PCC 7120]
  misc_feature (1)..(230): Homolog of NCBI NO: 23125059 NR Description: hypothetical protein [Nostoc punctiforme]
  misc_feature (1)..(230): Homolog of NCBI NO: 23042582 NR Description: hypothetical protein [Trichodesmium erythraeum
  misc_feature (1)..(230): Homolog of NCBI NO: 37519960 NR Description: hypothetical protein gll0391 [Gloeobacter
  misc_feature (1)..(187): Homolog of NCBI NO: 25405622 NR Description: hypothetical protein F8L10.3 [imported] - thaliana >gi|9454543|gb|AAF87866.1|AC022520_10 Unknown protein
  misc_feature (11)..(230): Homolog of NCBI NO: 22299704 NR Description: ORF_ID:tlr2161~hypothetical protein
  misc_feature (126)..(225): Homolog of NCBI NO: 25405622 NR Description: hypothetical protein F8L10.3 [imported] - thaliana >gi|9454543|gb|AAF87866.1|AC022520_10 Unknown protein
MAERASQRRDVFHTNFLTPPIVKETMLALEKFADTKAVAQGGYPQAERCRISVGHPDVMTSNPDVVAALSISGNFRLESCSHGDFLGAILGTGITREKVGDILLQGERGAQVLVDPELVDYLISTLEKVGKVGVSCTQIPLLALEYEPPRTNSFKTVESSLRVDALASAGFKISRTKLASLISSGDVRVNWTPTTKNGVTLKSRDVVSVSGMGRLKIGEIVTTRKGKYAV

SEQ ID NO: 7421 - protein, 205 aa, Zea mays subsp. mays
  peptide (1)..(205): Ceres Seq. ID no. 12408813
  misc_feature (136)..(182): Pfam Name: S4 domain Pfam Description: S4 domain
  misc_feature (1)..(205): Homolog of NCBI NO: 18404337 NR Description: expressed protein; protein id: At1g53120.1, by cDNA: gi_16648938 [Arabidopsis thaliana] Unknown protein [Arabidopsis thaliana]
  misc_feature (80)..(205): Homolog of NCBI NO: 34909484 NR Description: P0481E12.12 [Oryza sativa (japonica
  misc_feature (1)..(205): Homolog of NCBI NO: 16330752 NR Description: hypothetical protein [Synechocystis sp. PCC 6803]
  misc_feature (1)..(205): Homolog of NCBI NO: 17230382 NR Description: hypothetical protein [Nostoc sp. PCC 7120]
  misc_feature (1)..(205): Homolog of NCBI NO: 23125059 NR Description: hypothetical protein [Nostoc punctiforme]
  misc_feature (1)..(205): Homolog of NCBI NO: 23042582 NR Description: hypothetical protein [Trichodesmium erythraeum
  misc_feature (1)..(205): Homolog of NCBI NO: 37519960 NR Description: hypothetical protein gll0391 [Gloeobacter
  misc_feature (1)..(162): Homolog of NCBI NO: 25405622 NR Description: hypothetical protein F8L10.3 [imported] - thaliana >gi|9454543|gb|AAF87866.1|AC022520_10 Unknown protein
  misc_feature (1)..(205): Homolog of NCBI NO: 22299704 NR Description: ORF_ID:tlr2161~hypothetical protein
  misc_feature (101)..(200): Homolog of NCBI NO: 25405622 NR Description: hypothetical protein F8L10.3 [imported] - thaliana >gi|9454543|gb|AAF87866.1|AC022520_10 Unknown protein
MLALEKFADTKAVAQGGYPQAERCRISVGHPDVMTSNPDVVAALSISGNFRLESCSHGDFLGAILGTGITREKVGDILLQGERGAQVLVDPELVDYLISTLEKVGKVGVSCTQIPLLALEYEPPRTNSFKTVESSLRVDALASAGFKISRTKLASLISSGDVRVNWTPTTKNGVTLKSRDVVSVSGMGRLKIGEIVTTRKGKYAV

SEQ ID NO: 7422 - DNA, 1057 bp, Zea mays subsp. mays
  misc_feature (1)..(1057): Ceres Seq. ID no. 12340862
  misc_feature: MA Experiment ID: 108522 Result: Up-regulated in Transcription
  misc_feature: MA Experiment 108522 PARAMETER Experiment Name: Zm_42deg_Heat_P Parameter: Age (day) Value: 8
  misc_feature: MA Experiment 108522 PARAMETER Experiment Name: Zm_42deg_Heat_P Parameter: Organism Value: Zea mays
  misc_feature: MA Experiment 108522 PARAMETER Experiment Name: Zm_42deg_Heat_P Parameter: Plant Line Value: 35A19
  misc_feature: MA Experiment 108522 PARAMETER Experiment Name: Zm_42deg_Heat_P Parameter: Temperature (deg C) Value: 42 vs. 22
  misc_feature: MA Experiment 108522 PARAMETER Experiment Name: Zm_42deg_Heat_P Parameter: Timepoint (hr) Value: 1
  misc_feature: MA Experiment 108522 PARAMETER Experiment Name: Zm_42deg_Heat_P Parameter: Tissue Value: Aerial
  misc_feature: MA Experiment ID: 108523 Result: Up-regulated in Transcription
  misc_feature: MA Experiment 108523 PARAMETER Experiment Name: Zm_42deg_Heat_P Parameter: Age (day) Value: 8
  misc_feature: MA Experiment 108523 PARAMETER Experiment Name: Zm_42deg_Heat_P Parameter: Organism Value: Zea mays
  misc_feature: MA Experiment 108523 PARAMETER Experiment Name: Zm_42deg_Heat_P Parameter: Plant Line Value: 35A19
  misc_feature: MA Experiment 108523 PARAMETER Experiment Name: Zm_42deg_Heat_P Parameter: Temperature (deg C) Value: 42 vs. 22
  misc_feature: MA Experiment 108523 PARAMETER Experiment Name: Zm_42deg_Heat_P Parameter: Timepoint (hr) Value: 6
  misc_feature: MA Experiment 108523 PARAMETER Experiment Name: Zm_42deg_Heat_P Parameter: Tissue Value: Aerial
  misc_feature: MA Experiment ID: 108527 Result: Up-regulated in Transcription
  misc_feature: MA Experiment 108527 PARAMETER Experiment Name: Zm_5mM_NO_P Parameter: Age (day) Value: 8
  misc_feature: MA Experiment 108527 PARAMETER Experiment Name: Zm_5mM_NO_P Parameter: Organism Value: Zea mays
  misc_feature: MA Experiment 108527 PARAMETER Experiment Name: Zm_5mM_NO_P Parameter: Plant Line Value: 35A19
  misc_feature: MA Experiment 108527 PARAMETER Experiment Name: Zm_5mM_NO_P Parameter: Timepoint (hr) Value: 6
  misc_feature: MA Experiment 108527 PARAMETER Experiment Name: Zm_5mM_NO_P Parameter: Tissue Value: Aerial
  misc_feature: MA Experiment 108527 PARAMETER Experiment Name: Zm_5mM_NO_P Parameter: Treatment Value: 5mM NO vs. No Treatment
  misc_feature: MA Experiment ID: 108534 Result: Up-regulated in Transcription
  misc_feature: MA Experiment 108534 PARAMETER Experiment Name: Zm_4deg_Cold_P Parameter: Age (hr) Value: 8
  misc_feature: MA Experiment 108534 PARAMETER Experiment Name: Zm_4deg_Cold_P Parameter: Organism Value: Zea mays
  misc_feature: MA Experiment 108534 PARAMETER Experiment Name: Zm_4deg_Cold_P Parameter: Plant Line Value: 35A19
  misc_feature: MA Experiment 108534 PARAMETER Experiment Name: Zm_4deg_Cold_P Parameter: Temperature (deg C) Value: 4 vs. 22
  misc_feature: MA Experiment 108534 PARAMETER Experiment Name: Zm_4deg_Cold_P Parameter: Timepoint (hr) Value: 6
  misc_feature: MA Experiment 108534 PARAMETER Experiment Name: Zm_4deg_Cold_P Parameter: Tissue Value: Aerial
  misc_feature: MA Experiment ID: 108543 Result: Up-regulated in Transcription
  misc_feature: MA Experiment ID: 108559 Result: Up-regulated in Transcription
  misc_feature: MA Experiment 108559 PARAMETER Experiment Name: Zm_5mM_NO_P Parameter: Age (day) Value: 8
  misc_feature: MA Experiment 108559 PARAMETER Experiment Name: Zm_5mM_NO_P Parameter: Organism Value: Zea mays
  misc_feature: MA Experiment 108559 PARAMETER Experiment Name: Zm_5mM_NO_P Parameter: Plant Line Value: 35A19
  misc_feature: MA Experiment 108559 PARAMETER Experiment Name: Zm_5mM_NO_P Parameter: Timepoint (hr) Value: 12
  misc_feature: MA Experiment 108559 PARAMETER Experiment Name: Zm_5mM_NO_P Parameter: Tissue Value: Aerial
  misc_feature: MA Experiment 108559 PARAMETER Experiment Name: Zm_5mM_NO_P Parameter: Treatment Value: 5mM NO vs. No Treatment
aaaatttccacaaccgaaacctgcagtcgggtcatctcgtccacgaaacgtacggacttcgggcatcggccccaacgccagcggcaccgcacccgcaccaccaagctcgtcggcgacatgaatccgcccgcagcagccgcgtccaccggcgcaggaggccacgccgcggcgcctgcggcagccccggagtacgtgcactacccgaggctctcgccagaggaggtggccccgcccccgccttatgcacgccgccaccgccgcgccgtccgcctacggaggcaacccctacatctactcccccgccggcggcgccgccacctccccgaagaatacgatggactccgtgaaggacgtgctcggcaagatggggaagaggtttggcgaggcggcccgcaagaccgagaccatcaccggcaatttctggcagcacttgaaaactggaccaagcattactgatgcagcaatgagcaggatctcacaggtcaccaaagtcattgcagaaggtggatatgacaaaattttccatcaaacttttgaggtcgcccctggtgaaaagctcaagaagccatatgcatgttatctgtcaacctcggctggtcctgttatgggtgtgctttacctgtccaatgtaaaactggcattttgtagtgataacccacttgcataccaggttggagacaaaactgagtggagttactacaaggtggtcatcccccttgctcaactgcgatcaattaattcatcaacaagcagaacaaatgcagcagagaaatacattcaggtggtttctgttgataaccatgggttttggtttatgggcttcgtttactatgacagtgcggtgaagaatctgcaggaagcacttcaggaggctcagaatttacgtgcttagtgatgttcatggattggaactagcatgtcttatacattacagctgtgatatactgtttttccgtcagtttcgactgtttgtccagatttagtttgcgtaggtatcagctgtttctgtcttttgtactgacttaaaccaatgttcaatatgtgacgtgcatccttt

SEQ ID NO: 7423 - protein, 216 aa, Zea mays subsp. mays
  peptide (1)..(216): Ceres Seq. ID no. 12340863
  misc_feature (92)..(169): Pfam Name: GRAM domain Pfam Description: GRAM domain
  misc_feature (1)..(216): Homolog of NCBI NO: 34902414 NR Description: Putative FH protein interacting protein FIP1
  misc_feature (33)..(209): Homolog of NCBI NO: 34906818 NR Description: contains EST C91668(E31216)~similar to FH protein
  misc_feature (1)..(216): Homolog of NCBI NO: 18399985 NR Description: Expressed protein; protein id: At2g22475.1, by cDNA: 32573. [Arabidopsis thaliana]
  misc_feature (3)..(209): Homolog of NCBI NO: 15217869 NR Description: FH protein interacting protein FIP1; protein id: supported by cDNA: 30245., supported by cDNA: gi_13877828, by cDNA: gi_15912222, supported by cDNA: gi_16323497, supported
  misc_feature (1)..(216): Homolog of NCBI NO: 21592789 NR Description: unknown [Arabidopsis thaliana]
  misc_feature (1)..(216): Homolog of NCBI NO: 26452129 NR Description: unknown protein [Arabidopsis thaliana]
  misc_feature (1)..(209): Homolog of NCBI NO: 29788871 NR Description: putative ABA-responsive protein [Oryza sativa
  misc_feature (4)..(127): Homolog of NCBI NO: 15236123 NR Description: putative protein; protein id: At4g40100.1
  misc_feature (155)..(209): Homolog of NCBI NO: 15236123 NR Description: putative protein; protein id: At4g40100.1
  misc_feature (75)..(209): Homolog of NCBI NO: 33146631 NR Description: putative FH protein interacting protein FIP1
MHAATAAPSAYGGNPYIYSPAGGAATSPKNTMDSVKDVLGKMGKRFGEAARKTETITGNFWQHLKTGPSITDAAMSRISQVTKVIAEGGYDKIFHQTFEVAPGEKLKKPYACYLSTSAGPVMGVLYLSNVKLAFCSDNPLAYQVGDKTEWSYYKVVIPLAQLRSINSSTSRTNAAEKYIQVVSVDNHGFWFMGFVYYDSAVKNLQEALQEAQNLRA

SEQ ID NO: 7424 - protein, 185 aa, Zea mays subsp. mays
  peptide (1)..(185): Ceres Seq. ID no. 12340864
  misc_feature (61)..(138): Pfam Name: GRAM domain Pfam Description: GRAM domain
  misc_feature (1)..(185): Homolog of NCBI NO: 34902414 NR Description: Putative FH protein interacting protein FIP1
  misc_feature (2)..(178): Homolog of NCBI NO: 34906818 NR Description: contains EST C91668(E31216)~similar to FH protein
  misc_feature (1)..(185): Homolog of NCBI NO: 18399985 NR Description: Expressed protein; protein id: At2g22475.1, by cDNA: 32573. [Arabidopsis thaliana]
  misc_feature (1)..(178): Homolog of NCBI NO: 15217869 NR Description: FH protein interacting protein FIP1; protein id: supported by cDNA: 30245., supported by cDNA: gi_13877828, by cDNA: gi_15912222, supported by cDNA: gi_16323497, supported
  misc_feature (1)..(185): Homolog of NCBI NO: 21592789 NR Description: unknown [Arabidopsis thaliana]
  misc_feature (1)..(185): Homolog of NCBI NO: 26452129 NR Description: unknown protein [Arabidopsis thaliana]
  misc_feature (1)..(178): Homolog of NCBI NO: 29788871 NR Description: putative ABA-responsive protein [Oryza sativa
  misc_feature (1)..(96): Homolog of NCBI NO: 15236123 NR Description: putative protein; protein id: At4g40100.1
  misc_feature (124)..(178): Homolog of NCBI NO: 15236123 NR Description: putative protein; protein id: At4g40100.1
  misc_feature (44)..(178): Homolog of NCBI NO: 33146631 NR Description: putative FH protein interacting protein FIP1
MDSVKDVLGKMGKRFGEAARKTETITGNFWQHLKTGPSITDAAMSRISQVTKVIAEGGYDKIFHQTFEVAPGEKLKKPYACYLSTSAGPVMGVLYLSNVKLAFCSDNPLAYQVGDKTEWSYYKVVIPLAQLRSINSSTSRTNAAEKYIQVVSVDNHGFWFMGFVYYDSAVKNLQEALQEAQNLRA

SEQ ID NO: 7425 - protein, 175 aa, Zea mays subsp. mays
  peptide (1)..(175): Ceres Seq. ID no. 12340865
  misc_feature (51)..(128): Pfam Name: GRAM domain Pfam Description: GRAM domain
  misc_feature (1)..(175): Homolog of NCBI NO: 34902414 NR Description: Putative FH protein interacting protein FIP1
  misc_feature (1)..(168): Homolog of NCBI NO: 34906818 NR Description: contains EST C91668(E31216)~similar to FH protein
  misc_feature (1)..(175): Homolog of NCBI NO: 18399985 NR Description: Expressed protein; protein id: At2g22475.1, by cDNA: 32573. [Arabidopsis thaliana]
  misc_feature (1)..(168): Homolog of NCBI NO: 15217869 NR Description: FH protein interacting protein FIP1; protein id: supported by cDNA: 30245., supported by cDNA: gi_13877828, by cDNA: gi_15912222, supported by cDNA: gi_16323497, supported
  misc_feature (1)..(175): Homolog of NCBI NO: 21592789 NR Description: unknown [Arabidopsis thaliana]
  misc_feature (1)..(175): Homolog of NCBI NO: 26452129 NR Description: unknown protein [Arabidopsis thaliana]
  misc_feature (1)..(168): Homolog of NCBI NO: 29788871 NR Description: putative ABA-responsive protein [Oryza sativa
  misc_feature (1)..(86): Homolog of NCBI NO: 15236123 NR Description: putative protein; protein id: At4g40100.1
  misc_feature (114)..(168): Homolog of NCBI NO: 15236123 NR Description: putative protein; protein id: At4g40100.1
  misc_feature (34)..(168): Homolog of NCBI NO: 33146631 NR Description: putative FH protein interacting protein FIP1
MGKRFGEAARKTETITGNFWQHLKTGPSITDAAMSRISQVTKVIAEGGYDKIFHQTFEVAPGEKLKKPYACYLSTSAGPVMGVLYLSNVKLAFCSDNPLAYQVGDKTEWSYYKVVIPLAQLRSINSSTSRTNAAEKYIQVVSVDNHGFWFMGFVYYDSAVKNLQEALQEAQNLRA

SEQ ID NO: 7426 - DNA, 1352 bp, Zea mays subsp. mays
  misc_feature (1)..(1352): Ceres Seq. ID no. 12556765
  misc_feature: MA Experiment ID: 108530 Result: Down-regulated in Transcription
  misc_feature: MA Experiment 108530 PARAMETER Experiment Name: Zm_Imbibed_Seeds_P Parameter: Age (day) Value: 6 vs. 2
  misc_feature: MA Experiment 108530 PARAMETER Experiment Name: Zm_Imbibed_Seeds_P Parameter: Organism Value: Zea mays
  misc_feature: MA Experiment 108530 PARAMETER Experiment Name: Zm_Imbibed_Seeds_P Parameter: Plant Line Value: 35A19
  misc_feature: MA Experiment 108530 PARAMETER Experiment Name: Zm_Imbibed_Seeds_P Parameter: Tissue Value: Aerial vs. Embryo
  misc_feature: MA Experiment ID: 108543 Result: Up-regulated in Transcription
  misc_feature: MA Experiment ID: 108544 Result: Up-regulated in Transcription
  misc_feature: MA Experiment ID: 108556 Result: Up-regulated in Transcription
  misc_feature: MA Experiment 108556 PARAMETER Experiment Name: Zm_Drought_P Parameter: Age (day) Value: 9
  misc_feature: MA Experiment 108556 PARAMETER Experiment Name: Zm_Drought_P Parameter: Organism Value: Zea mays
  misc_feature: MA Experiment 108556 PARAMETER Experiment Name: Zm_Drought_P Parameter: Plant Line Value: 35A19
  misc_feature: MA Experiment 108556 PARAMETER Experiment Name: Zm_Drought_P Parameter: Timepoint (hr) Value: 24
  misc_feature: MA Experiment 108556 PARAMETER Experiment Name: Zm_Drought_P Parameter: Tissue Value: Aerial
  misc_feature: MA Experiment 108556 PARAMETER Experiment Name: Zm_Drought_P Parameter: Treatment Value: Drought vs. No Drought
  misc_feature: MA Experiment ID: 20000480 Result: Up-regulated in Transcription
  misc_feature: MA Experiment 20000480 PARAMETER Experiment Name: Zm_Drought_P Parameter: Age (day) Value: 11
  misc_feature: MA Experiment 20000480 PARAMETER Experiment Name: Zm_Drought_P Parameter: Organism Value: Zea mays
  misc_feature: MA Experiment 20000480 PARAMETER Experiment Name: Zm_Drought_P Parameter: Plant Line Value: 35A19
  misc_feature: MA Experiment 20000480 PARAMETER Experiment Name: Zm_Drought_P Parameter: Timepoint (hr) Value: 72
  misc_feature: MA Experiment 20000480 PARAMETER Experiment Name: Zm_Drought_P Parameter: Tissue Value: Aerial
  misc_feature: MA Experiment 20000480 PARAMETER Experiment Name: Zm_Drought_P Parameter: Treatment Value: Drought vs. No Drought
  misc_feature: MA Experiment ID: 20000534 Result: Down-regulated in Transcription
  misc_feature: MA Experiment 20000534 PARAMETER Experiment Name: Zm_Hybrid_Pollen_P Parameter: Age (day) Value: 8
  misc_feature: MA Experiment 20000534 PARAMETER Experiment Name: Zm_Hybrid_Pollen_P Parameter: Organism Value: Zea mays
  misc_feature: MA Experiment 20000534 PARAMETER Experiment Name: Zm_Hybrid_Pollen_P Parameter: Plant Line Value: 35A19
  misc_feature: MA Experiment 20000534 PARAMETER Experiment Name: Zm_Hybrid_Pollen_P Parameter: Tissue Value: Pollen vs. Aerial
  misc_feature: MA Experiment ID: 20000535 Result: Up-regulated in Transcription
  misc_feature: MA Experiment 20000535 PARAMETER Experiment Name: Zm_Hybrid_Seed_Dev_P Parameter: DAP Value: 30 vs. 12
  misc_feature: MA Experiment 20000535 PARAMETER Experiment Name: Zm_Hybrid_Seed_Dev_P Parameter: Organism Value: Zea mays
  misc_feature: MA Experiment 20000535 PARAMETER Experiment Name: Zm_Hybrid_Seed_Dev_P Parameter: Plant Line Value: 35A19
  misc_feature: MA Experiment 20000535 PARAMETER Experiment Name: Zm_Hybrid_Seed_Dev_P Parameter: Tissue Value: Embryo vs. Unfert Floret
gcacgagaccattacctagaacatcctaatcgaaaagagaaaataataattaaaaaaaagcagtgaaccttctcgcgctcggcagttggcagtcctgtcctgtggaccgtatgacgtgtttatttatgggcggcgccttcgtctccactccccaccggaggaaggaagcgagaagaccagaagggatggcaaccggtagtgaagcctcgaaggcagctgaggctgtggttgactggcataaacacgacagcaagaggatgctccatgcggtttaccgtgttggggatctggaccgcacaatcaagtactacacggaatgctttgggatgaaactgctgaggaaaagggatgttcctgatgagaagtacaccaatgccttccttggctttgggccagagaacaccaactttgcagttgaattgacatacaactatggcgttgacaagtatgacattggaacgggctttgggcatttcgcaattgctaatgatgatgtgtacaagttagctgagaatatcaaatccaagggtggtaagatcacccgcgaacctggtcctgtcaagggaggatccactgttattgccttcgcacaggatcctgatggctacatgtttgagcttatccagagggctgacacacctgagcctctttgccaggtcatgcttcgtgttggtgaccttgagcgttctatcaagttttatgagaaggccctagggatgaagctcctaaggaagaaggatgtacctgattacaagtataccattgccatgttgggctatgctgatgaggacaagacaactgttctggagctgacgtacaactatggagtcacagaatacagcaagggcaatgcatatgctcaggttgccattggcaccaatgatgtgtacaagagcgccgaggcggttgatctggcgaccaaagaactaggtggcaagattttgcggcagccagggcctctacctgggatcaacactaagatcgcctcttttgttgatccagatggctggaaagtggttctggttgacaacaccgacttcctcaaggaactccactgaaggctcgggatacccaggtgctgtgctaggatgtagtaatgcttgtctgtggtgtaataagatgtgggtggtttgtttctgccctgatgaacttataatactgaatgttgctacagaggttgtgcttctgccagtgaggtttgggatttgctatgtaactgtgcctgcgggctccgattctggcgctgttcgtacactgtagaagccagtgaatcccaataaacccagcttcacaggctcctcttatcccgtagaccctagttgtttttgggtggagctggagccactgacccc

SEQ ID NO: 7427 - protein, 315 aa, Zea mays subsp. mays
  peptide (1)..(315): Ceres Seq. ID no. 12556766
  misc_feature (10)..(314): Homolog of NCBI NO: 15220397 NR Description: glyoxalase I, putative (lactoylglutathione protein id: At1g67280.1, supported by cDNA: 13346., supported by gi_16930395, supported by cDNA: gi_19310504 [Arabidopsis
  misc_feature (36)..(314): Homolog of NCBI NO: 15221116 NR Description: glyoxalase I, putative (lactoylglutathione protein id: At1g11840.1, supported by cDNA: 39107., supported by gi_11094298, supported by cDNA: gi_15810218, supported by cDNA:
  misc_feature (10)..(314): Homolog of NCBI NO: 21537360 NR Description: glyoxalase I, putative [Arabidopsis thaliana]
  misc_feature (36)..(314): Homolog of NCBI NO: 15810219 NR Description: putative lactoylglutathione lyase [Arabidopsis
  misc_feature (10)..(314): Homolog of NCBI NO: 25350143 NR Description: protein F1N21.10 [imported] - Arabidopsis >gi|9828630|gb|AAG00253.1|AC002130_18 F1N21.10 [Arabidopsis
  misc_feature (42)..(314): Homolog of NCBI NO: 7619802 NR Description: putative glyoxalase I [Triticum aestivum]
  misc_feature (26)..(314): Homolog of NCBI NO: 4126809 NR Description: glyoxalase I [Oryza sativa (japonica
  misc_feature (26)..(314): Homolog of NCBI NO: 16580747 NR Description: glyoxalase I [Oryza sativa (japonica
  misc_feature (33)..(314): Homolog of NCBI NO: 1808684 NR Description: hypothetical protein [Sporobolus stapfianus]
  misc_feature (26)..(314): Homolog of NCBI NO: 2213425 NR Description: hypothetical protein [Citrus x paradisi]
MTCLFMGGAFVSTPHRRKEARRPEGMATGSEASKAAEAVVDWHKHDSKRMLHAVYRVGDLDRTIKYYTECFGMKLLRKRDVPDEKYTNAFLGFGPENTNFAVELTYNYGVDKYDIGTGFGHFAIANDDVYKLAENIKSKGGKITREPGPVKGGSTVIAFAQDPDGYMFELIQRADTPEPLCQVMLRVGDLERSIKFYEKALGMKLLRKKDVPDYKYTIAMLGYADEDKTTVLELTYNYGVTEYSKGNAYAQVAIGTNDVYKSAEAVDLATKELGGKILRQPGPLPGINTKIASFVDPDGWKVVLVDNTDFLKELH

SEQ ID NO: 7428 - protein, 310 aa, Zea mays subsp. mays
  peptide (1)..(310): Ceres Seq. ID no. 12556767
  misc_feature (21)..(309): Homolog of NCBI NO: 4126809 NR Description: glyoxalase I [Oryza sativa (japonica
  misc_feature (21)..(309): Homolog of NCBI NO: 16580747 NR Description: glyoxalase I [Oryza sativa (japonica
  misc_feature (28)..(309): Homolog of NCBI NO: 1808684 NR Description: hypothetical protein [Sporobolus stapfianus]
  misc_feature (21)..(309): Homolog of NCBI NO: 2213425 NR Description: hypothetical protein [Citrus x paradisi]
  misc_feature (5)..(309): Homolog of NCBI NO: 15220397 NR Description: glyoxalase I, putative (lactoylglutathione protein id: At1g67280.1, supported by cDNA: 13346., supported by gi_16930395, supported by cDNA: gi_19310504 [Arabidopsis
  misc_feature (31)..(309): Homolog of NCBI NO: 15221116 NR Description: glyoxalase I, putative (lactoylglutathione protein id: At1g11840.1, supported by cDNA: 39107., supported by gi_11094298, supported by cDNA: gi_15810218, supported by cDNA:
  misc_feature (5)..(309): Homolog of NCBI NO: 21537360 NR Description: glyoxalase I, putative [Arabidopsis thaliana]
  misc_feature (31)..(309): Homolog of NCBI NO: 15810219 NR Description: putative lactoylglutathione lyase [Arabidopsis
  misc_feature (5)..(309): Homolog of NCBI NO: 25350143 NR Description: protein F1N21.10 [imported] - Arabidopsis >gi|9828630|gb|AAG00253.1|AC002130_18 F1N21.10 [Arabidopsis
  misc_feature (37)..(309): Homolog of NCBI NO: 7619802 NR Description: putative glyoxalase I [Triticum aestivum]
MGGAFVSTPHRRKEARRPEGMATGSEASKAAEAVVDWHKHDSKRMLHAVYRVGDLDRTIKYYTECFGMKLLRKRDVPDEKYTNAFLGFGPENTNFAVELTYNYGVDKYDIGTGFGHFAIANDDVYKLAENIKSKGGKITREPGPVKGGSTVIAFAQDPDGYMFELIQRADTPEPLCQVMLRVGDLERSIKFYEKALGMKLLRKKDVPDYKYTIAMLGYADEDKTTVLELTYNYGVTEYSKGNAYAQVAIGTNDVYKSAEAVDLATKELGGKILRQPGPLPGINTKIASFVDPDGWKVVLVDNTDFLKELH

SEQ ID NO: 7429 - protein, 290 aa, Zea mays subsp. mays
  peptide (1)..(290): Ceres Seq. ID no. 12556768
  misc_feature (1)..(289): Homolog of NCBI NO: 4126809 NR Description: glyoxalase I [Oryza sativa (japonica
  misc_feature (1)..(289): Homolog of NCBI NO: 16580747 NR Description: glyoxalase I [Oryza sativa (japonica
  misc_feature (8)..(289): Homolog of NCBI NO: 1808684 NR Description: hypothetical protein [Sporobolus stapfianus]
  misc_feature (1)..(289): Homolog of NCBI NO: 2213425 NR Description: hypothetical protein [Citrus x paradisi]
  misc_feature (1)..(289): Homolog of NCBI NO: 15220397 NR Description: glyoxalase I, putative (lactoylglutathione protein id: At1g67280.1, supported by cDNA: 13346., supported by gi_16930395, supported by cDNA: gi_19310504 [Arabidopsis
  misc_feature (11)..(289): Homolog of NCBI NO: 15221116 NR Description: glyoxalase I, putative (lactoylglutathione protein id: At1g11840.1, supported by cDNA: 39107., supported by gi_11094298, supported by cDNA: gi_15810218, supported by cDNA:
  misc_feature (1)..(289): Homolog of NCBI NO: 21537360 NR Description: glyoxalase I, putative [Arabidopsis thaliana]
  misc_feature (11)..(289): Homolog of NCBI NO: 15810219 NR Description: putative lactoylglutathione lyase [Arabidopsis
  misc_feature (1)..(289): Homolog of NCBI NO: 25350143 NR Description: protein F1N21.10 [imported] - Arabidopsis >gi|9828630|gb|AAG00253.1|AC002130_18 F1N21.10 [Arabidopsis
  misc_feature (17)..(289): Homolog of NCBI NO: 7619802 NR Description: putative glyoxalase I [Triticum aestivum]
MATGSEASKAAEAVVDWHKHDSKRMLHAVYRVGDLDRTIKYYTECFGMKLLRKRDVPDEKYTNAFLGFGPENTNFAVELTYNYGVDKYDIGTGFGHFAIANDDVYKLAENIKSKGGKITREPGPVKGGSTVIAFAQDPDGYMFELIQRADTPEPLCQVMLRVGDLERSIKFYEKALGMKLLRKKDVPDYKYTIAMLGYADEDKTTVLELTYNYGVTEYSKGNAYAQVAIGTNDVYKSAEAVDLATKELGGKILRQPGPLPGINTKIASFVDPDGWKVVLVDNTDFLKELH

SEQ ID NO: 7430 - DNA, 1423 bp, Zea mays subsp. mays
  misc_feature (1)..(1423): Ceres Seq. ID no. 12408806
  misc_feature: MA Experiment ID: 108522 Result: Up-regulated in Transcription
  misc_feature: MA Experiment 108522 PARAMETER Experiment Name: Zm_42deg_Heat_P Parameter: Age (day) Value: 8
  misc_feature: MA Experiment 108522 PARAMETER Experiment Name: Zm_42deg_Heat_P Parameter: Organism Value: Zea mays
  misc_feature: MA Experiment 108522 PARAMETER Experiment Name: Zm_42deg_Heat_P Parameter: Plant Line Value: 35A19
  misc_feature: MA Experiment 108522 PARAMETER Experiment Name: Zm_42deg_Heat_P Parameter: Temperature (deg C) Value: 42 vs. 22
  misc_feature: MA Experiment 108522 PARAMETER Experiment Name: Zm_42deg_Heat_P Parameter: Timepoint (hr) Value: 1
  misc_feature: MA Experiment 108522 PARAMETER Experiment Name: Zm_42deg_Heat_P Parameter: Tissue Value: Aerial
  misc_feature: MA Experiment ID: 108523 Result: Up-regulated in Transcription
  misc_feature: MA Experiment 108523 PARAMETER Experiment Name: Zm_42deg_Heat_P Parameter: Age (day) Value: 8
  misc_feature: MA Experiment 108523 PARAMETER Experiment Name: Zm_42deg_Heat_P Parameter: Organism Value: Zea mays
  misc_feature: MA Experiment 108523 PARAMETER Experiment Name: Zm_42deg_Heat_P Parameter: Plant Line Value: 35A19
  misc_feature: MA Experiment 108523 PARAMETER Experiment Name: Zm_42deg_Heat_P Parameter: Temperature (deg C) Value: 42 vs. 22
  misc_feature: MA Experiment 108523 PARAMETER Experiment Name: Zm_42deg_Heat_P Parameter: Timepoint (hr) Value: 6
  misc_feature: MA Experiment 108523 PARAMETER Experiment Name: Zm_42deg_Heat_P Parameter: Tissue Value: Aerial
  misc_feature: MA Experiment ID: 108687 Result: Down-regulated in Transcription
  misc_feature: MA Experiment 108687 PARAMETER Experiment Name: Zm_Embryos-Flowers__P Parameter: Tissue Value: Embryo vs. Aerial+
  misc_feature: MA Experiment ID: 20000477 Result: Down-regulated in Transcription
  misc_feature: MA Experiment 20000477 PARAMETER Experiment Name: Zm_5mM_SA_P Parameter: Age (day) Value: 10
  misc_feature: MA Experiment 20000477 PARAMETER Experiment Name: Zm_5mM_SA_P Parameter: Organism Value: Zea mays
  misc_feature: MA Experiment 20000477 PARAMETER Experiment Name: Zm_5mM_SA_P Parameter: Plant Line Value: 35A19
  misc_feature: MA Experiment 20000477 PARAMETER Experiment Name: Zm_5mM_SA_P Parameter: Timepoint (hr) Value: 48
  misc_feature: MA Experiment 20000477 PARAMETER Experiment Name: Zm_5mM_SA_P Parameter: Tissue Value: Aerial
  misc_feature: MA Experiment 20000477 PARAMETER Experiment Name: Zm_5mM_SA_P Parameter: Treatment Value: 5mM SA vs. No Treatment
aaattctcgaagataacgaccaagagattaaaaaagtatcttcatgggttcgctctcacagcccacgcaggaggcaccgaacattctagccctctgtggtgtcaacggcaaggcaaagcgaacgcatcaagttcgccgtccaaaccagcagcagcctccatcggacggcagagagcagccgctcgccacttggattcaaacgccccgtcactctaatcgcgtagaaactaccaaattacccctagccccctccctcagtctccctgcagctgctccgtcggaacggacaaccgcggccatcccccagccccccctcttgctgcacactcgcactgctagggttcgctcgcaatccagcctctacgccatggcgaagacaaagcaagggaagcgggacgtcgacgcctacaccatcaagggcaccaacaaggtggtccgagtgggggactgcgtgctgatgcggccggcggacacggacaagccgccgtacgtggcgcgggtggagcggatggagtcggacgggcgcggcggcgtgcgggtgagggtgcgctggtactaccgcccggaggaggccaagggcggccgccgcccgttccacggctccaaggagctcttcctctccgaccacttggacacgcagagcgcgcacaccattgagggcaagtgcatcgttcactccttcaagagctacaccaagctcgacaacgtcggcccggaggacttctactgccgatttgactacaaggccgccaccggtgcattcacccccgaccgtgtcgccgtgtattgcaagtgtgagatgccgtacaacccagacgacctcatggtgcagtgtgaaggctgcaaggactggttccatccgtcttgtatgggaatgaccattgagcaagccaaaaagatagatcattacatgtgctcggattgtgctgaaaaaaatggtgcaaagagaccctcaaattcatacccagtttcaccaaactctgattctaagatcgaatcaaagaggcgcaagagataaattctggcaaaggagatcgatatggcgtctgctcctcattactgatgcatattgagatgtacactgcgagagaagagccaagccaattgtaggacaaaacttgcttaacttatcattcttctgtgtattctggggacgtttcctgcagcttagacatttagtgtgatgagtaggtcagtcagtccccccccccgctgcagcgcgcgcatgatcagctgctggtggcgggataagtcgggaaatgctagagcgctgatgattctgtcgatgtaactttatcgggttgtgtgtgtgtgttttaacatatgcactggctggaaacattcccatgtgtgaatgggcgatgctgatgatagcttgactgctgtttcataattcagttagatgttgccaagcaaagacttg

SEQ ID NO: 7431 - protein, 324 aa, Zea mays subsp. mays
  peptide (1)..(324): Ceres Seq. ID no. 12408807
  misc_feature (128)..(244): Pfam Name: BAH domain Pfam Description: BAH domain
  misc_feature (109)..(324): Homolog of NCBI NO: 37573088 NR Description: receptor like protein [Oryza sativa (japonica
  misc_feature (109)..(316): Homolog of NCBI NO: 34904940 NR Description: OSJNBa0077M12.13 [Oryza sativa (japonica
  misc_feature (109)..(324): Homolog of NCBI NO: 33146914 NR Description: putative ES43 protein [Oryza sativa (japonica
  misc_feature (134)..(317): Homolog of NCBI NO: 11292613 NR Description: receptor like protein - Arabidopsis thaliana
  misc_feature (139)..(317): Homolog of NCBI NO: 15234729 NR Description: receptor like protein (fragment); protein id: [Arabidopsis thaliana] >gi|23296390|gb|AAN13058.1| putative
  misc_feature (109)..(324): Homolog of NCBI NO: 34897170 NR Description: putative DNA-binding protein [Oryza sativa
  misc_feature (109)..(321): Homolog of NCBI NO: 18420377 NR Description: ES43 like protein; protein id: At4g39100.1, by cDNA: 8278., supported by cDNA: gi_10644644, supported by gi_15293000, supported by cDNA: gi_19310792 [Arabidopsis
  misc_feature (109)..(321): Homolog of NCBI NO: 21595796 NR Description: ES43 like protein [Arabidopsis thaliana]
  misc_feature (109)..(317): Homolog of NCBI NO: 7484948 NR Description: ES43 protein homolog F19H22.200 - Arabidopsis
  misc_feature (116)..(324): Homolog of NCBI NO: 629783 NR Description: ES43 protein - barley >gi|1345528|emb|CAA54682.1|
MGSLSQPTQEAPNILALCGVNGKAKRTHQVRRPNQQQPPSDGREQPLATWIQTPRHSNRVETTKLPLAPSLSLPAAAPSERTTAAIPQPPLLLHTRTARVRSQSSLYAMAKTKQGKRDVDAYTIKGTNKVVRVGDCVLMRPADTDKPPYVARVERMESDGRGGVRVRVRWYYRPEEAKGGRRPFHGSKELFLSDHLDTQSAHTIEGKCIVHSFKSYTKLDNVGPEDFYCRFDYKAATGAFTPDRVAVYCKCEMPYNPDDLMVQCEGCKDWFHPSCMGMTIEQAKKIDHYMCSDCAEKNGAKRPSNSYPVSPNSDSKIESKRRKR

SEQ ID NO: 7432 - protein, 216 aa, Zea mays subsp. mays
  peptide (1)..(216): Ceres Seq. ID no. 12408808
  misc_feature (20)..(136): Pfam Name: BAH domain Pfam Description: BAH domain
  misc_feature (1)..(216): Homolog of NCBI NO: 37573088 NR Description: receptor like protein [Oryza sativa (japonica
  misc_feature (1)..(208): Homolog of NCBI NO: 34904940 NR Description: OSJNBa0077M12.13 [Oryza sativa (japonica
  misc_feature (1)..(216): Homolog of NCBI NO: 33146914 NR Description: putative ES43 protein [Oryza sativa (japonica
  misc_feature (26)..(209): Homolog of NCBI NO: 11292613 NR Description: receptor like protein - Arabidopsis thaliana
  misc_feature (31)..(209): Homolog of NCBI NO: 15234729 NR Description: receptor like protein (fragment); protein id: [Arabidopsis thaliana] >gi|23296390|gb|AAN13058.1| putative
  misc_feature (1)..(216): Homolog of NCBI NO: 34897170 NR Description: putative DNA-binding protein [Oryza sativa
  misc_feature (1)..(213): Homolog of NCBI NO: 18420377 NR Description: ES43 like protein; protein id: At4g39100.1, by cDNA: 8278., supported by cDNA: gi_10644644, supported by gi_15293000, supported by cDNA: gi_19310792 [Arabidopsis
  misc_feature (1)..(213): Homolog of NCBI NO: 21595796 NR Description: ES43 like protein [Arabidopsis thaliana]
  misc_feature (1)..(209): Homolog of NCBI NO: 7484948 NR Description: ES43 protein homolog F19H22.200 - Arabidopsis
  misc_feature (8)..(216): Homolog of NCBI NO: 629783 NR Description: ES43 protein - barley >gi|1345528|emb|CAA54682.1|
MAKTKQGKRDVDAYTIKGTNKVVRVGDCVLMRPADTDKPPYVARVERMESDGRGGVRVRVRWYYRPEEAKGGRRPFHGSKELFLSDHLDTQSAHTIEGKCIVHSFKSYTKLDNVGPEDFYCRFDYKAATGAFTPDRVAVYCKCEMPYNPDDLMVQCEGCKDWFHPSCMGMTIEQAKKIDHYMCSDCAEKNGAKRPSNSYPVSPNSDSKIESKRRKR

SEQ ID NO: 7433 - protein, 186 aa, Zea mays subsp. mays
  peptide (1)..(186): Ceres Seq. ID no. 12408809
  misc_feature (1)..(106): Pfam Name: BAH domain Pfam Description: BAH domain
  misc_feature (1)..(186): Homolog of NCBI NO: 37573088 NR Description: receptor like protein [Oryza sativa (japonica
  misc_feature (1)..(178): Homolog of NCBI NO: 34904940 NR Description: OSJNBa0077M12.13 [Oryza sativa (japonica
  misc_feature (1)..(186): Homolog of NCBI NO: 33146914 NR Description: putative ES43 protein [Oryza sativa (japonica
  misc_feature (1)..(179): Homolog of NCBI NO: 11292613 NR Description: receptor like protein - Arabidopsis thaliana
  misc_feature (1)..(179): Homolog of NCBI NO: 15234729 NR Description: receptor like protein (fragment); protein id: [Arabidopsis thaliana] >gi|23296390|gb|AAN13058.1| putative
  misc_feature (1)..(186): Homolog of NCBI NO: 34897170 NR Description: putative DNA-binding protein [Oryza sativa
  misc_feature (1)..(183): Homolog of NCBI NO: 18420377 NR Description: ES43 like protein; protein id: At4g39100.1, by cDNA: 8278., supported by cDNA: gi_10644644, supported by gi_15293000, supported by cDNA: gi_19310792 [Arabidopsis
  misc_feature (1)..(183): Homolog of NCBI NO: 21595796 NR Description: ES43 like protein [Arabidopsis thaliana]
  misc_feature (1)..(179): Homolog of NCBI NO: 7484948 NR Description: ES43 protein homolog F19H22.200 - Arabidopsis
  misc_feature (1)..(186): Homolog of NCBI NO: 629783 NR Description: ES43 protein - barley >gi|1345528|emb|CAA54682.1|
MRPADTDKPPYVARVERMESDGRGGVRVRVRWYYRPEEAKGGRRPFHGSKELFLSDHLDTQSAHTIEGKCIVHSFKSYTKLDNVGPEDFYCRFDYKAATGAFTPDRVAVYCKCEMPYNPDDLMVQCEGCKDWFHPSCMGMTIEQAKKIDHYMCSDCAEKNGAKRPSNSYPVSPNSDSKIESKRRKR

SEQ ID NO: 7434 - DNA, 1648 bp, Zea mays subsp. mays
  misc_feature (1)..(1648): Ceres Seq. ID no. 12567042
  misc_feature: MA Experiment ID: 108543 Result: Up-regulated in Transcription
  misc_feature: MA Experiment ID: 108546 Result: Down-regulated in Transcription
  misc_feature: MA Experiment 108546 PARAMETER Experiment Name: Zm_Imbibed_Seeds_P Parameter: Age (day) Value: 3 vs. 2
  misc_feature: MA Experiment 108546 PARAMETER Experiment Name: Zm_Imbibed_Seeds_P Parameter: Organism Value: Zea mays
  misc_feature: MA Experiment 108546 PARAMETER Experiment Name: Zm_Imbibed_Seeds_P Parameter: Plant Line Value: 35A19
  misc_feature: MA Experiment 108546 PARAMETER Experiment Name: Zm_Imbibed_Seeds_P Parameter: Tissue Value: Roots vs. Embryo
  misc_feature: MA Experiment ID: 20000479 Result: Down-regulated in Transcription
  misc_feature: MA Experiment 20000479 PARAMETER Experiment Name: Zm_Drought_P Parameter: Age (day) Value: 10
  misc_feature: MA Experiment 20000479 PARAMETER Experiment Name: Zm_Drought_P Parameter: Organism Value: Zea mays
  misc_feature: MA Experiment 20000479 PARAMETER Experiment Name: Zm_Drought_P Parameter: Plant Line Value: 35A19
  misc_feature: MA Experiment 20000479 PARAMETER Experiment Name: Zm_Drought_P Parameter: Timepoint (hr) Value: 48
  misc_feature: MA Experiment 20000479 PARAMETER Experiment Name: Zm_Drought_P Parameter: Tissue Value: Aerial
  misc_feature: MA Experiment 20000479 PARAMETER Experiment Name: Zm_Drought_P Parameter: Treatment Value: Drought vs. No Drought
  misc_feature: MA Experiment ID: 20000488 Result: Down-regulated in Transcription
  misc_feature: MA Experiment 20000488 PARAMETER Experiment Name: Zm_50mM_NH4NO3_L_to_H_P Parameter: Organism Value: Zea mays
  misc_feature: MA Experiment 20000488 PARAMETER Experiment Name: Zm_50mM_NH4NO3_L_to_H_P Parameter: Timepoint (hr) Value: 8
  misc_feature: MA Experiment 20000488 PARAMETER Experiment Name: Zm_50mM_NH4NO3_L_to_H_P Parameter: Tissue Value: Leaves
  misc_feature: MA Experiment 20000488 PARAMETER Experiment Name: Zm_50mM_NH4NO3_L_to_H_P Parameter: Treatment Value: 50mM NH4NO3 vs. 100mM Mannitol
  misc_feature: MA Experiment ID: 20000533 Result: Down-regulated in Transcription
  misc_feature: MA Experiment 20000533 PARAMETER Experiment Name: Zm_0.001percent_MeJA_P Parameter: Age (day) Value: 11
  misc_feature: MA Experiment 20000533 PARAMETER Experiment Name: Zm_0.001percent_MeJA_P Parameter: Organism Value: Zea mays
  misc_feature: MA Experiment 20000533 PARAMETER Experiment Name: Zm_0.001percent_MeJA_P Parameter: Plant Line Value: 35A19
  misc_feature: MA Experiment 20000533 PARAMETER Experiment Name: Zm_0.001percent_MeJA_P Parameter: Timepoint (hr) Value: 72
  misc_feature: MA Experiment 20000533 PARAMETER Experiment Name: Zm_0.001percent_MeJA_P Parameter: Tissue Value: Aerial
  misc_feature: MA Experiment 20000533 PARAMETER Experiment Name: Zm_0.001percent_MeJA_P Parameter: Treatment Value: 0.001percent MeJA vs. No Treatment
  misc_feature: MA Experiment ID: 20000535 Result: Up-regulated in Transcription
  misc_feature: MA Experiment 20000535 PARAMETER Experiment Name: Zm_Hybrid_Seed_Dev_P Parameter: DAP Value: 30 vs. 12
  misc_feature: MA Experiment 20000535 PARAMETER Experiment Name: Zm_Hybrid_Seed_Dev_P Parameter: Organism Value: Zea mays
  misc_feature: MA Experiment 20000535 PARAMETER Experiment Name: Zm_Hybrid_Seed_Dev_P Parameter: Plant Line Value: 35A19
  misc_feature: MA Experiment 20000535 PARAMETER Experiment Name: Zm_Hybrid_Seed_Dev_P Parameter: Tissue Value: Embryo vs. Unfert Floret
  misc_feature: MA Experiment ID: 20000626 Result: Down-regulated in Transcription
  misc_feature: MA Experiment 20000626 PARAMETER Experiment Name: Zm_Herbicide-Treatments_P Parameter: Timepoint (hr) Value: 12
  misc_feature: MA Experiment 20000626 PARAMETER Experiment Name: Zm_Herbicide-Treatments_P Parameter: Tissue Value: Aerial
  misc_feature: MA Experiment 20000626 PARAMETER Experiment Name: Zm_Herbicide-Treatments_P Parameter: Treatment Value: Roundup vs. No Treatment
  misc_feature: MA Experiment ID: 20000630 Result: Down-regulated in Transcription
  misc_feature: MA Experiment 20000630 PARAMETER Experiment Name: Zm_Herbicide-Treatments_P Parameter: Timepoint (hr) Value: 4
  misc_feature: MA Experiment 20000630 PARAMETER Experiment Name: Zm_Herbicide-Treatments_P Parameter: Tissue Value: Aerial
  misc_feature: MA Experiment 20000630 PARAMETER Experiment Name: Zm_Herbicide-Treatments_P Parameter: Treatment Value: Roundup vs. No Treatment
aaaacggtcacccgttctacgcttggcttggctgcgctgcgcacaccgaacccctcgccgtcgcggctcgcctcggctccgccccgaccgaccgatcgatccggccggcggtgggcgccatggcctcccccaaccccgaggccgcggggctgcaggccgtggctgtggcgggggcaggggagggcggctcgtcctcgtcgctcagcgccgttgcgggagcggctgcgttgtccggggagctggtgcccaggagggcgttggcgctgcgcaaggagcgcgtgtgcacggccaaggagcgcatcagccgcatgcctccctgtgcggcggggaagcggagctccatctaccgcggggtcacccggcataggtggacaggtcgatatgaggctcacctttgggacaaaagcacgtggaatcagaatcagaacaaaaagggcaaacaggtatatctaggtgcatatgatgatgaagaggctgcagcaagggccctatgaccttgctgcattaaaatactggggagctggaacacaaataaatttcccagtatctgactatgcaagagaccttgaagagatgcagatgatatccaaggaggattatctcgtgtctcttaggagaaagagcagtgccttctacagggggttaccaaaatatcgtgggcttcttaggcaacttcataattccagatgggatacatctttgggactcggcaatgactacatgagccttagttgtggcaaggatatcatgttggatgggaaatttgcaggaagctttggtctagagaggaaaattgatcttacaaattacatccggtggtggctaccaaagaagacaaggcagtcagatacatctaaaacagaagaaattgctgatgaaattcgagctattgaaagttcaatgcaacagactgaaccctataagttgccttctcttggcttcagttctccatcaaagccctcttcaatgggcttatcagcatgcagcatattatctcagtctgatgcctttaaaagcttcttggagaagtctacaaaattatctgaagaatgtagtcttagcaaagaaattgttgaaggaaagactgttgcctcggtacctgctactggatatgatacaggggcaattaatattaacatgaatgagttgctagtacaaagatctacttactcaatggcccctgttatgcctacaccaatgaagagtacctggagccctgctgatccttccgtggatccacttttttggagcaactttgttttgccatcgagtcaacctgttacaatggcgacaataacaacaacaacgtttgcaaagaatgaggtaagttcaagtgatccattccagagccaagagtgactgcacgagcttactgaagcaggatattttagattggtcaaagacagcatcccgtgcgtcaactagattctttttgtcaagcttttgatgtcgcaacttgtgagcaatactccttgtttatccatacttcataggacatgaatagaaggtatgacaagtgcaagcatagttatgtaatatacagtggctagttgccagaaaatgagatttagttgtgtagagctgtttgtacatattgagatggttgtttcagttcaatctcaacaggtttgaggaaaatatccaacgg

SEQ ID NO: 7435 - protein, 299 aa, Zea mays subsp. mays
  peptide (1)..(299): Ceres Seq. ID no. 12567043
  misc_feature (11)..(199): Homolog of NCBI NO: 18405784 NR Description: putative AP2 domain transcription factor; protein At2g41710.1, supported by cDNA: 41462. [Arabidopsis thaliana]
  misc_feature (11)..(199): Homolog of NCBI NO: 21593696 NR Description: putative AP2 domain transcription factor
  misc_feature (11)..(199): Homolog of NCBI NO: 25408750 NR Description: probable AP2 domain transcription factor
  misc_feature (11)..(160): Homolog of NCBI NO: 26452593 NR Description: putative AP2 domain transcription factor
  misc_feature (11)..(160): Homolog of NCBI NO: 30688760 NR Description: ovule development protein, putative [Arabidopsis
  misc_feature (126)..(283): Homolog of NCBI NO: 21593696 NR Description: putative AP2 domain transcription factor
  misc_feature (126)..(283): Homolog of NCBI NO: 18405784 NR Description: putative AP2 domain transcription factor; protein At2g41710.1, supported by cDNA: 41462. [Arabidopsis thaliana]
  misc_feature (126)..(283): Homolog of NCBI NO: 30688760 NR Description: ovule development protein, putative [Arabidopsis
  misc_feature (126)..(283): Homolog of NCBI NO: 26452593 NR Description: putative AP2 domain transcription factor
  misc_feature (126)..(275): Homolog of NCBI NO: 25408750 NR Description: probable AP2 domain transcription factor
MMMKRLQQGPYDLAALKYWGAGTQINFPVSDYARDLEEMQMISKEDYLVSLRRKSSAFYRGLPKYRGLLRQLHNSRWDTSLGLGNDYMSLSCGKDIMLDGKFAGSFGLERKIDLTNYIRWWLPKKTRQSDTSKTEEIADEIRAIESSMQQTEPYKLPSLGFSSPSKPSSMGLSACSILSQSDAFKSFLEKSTKLSEECSLSKEIVEGKTVASVPATGYDTGAININMNELLVQRSTYSMAPVMPTPMKSTWSPADPSVDPLFWSNFVLPSSQPVTMATITTTTFAKNEVSSSDPFQSQE

SEQ ID NO: 7436 - protein, 298 aa, Zea mays subsp. mays
  peptide (1)..(298): Ceres Seq. ID no. 12567044
  misc_feature (10)..(198): Homolog of NCBI NO: 18405784 NR Description: putative AP2 domain transcription factor; protein At2g41710.1, supported by cDNA: 41462. [Arabidopsis thaliana]
  misc_feature (10)..(198): Homolog of NCBI NO: 25408750 NR Description: probable AP2 domain transcription factor
  misc_feature (10)..(198): Homolog of NCBI NO: 21593696 NR Description: putative AP2 domain transcription factor
  misc_feature (10)..(159): Homolog of NCBI NO: 26452593 NR Description: putative AP2 domain transcription factor
  misc_feature (10)..(159): Homolog of NCBI NO: 30688760 NR Description: ovule development protein, putative [Arabidopsis
  misc_feature (125)..(282): Homolog of NCBI NO: 21593696 NR Description: putative AP2 domain transcription factor
  misc_feature (125)..(282): Homolog of NCBI NO: 18405784 NR Description: putative AP2 domain transcription factor; protein At2g41710.1, supported by cDNA: 41462. [Arabidopsis thaliana]
  misc_feature (125)..(282): Homolog of NCBI NO: 26452593 NR Description: putative AP2 domain transcription factor
  misc_feature (125)..(282): Homolog of NCBI NO: 30688760 NR Description: ovule development protein, putative [Arabidopsis
  misc_feature (125)..(274): Homolog of NCBI NO: 25408750 NR Description: probable AP2 domain transcription factor
MMKRLQQGPYDLAALKYWGAGTQINFPVSDYARDLEEMQMISKEDYLVSLRRKSSAFYRGLPKYRGLLRQLHNSRWDTSLGLGNDYMSLSCGKDIMLDGKFAGSFGLERKIDLTNYIRWWLPKKTRQSDTSKTEEIADEIRAIESSMQQTEPYKLPSLGFSSPSKPSSMGLSACSILSQSDAFKSFLEKSTKLSEECSLSKEIVEGKTVASVPATGYDTGAININMNELLVQRSTYSMAPVMPTPMKSTWSPADPSVDPLFWSNFVLPSSQPVTMATITTTTFAKNEVSSSDPFQSQE

SEQ ID NO: 7437 - protein, 297 aa, Zea mays subsp. mays
  peptide (1)..(297): Ceres Seq. ID no. 12567045
  misc_feature (9)..(197): Homolog of NCBI NO: 18405784 NR Description: putative AP2 domain transcription factor; protein At2g41710.1, supported by cDNA: 41462. [Arabidopsis thaliana]
  misc_feature (9)..(197): Homolog of NCBI NO: 25408750 NR Description: probable AP2 domain transcription factor
  misc_feature (9)..(197): Homolog of NCBI NO: 21593696 NR Description: putative AP2 domain transcription factor
  misc_feature (9)..(158): Homolog of NCBI NO: 26452593 NR Description: putative AP2 domain transcription factor
  misc_feature (9)..(158): Homolog of NCBI NO: 30688760 NR Description: ovule development protein, putative [Arabidopsis
  misc_feature (124)..(281): Homolog of NCBI NO: 21593696 NR Description: putative AP2 domain transcription factor
  misc_feature (124)..(281): Homolog of NCBI NO: 18405784 NR Description: putative AP2 domain transcription factor; protein At2g41710.1, supported by cDNA: 41462. [Arabidopsis thaliana]
  misc_feature (124)..(281): Homolog of NCBI NO: 30688760 NR Description: ovule development protein, putative [Arabidopsis
  misc_feature (124)..(281): Homolog of NCBI NO: 26452593 NR Description: putative AP2 domain transcription factor
  misc_feature (124)..(273): Homolog of NCBI NO: 25408750 NR Description: probable AP2 domain transcription factor
MKRLQQGPYDLAALKYWGAGTQINFPVSDYARDLEEMQMISKEDYLVSLRRKSSAFYRGLPKYRGLLRQLHNSRWDTSLGLGNDYMSLSCGKDIMLDGKFAGSFGLERKIDLTNYIRWWLPKKTRQSDTSKTEEIADEIRAIESSMQQTEPYKLPSLGFSSPSKPSSMGLSACSILSQSDAFKSFLEKSTKLSEECSLSKEIVEGKTVASVPATGYDTGAININMNELLVQRSTYSMAPVMPTPMKSTWSPADPSVDPLFWSNFVLPSSQPVTMATITTTTFAKNEVSSSDPFQSQE

SEQ ID NO: 7438 - DNA, 1442 bp, Zea mays subsp. mays
  misc_feature (1)..(1442): Ceres Seq. ID no. 12408799
  misc_feature: MA Experiment ID: 108534 Result: Up-regulated in Transcription
  misc_feature: MA Experiment 108534 PARAMETER Experiment Name: Zm_4deg_Cold_P Parameter: Age (hr) Value: 8
  misc_feature: MA Experiment 108534 PARAMETER Experiment Name: Zm_4deg_Cold_P Parameter: Organism Value: Zea mays
  misc_feature: MA Experiment 108534 PARAMETER Experiment Name: Zm_4deg_Cold_P Parameter: Plant Line Value: 35A19
  misc_feature: MA Experiment 108534 PARAMETER Experiment Name: Zm_4deg_Cold_P Parameter: Temperature (deg C) Value: 4 vs. 22
  misc_feature: MA Experiment 108534 PARAMETER Experiment Name: Zm_4deg_Cold_P Parameter: Timepoint (hr) Value: 6
  misc_feature: MA Experiment 108534 PARAMETER Experiment Name: Zm_4deg_Cold_P Parameter: Tissue Value: Aerial
gatccctagctctgcccctctcctccagcgccgctcgccagctctctgcccccgccgcgcccagagatgcagatcccccaccgccgttaccgctgggtgaaggagtgggtctcgcaagaactggtcgtcgccggaggcccctgcgtgctgtacaagtgggtgcgagaggacagactagcagctttgaaggctaaggacaagaagcatggggcagaatctgcaactcctgaacccaactctgaggttctcttcctgtgcagctacgaaggatgtgggaagacattttttgatgcaggggctcttaggaagcatgctcacgtccatggggagaggcaatatatctgtcactatgagaactgtggcaagaaattcttagatagttctaagttgaagagacattttcttattcatacaggagaaaagaattttgtgtgcccacatgaaggttgtgggaaggctttttcgttggattttaatttaaaggcacacatgaaaacacattctgcagataactatcatgtgtgccagtacccagaatgtggccgaagatttacacaagaatcaaaactaagagctcatatcagggcacaacatgagaaagctgtttgcctgcagaatccaggtgcttcggctatgaaccatagtgcaattggagaacagcatcagccccctaagccagcaaaggtctcagcaacgcctccagctccctcagctgagcgcccttacgtctgcccctacgatggttgcgacaaggcatacatccacgagtacaagctgaacctccatttgaaaaaggagcatcccaaccactaccaggatggtggtccacaaggcgctgccccttcaaagcgcagcatctcgaagagttcccataggagcagaccggacatcactgctagaatgccaccagccaaggtctccaagcgcaaaggagggtacgcagcgccatcgccagctgtgaacctccctgaggagcaccttcccgaggagcagcagtggccaaggaaagtgatgtacgaggatgacagcgaggagaccgaggaagaagaggggggcaacaatgtcgaggatagatggaactacaacagagctgctagtagcgatgatgaggaaaccgaagacgaacaatgagcttctagcaggcgtccatctgttctgtagttgtgcatataccataaattttaaactttgagggttatagtttttgcatacatgtaaaattttaaaataaggcggacttgttgtagacagcataggttgtaggtggtctgccccttctcaatcagacatgccatgagttcagaaaggataatggatcattgttctcgtttcgcttgtttttgtgtttgtgtttgtgccttttggttcgttatcacagatgagttattactgtaaccctgatttcagtgtttggcaatcaatctcgtcagccttacatttgt

SEQ ID NO: 7439 - protein, 354 aa, Zea mays subsp. mays
  peptide (1)..(354): Ceres Seq. ID no. 12408800
  misc_feature (220)..(245): Pfam Name: Zinc finger, C2H2 type Pfam Description: Zinc finger, C2H2 type
  misc_feature (48)..(303): Homolog of NCBI NO: 4927259 NR Description: putative transcription repressor maize TRM
  misc_feature (9)..(354): Homolog of NCBI NO: 4519673 NR Description: WREBP-2 [Nicotiana tabacum]
  misc_feature (1)..(353): Homolog of NCBI NO: 30680251 NR Description: expressed protein [Arabidopsis thaliana]
  misc_feature (1)..(191): Homolog of NCBI NO: 18149203 NR Description: unknown protein [Arabidopsis thaliana]
  misc_feature (237)..(353): Homolog of NCBI NO: 18149203 NR Description: unknown protein [Arabidopsis thaliana]
  misc_feature (64)..(172): Homolog of NCBI NO: 2565032 NR Description: transcription activator/repressor protein
  misc_feature (64)..(179): Homolog of NCBI NO: 88893 NR Description: transcription repressor protein YY1 - human
  misc_feature (64)..(179): Homolog of NCBI NO: 27545350 NR Description: YY1 transcription factor [Rattus norvegicus]
  misc_feature (64)..(179): Homolog of NCBI NO: 189174 NR Description: DNA-binding protein
  misc_feature (64)..(179): Homolog of NCBI NO: 1079317 NR Description: transcription activator/repressor protein - African clawed frog >gi|455608|emb|CAA54777.1| FIII [Xenopus
MQIPHRRYRWVKEWVSQELVVAGGPCVLYKWVREDRLAALKAKDKKHGAESATPEPNSEVLFLCSYEGCGKTFFDAGALRKHAHVHGERQYICHYENCGKKFLDSSKLKRHFLIHTGEKNFVCPHEGCGKAFSLDFNLKAHMKTHSADNYHVCQYPECGRRFTQESKLRAHIRAQHEKAVCLQNPGASAMNHSAIGEQHQPPKPAKVSATPPAPSAERPYVCPYDGCDKAYIHEYKLNLHLKKEHPNHYQDGGPQGAAPSKRSISKSSHRSRPDITARMPPAKVSKRKGGYAAPSPAVNLPEEHLPEEQQWPRKVMYEDDSEETEEEEGGNNVEDRWNYNRAASSDDEETEDEQ

SEQ ID NO: 7440 - protein, 213 aa, Zea mays subsp. mays
  peptide (1)..(213): Ceres Seq. ID no. 12408801
  misc_feature (79)..(104): Pfam Name: Zinc finger, C2H2 type Pfam Description: Zinc finger, C2H2 type
  misc_feature (1)..(162): Homolog of NCBI NO: 4927259 NR Description: putative transcription repressor maize TRM
  misc_feature (1)..(213): Homolog of NCBI NO: 4519673 NR Description: WREBP-2 [Nicotiana tabacum]
  misc_feature (1)..(212): Homolog of NCBI NO: 30680251 NR Description: expressed protein [Arabidopsis thaliana]
  misc_feature (1)..(50): Homolog of NCBI NO: 18149203 NR Description: unknown protein [Arabidopsis thaliana]
  misc_feature (96)..(212): Homolog of NCBI NO: 18149203 NR Description: unknown protein [Arabidopsis thaliana]
  misc_feature (1)..(31): Homolog of NCBI NO: 2565032 NR Description: transcription activator/repressor protein
  misc_feature (1)..(38): Homolog of NCBI NO: 88893 NR Description: transcription repressor protein YY1 - human
  misc_feature (1)..(38): Homolog of NCBI NO: 189174 NR Description: DNA-binding protein
  misc_feature (1)..(38): Homolog of NCBI NO: 4507955 NR Description: YY1 transcription factor [Homo sapiens]
  misc_feature (1)..(38): Homolog of NCBI NO: 1079317 NR Description: transcription activator/repressor protein - African clawed frog >gi|455608|emb|CAA54777.1| FIII [Xenopus
MKTHSADNYHVCQYPECGRRFTQESKLRAHIRAQHEKAVCLQNPGASAMNHSAIGEQHQPPKPAKVSATPPAPSAERPYVCPYDGCDKAYIHEYKLNLHLKKEHPNHYQDGGPQGAAPSKRSISKSSHRSRPDITARMPPAKVSKRKGGYAAPSPAVNLPEEHLPEEQQWPRKVMYEDDSEETEEEEGGNNVEDRWNYNRAASSDDEETEDEQ

SEQ ID NO: 7441 - DNA, 1833 bp, Zea mays subsp. mays
  misc_feature (1)..(1833): Ceres Seq. ID no. 12405464
  misc_feature: MA Experiment ID: 108543 Result: Down-regulated in Transcription
atctcccatcccatccagccatcctccgctttcccttcccctcgccgccccccaccccccagatcggcaaatccgcccgcacctaccccgcgcgcgtcgcgcgtcccggatggccatcgtctcctccgcccgactcgtggttccgtagcatgggccactccccctcttccctttccaaatccggcccctcctctccaccgcgccgcagcaggtcgttctcccccatggcgccgccgcagcagctgcggctgaccgcgccgttgcaggtcgctgcggggggcagcggcagcgactcgtcctcctcgttcgtgccccccgctcgggactacacccaagacctgcccgacgagatcctcgcgctggtattcgcgtcgctctcgcccaccgaccgcaacgcctgctccctcacctgctcccgatggatggaggtcgacgccaccacgcgccaccggctctccctcgacgcccgcgccgcgctgggcaacgcggccaccgcgctgttctcgcggttcacggctgtcacgaagctcgcgctccgctgcgcgcgcgactcaggattggacagcctctccgaccacggcgctgcggcgctggccgccgcgcttccctcggagcgcctcgccaggctcaagctccgcggtctaaggaagctctccgacgccgggctagcctccctcgctgccggcgcgccagcgatccgcaagctctctattgcgtcctgcaccttcggacccagggcattcgtcgccgtgctccagtcgtgccccctcctcgaggacctctccgtcaagcgcctccgcagcgtagcagacacgtccggtgccgccagttccattgctgaggagatcaagtttccaccggctttgtccctgcgttcggtttgcgtcaaggatctatataacgctctgtgctttgtgccgcttgtggcgtcctcaccgaacctccgctccctcaagatactgcggtgctccggcgcctgggacctgccattggaggtcatcgctgcacgtgctcctggccttgttgagcttcaccttgagaagctacaggttggcgaccgtgggcttgcggcgctttccgcctgtgccaatctggaagttctgttccttgtcaagacccctgagtgcactgattcaggcatcatcagtgttgccgagaagtgccacaaactccgcaaactgcatgtggatgggtggcgcacaaacaggattggagatttcggactcatggctgtggcacgaggatgtccagatctgcaggagctcgttttgataggggtcaaccccaccgtgctgagccttcggatgcttggtgagcactgccggttgctggaacggctggcactttgtgggtgtgaaactgtgggggatgctgagatcatttgcttggctgagcgatgggctgcgctcaagaagctctgcatcaagggttgccccgtgtcagatcgtgggatggaagcactaaatggggggtgccccggtttagtcaaggtgaagctgaagagatgtcgtggagtgtcatacgagtgcattgagaacctgaaggttactaggggggagtcattttccatcagcttggatgttgtattggagcatgatgccgggagcactagtgaaaatggtgcacaagagaatggacaggcacaaattacagagctggccggtcaaatgacaggcatggacctcctgaccaatgccgctggcacacaatcatcgattcataccattaacaggatgaggagtgtcatgtcagcgatccggcgtaggtttggcaatcctctgccaccatgatgtgagatggaaactaatgaactgttatttacatcctttatct

SEQ ID NO: 7442 - protein, 595 aa, Zea mays subsp. mays
  peptide (1)..(595): Ceres Seq. ID no. 12405465
  misc_feature (113)..(505): Homolog of NCBI NO: 21536497 NR Description: F-box protein family, AtFBL4 [Arabidopsis
  misc_feature (188)..(502): Homolog of NCBI NO: 18414458 NR Description: F-box protein family, AtFBL4; protein id: supported by cDNA: 100411., supported by cDNA: gi_13430831, by cDNA: gi_13605654, supported by cDNA: gi_15810598 [Arabidopsis
  misc_feature (75)..(592): Homolog of NCBI NO: 21743072 NR Description: OSJNBb0002J11.1 [Oryza sativa (japonica
  misc_feature (108)..(588): Homolog of NCBI NO: 15220130 NR Description: F-box protein family; protein id: At1g47056.1
  misc_feature (50)..(544): Homolog of NCBI NO: 30013671 NR Description: Avr9/Cf-9 rapidly elicited protein 189 [Nicotiana
  misc_feature (81)..(526): Homolog of NCBI NO: 18425169 NR Description: SKP1 interacting partner 2 (SKIP2); protein id: supported by cDNA: gi_10716948, supported by cDNA: gi_15810226
  misc_feature (108)..(591): Homolog of NCBI NO: 18412996 NR Description: F-box protein family, AtFBL8/AtFBL24; protein id: [Arabidopsis thaliana] >gi|25407371|pir||B85072 hypothetical
  misc_feature (108)..(551): Homolog of NCBI NO: 18409012 NR Description: F-box protein family, AtFBL16; protein id:
  misc_feature (81)..(377): Homolog of NCBI NO: 15810227 NR Description: putative SKP1 interacting partner SKIP2
  misc_feature (113)..(505): Homolog of NCBI NO: 18414458 NR Description: F-box protein family, AtFBL4; protein id: supported by cDNA: 100411., supported by cDNA: gi_13430831, by cDNA: gi_13605654, supported by cDNA: gi_15810598 [Arabidopsis
LPSHPAILRFPFPSPPPTPQIGKSARTYPARVARPGWPSSPPPDSWFRSMGHSPSSLSKSGPSSPPRRSRSFSPMAPPQQLRLTAPLQVAAGGSGSDSSSSFVPPARDYTQDLPDEILALVFASLSPTDRNACSLTCSRWMEVDATTRHRLSLDARAALGNAATALFSRFTAVTKLALRCARDSGLDSLSDHGAAALAAALPSERLARLKLRGLRKLSDAGLASLAAGAPAIRKLSIASCTFGPRAFVAVLQSCPLLEDLSVKRLRSVADTSGAASSIAEEIKFPPALSLRSVCVKDLYNALCFVPLVASSPNLRSLKILRCSGAWDLPLEVIAARAPGLVELHLEKLQVGDRGLAALSACANLEVLFLVKTPECTDSGIISVAEKCHKLRKLHVDGWRTNRIGDFGLMAVARGCPDLQELVLIGVNPTVLSLRMLGEHCRLLERLALCGCETVGDAEIICLAERWAALKKLCIKGCPVSDRGMEALNGGCPGLVKVKLKRCRGVSYECIENLKVTRGESFSISLDVVLEHDAGSTSENGAQENGQAQITELAGQMTGMDLLTNAAGTQSSIHTINRMRSVMSAIRRRFGNPLPP

SEQ ID NO: 7443 - protein, 546 aa, Zea mays subsp. mays
  peptide (1)..(546): Ceres Seq. ID no. 12405466
  misc_feature (26)..(543): Homolog of NCBI NO: 21743072 NR Description: OSJNBb0002J11.1 [Oryza sativa (japonica
  misc_feature (59)..(539): Homolog of NCBI NO: 15220130 NR Description: F-box protein family; protein id: At1g47056.1
  misc_feature (1)..(495): Homolog of NCBI NO: 30013671 NR Description: Avr9/Cf-9 rapidly elicited protein 189 [Nicotiana
  misc_feature (32)..(477): Homolog of NCBI NO: 18425169 NR Description: SKP1 interacting partner 2 (SKIP2); protein id: supported by cDNA: gi_10716948, supported by cDNA: gi_15810226
  misc_feature (59)..(542): Homolog of NCBI NO: 18412996 NR Description: F-box protein family, AtFBL8/AtFBL24; protein id: [Arabidopsis thaliana] >gi|25407371|pir||B85072 hypothetical
  misc_feature (59)..(502): Homolog of NCBI NO: 18409012 NR Description: F-box protein family, AtFBL16; protein id:
  misc_feature (32)..(328): Homolog of NCBI NO: 15810227 NR Description: putative SKP1 interacting partner SKIP2
  misc_feature (64)..(456): Homolog of NCBI NO: 18414458 NR Description: F-box protein family, AtFBL4; protein id: supported by cDNA: 100411., supported by cDNA: gi_13430831, by cDNA: gi_13605654, supported by cDNA: gi_15810598 [Arabidopsis
  misc_feature (64)..(456): Homolog of NCBI NO: 21536497 NR Description: F-box protein family, AtFBL4 [Arabidopsis
  misc_feature (139)..(453): Homolog of NCBI NO: 18414458 NR Description: F-box protein family, AtFBL4; protein id: supported by cDNA: 100411., supported by cDNA: gi_13430831, by cDNA: gi_13605654, supported by cDNA: gi_15810598 [Arabidopsis
MGHSPSSLSKSGPSSPPRRSRSFSPMAPPQQLRLTAPLQVAAGGSGSDSSSSFVPPARDYTQDLPDEILALVFASLSPTDRNACSLTCSRWMEVDATTRHRLSLDARAALGNAATALFSRFTAVTKLALRCARDSGLDSLSDHGAAALAAALPSERLARLKLRGLRKLSDAGLASLAAGAPAIRKLSIASCTFGPRAFVAVLQSCPLLEDLSVKRLRSVADTSGAASSIAEEIKFPPALSLRSVCVKDLYNALCFVPLVASSPNLRSLKILRCSGAWDLPLEVIAARAPGLVELHLEKLQVGDRGLAALSACANLEVLFLVKTPECTDSGIISVAEKCHKLRKLHVDGWRTNRIGDFGLMAVARGCPDLQELVLIGVNPTVLSLRMLGEHCRLLERLALCGCETVGDAEIICLAERWAALKKLCIKGCPVSDRGMEALNGGCPGLVKVKLKRCRGVSYECIENLKVTRGESFSISLDVVLEHDAGSTSENGAQENGQAQITELAGQMTGMDLLTNAAGTQSSIHTINRMRSVMSAIRRRFGNPLPP

SEQ ID NO: 7444 - protein, 521 aa, Zea mays subsp. mays
  peptide (1)..(521): Ceres Seq. ID no. 12405467
  misc_feature (1)..(518): Homolog of NCBI NO: 21743072 NR Description: OSJNBb0002J11.1 [Oryza sativa (japonica
  misc_feature (34)..(514): Homolog of NCBI NO: 15220130 NR Description: F-box protein family; protein id: At1g47056.1
  misc_feature (1)..(470): Homolog of NCBI NO: 30013671 NR Description: Avr9/Cf-9 rapidly elicited protein 189 [Nicotiana
  misc_feature (7)..(452): Homolog of NCBI NO: 18425169 NR Description: SKP1 interacting partner 2 (SKIP2); protein id: supported by cDNA: gi_10716948, supported by cDNA: gi_15810226
  misc_feature (34)..(517): Homolog of NCBI NO: 18412996 NR Description: F-box protein family, AtFBL8/AtFBL24; protein id: [Arabidopsis thaliana] >gi|25407371|pir||B85072 hypothetical
  misc_feature (34)..(477): Homolog of NCBI NO: 18409012 NR Description: F-box protein family, AtFBL16; protein id:
  misc_feature (7)..(303): Homolog of NCBI NO: 15810227 NR Description: putative SKP1 interacting partner SKIP2
  misc_feature (39)..(431): Homolog of NCBI NO: 18414458 NR Description: F-box protein family, AtFBL4; protein id: supported by cDNA: 100411., supported by cDNA: gi_13430831, by cDNA: gi_13605654, supported by cDNA: gi_15810598 [Arabidopsis
  misc_feature (39)..(431): Homolog of NCBI NO: 21536497 NR Description: F-box protein family, AtFBL4 [Arabidopsis
  misc_feature (114)..(428): Homolog of NCBI NO: 18414458 NR Description: F-box protein family, AtFBL4; protein id: supported by cDNA: 100411., supported by cDNA: gi_13430831, by cDNA: gi_13605654, supported by cDNA: gi_15810598 [Arabidopsis
MAPPQQLRLTAPLQVAAGGSGSDSSSSFVPPARDYTQDLPDEILALVFASLSPTDRNACSLTCSRWMEVDATTRHRLSLDARAALGNAATALFSRFTAVTKLALRCARDSGLDSLSDHGAAALAAALPSERLARLKLRGLRKLSDAGLASLAAGAPAIRKLSIASCTFGPRAFVAVLQSCPLLEDLSVKRLRSVADTSGAASSIAEEIKFPPALSLRSVCVKDLYNALCFVPLVASSPNLRSLKILRCSGAWDLPLEVIAARAPGLVELHLEKLQVGDRGLAALSACANLEVLFLVKTPECTDSGIISVAEKCHKLRKLHVDGWRTNRIGDFGLMAVARGCPDLQELVLIGVNPTVLSLRMLGEHCRLLERLALCGCETVGDAEIICLAERWAALKKLCIKGCPVSDRGMEALNGGCPGLVKVKLKRCRGVSYECIENLKVTRGESFSISLDVVLEHDAGSTSENGAQENGQAQITELAGQMTGMDLLTNAAGTQSSIHTINRMRSVMSAIRRRFGNPLPP

SEQ ID NO: 7445 - DNA, 775 bp, Zea mays subsp. mays
  misc_feature (1)..(775): Ceres Seq. ID no. 12413965
  misc_feature: MA Experiment ID: 108502 Result: Down-regulated in Transcription
  misc_feature: MA Experiment 108502 PARAMETER Experiment Name: Zm_Drought_P Parameter: Age (day) Value: 8
  misc_feature: MA Experiment 108502 PARAMETER Experiment Name: Zm_Drought_P Parameter: Organism Value: Zea mays
  misc_feature: MA Experiment 108502 PARAMETER Experiment Name: Zm_Drought_P Parameter: Plant Line Value: 35A19
  misc_feature: MA Experiment 108502 PARAMETER Experiment Name: Zm_Drought_P Parameter: Timepoint (hr) Value: 1
  misc_feature: MA Experiment 108502 PARAMETER Experiment Name: Zm_Drought_P Parameter: Tissue Value: Aerial
  misc_feature: MA Experiment 108502 PARAMETER Experiment Name: Zm_Drought_P Parameter: Treatment Value: Drought vs. No Drought
  misc_feature: MA Experiment ID: 108522 Result: Down-regulated in Transcription
  misc_feature: MA Experiment 108522 PARAMETER Experiment Name: Zm_42deg_Heat_P Parameter: Age (day) Value: 8
  misc_feature: MA Experiment 108522 PARAMETER Experiment Name: Zm_42deg_Heat_P Parameter: Organism Value: Zea mays
  misc_feature: MA Experiment 108522 PARAMETER Experiment Name: Zm_42deg_Heat_P Parameter: Plant Line Value: 35A19
  misc_feature: MA Experiment 108522 PARAMETER Experiment Name: Zm_42deg_Heat_P Parameter: Temperature (deg C) Value: 42 vs. 22
  misc_feature: MA Experiment 108522 PARAMETER Experiment Name: Zm_42deg_Heat_P Parameter: Timepoint (hr) Value: 1
  misc_feature: MA Experiment 108522 PARAMETER Experiment Name: Zm_42deg_Heat_P Parameter: Tissue Value: Aerial
  misc_feature: MA Experiment ID: 108529 Result: Down-regulated in Transcription
  misc_feature: MA Experiment 108529 PARAMETER Experiment Name: Zm_Imbibed_Seeds_P Parameter: Age (day) Value: 5 vs. 2
  misc_feature: MA Experiment 108529 PARAMETER Experiment Name: Zm_Imbibed_Seeds_P Parameter: Organism Value: Zea mays
  misc_feature: MA Experiment 108529 PARAMETER Experiment Name: Zm_Imbibed_Seeds_P Parameter: Plant Line Value: 35A19
  misc_feature: MA Experiment 108529 PARAMETER Experiment Name: Zm_Imbibed_Seeds_P Parameter: Tissue Value: Roots vs. Embryo
  misc_feature: MA Experiment ID: 108535 Result: Up-regulated in Transcription
  misc_feature: MA Experiment 108535 PARAMETER Experiment Name: Zm_Meristem_P Parameter: Age (day) Value: 8
  misc_feature: MA Experiment 108535 PARAMETER Experiment Name: Zm_Meristem_P Parameter: Organism Value: Zea mays
  misc_feature: MA Experiment 108535 PARAMETER Experiment Name: Zm_Meristem_P Parameter: Plant Line Value: 35A19
  misc_feature: MA Experiment 108535 PARAMETER Experiment Name: Zm_Meristem_P Parameter: Tissue Value: Root Meristem vs. Above Root Meristem
  misc_feature: MA Experiment ID: 108544 Result: Down-regulated in Transcription
  misc_feature: MA Experiment ID: 108546 Result: Down-regulated in Transcription
  misc_feature: MA Experiment 108546 PARAMETER Experiment Name: Zm_Imbibed_Seeds_P Parameter: Age (day) Value: 3 vs. 2
  misc_feature: MA Experiment 108546 PARAMETER Experiment Name: Zm_Imbibed_Seeds_P Parameter: Organism Value: Zea mays
  misc_feature: MA Experiment 108546 PARAMETER Experiment Name: Zm_Imbibed_Seeds_P Parameter: Plant Line Value: 35A19
  misc_feature: MA Experiment 108546 PARAMETER Experiment Name: Zm_Imbibed_Seeds_P Parameter: Tissue Value: Roots vs. Embryo
  misc_feature: MA Experiment ID: 108688 Result: Down-regulated in Transcription
  misc_feature: MA Experiment 108688 PARAMETER Experiment Name: Zm_Embryos-Flowers__P Parameter: Tissue Value: Immature Flowers vs. Aerial+
  misc_feature: MA Experiment ID: 108689 Result: Down-regulated in Transcription
  misc_feature: MA Experiment 108689 PARAMETER Experiment Name: Zm_Drought_Roots_P Parameter: Age (day) Value: 9
  misc_feature: MA Experiment 108689 PARAMETER Experiment Name: Zm_Drought_Roots_P Parameter: Organism Value: Zea mays
  misc_feature: MA Experiment 108689 PARAMETER Experiment Name: Zm_Drought_Roots_P Parameter: Plant Line Value: 35A19
  misc_feature: MA Experiment 108689 PARAMETER Experiment Name: Zm_Drought_Roots_P Parameter: Timepoint (hr) Value: 24
  misc_feature: MA Experiment 108689 PARAMETER Experiment Name: Zm_Drought_Roots_P Parameter: Tissue Value: Roots
  misc_feature: MA Experiment 108689 PARAMETER Experiment Name: Zm_Drought_Roots_P Parameter: Treatment Value: Drought vs. No Drought
  misc_feature: MA Experiment ID: 20000478 Result: Down-regulated in Transcription
  misc_feature: MA Experiment 20000478 PARAMETER Experiment Name: Zm_5mM_SA_P Parameter: Age (day) Value: 11
  misc_feature: MA Experiment 20000478 PARAMETER Experiment Name: Zm_5mM_SA_P Parameter: Organism Value: Zea mays
  misc_feature: MA Experiment 20000478 PARAMETER Experiment Name: Zm_5mM_SA_P Parameter: Plant Line Value: 35A19
  misc_feature: MA Experiment 20000478 PARAMETER Experiment Name: Zm_5mM_SA_P Parameter: Timepoint (hr) Value: 72
  misc_feature: MA Experiment 20000478 PARAMETER Experiment Name: Zm_5mM_SA_P Parameter: Tissue Value: Aerial
  misc_feature: MA Experiment 20000478 PARAMETER Experiment Name: Zm_5mM_SA_P Parameter: Treatment Value: 5mM SA vs. No Treatment
  misc_feature: MA Experiment ID: 20000532 Result: Up-regulated in Transcription
  misc_feature: MA Experiment 20000532 PARAMETER Experiment Name: Zm_0.001percent_MeJA_P Parameter: Age (day) Value: 10
  misc_feature: MA Experiment 20000532 PARAMETER Experiment Name: Zm_0.001percent_MeJA_P Parameter: Organism Value: Zea mays
  misc_feature: MA Experiment 20000532 PARAMETER Experiment Name: Zm_0.001percent_MeJA_P Parameter: Plant Line Value: 35A19
  misc_feature: MA Experiment 20000532 PARAMETER Experiment Name: Zm_0.001percent_MeJA_P Parameter: Timepoint (hr) Value: 48
  misc_feature: MA Experiment 20000532 PARAMETER Experiment Name: Zm_0.001percent_MeJA_P Parameter: Tissue Value: Aerial
  misc_feature: MA Experiment 20000532 PARAMETER Experiment Name: Zm_0.001percent_MeJA_P Parameter: Treatment Value: 0.001percent MeJA vs. No Treatment
  misc_feature: MA Experiment ID: 20000535 Result: Up-regulated in Transcription
  misc_feature: MA Experiment 20000535 PARAMETER Experiment Name: Zm_Hybrid_Seed_Dev_P Parameter: DAP Value: 30 vs. 12
  misc_feature: MA Experiment 20000535 PARAMETER Experiment Name: Zm_Hybrid_Seed_Dev_P Parameter: Organism Value: Zea mays
  misc_feature: MA Experiment 20000535 PARAMETER Experiment Name: Zm_Hybrid_Seed_Dev_P Parameter: Plant Line Value: 35A19
  misc_feature: MA Experiment 20000535 PARAMETER Experiment Name: Zm_Hybrid_Seed_Dev_P Parameter: Tissue Value: Embryo vs. Unfert Floret
  misc_feature: MA Experiment ID: 20000626 Result: Down-regulated in Transcription
  misc_feature: MA Experiment 20000626 PARAMETER Experiment Name: Zm_Herbicide-Treatments_P Parameter: Timepoint (hr) Value: 12
  misc_feature: MA Experiment 20000626 PARAMETER Experiment Name: Zm_Herbicide-Treatments_P Parameter: Tissue Value: Aerial
  misc_feature: MA Experiment 20000626 PARAMETER Experiment Name: Zm_Herbicide-Treatments_P Parameter: Treatment Value: Roundup vs. No Treatment
gagctgaaggcgacggccaaccgctcgaaaagagcaggtcaggaagccgaggctaacggcaagctcgcgcacgacgactccagacttgaagggcgttccggtgaaatctcgtcgtttcagtcgctgtgcgcgcacatctggagggcggtgacgcgcgcgcgccggctgctggctgccgacaagacgacgacgttccgcatggccgtgaactgccggcaccgtctgcgcccggcgatctccccgctctacttcggcaacgcgatccagagcgtggcgacgacggccaccgtagccgagctggcgtccaacgacctgggctgggcggccgcccggctgaacgccaccgtggcgtcgcacaaggacggcgcgatccggcgcgccgcggcggagtgggaggccgcgccccgttgcttcccgctaggcaaccccgacggggcggccctcacgatggggagctcgcctcggttcccgatgtacgacgggaacgacttcgggtggggccgcgcgctcgccgtgcggagcggccgcgcgaacaaattcgacggcaagatgtcttcgttccccggacaggctggggacggtagcatcgacgtggaggtgtgcctcgcgccagacaccatggcgcatctcctcctcgacaaggagttcttgcagtacgtgtcctcccctgcaccgtgaggcggtgacagagtgaatgtgtggcttgttgctgcgcagctacatatagtaactggatttgtaccctttcagcagatatcaagtgcttgccaacttg

SEQ ID NO: 7446 - protein, 225 aa, Zea mays subsp. mays
  peptide (1)..(225): Ceres Seq. ID no. 12413966
  misc_feature (1)..(217): Pfam Name: Transferase family Pfam Description: Transferase family
  misc_feature (1)..(221): Homolog of NCBI NO: 34908396 NR Description: P0529E05.24 [Oryza sativa (japonica
  misc_feature (35)..(222): Homolog of NCBI NO: 15225603 NR Description: putative anthocyanin 5-aromatic acyltransferase; id: At2g39980.1, supported by cDNA: gi_13937225 [Arabidopsis
  misc_feature (1)..(221): Homolog of NCBI NO: 21666314 NR Description: AER [Nicotiana tabacum]
  misc_feature (17)..(221): Homolog of NCBI NO: 15240918 NR Description: anthranilate N-benzoyltransferase - like protein; id: At5g01210.1, supported by cDNA: gi_15912268, supported by gi_19699231 [Arabidopsis thaliana] >gi|11357170|pir||T45961
  misc_feature (36)..(215): Homolog of NCBI NO: 24413968 NR Description: N-hydroxycinnamoyl/benzoyltransferase-like
  misc_feature (36)..(221): Homolog of NCBI NO: 15239072 NR Description: N-hydroxycinnamoyl benzoyltransferase-like
  misc_feature (36)..(216): Homolog of NCBI NO: 34899602 NR Description: N-hydroxycinnamoyl benzoyltransferase-like
  misc_feature (23)..(218): Homolog of NCBI NO: 21636163 NR Description: HCBT-like putative defense response protein
  misc_feature (35)..(222): Homolog of NCBI NO: 15241431 NR Description: N-hydroxycinnamoyl benzoyltransferase - like protein id: At5g07860.1, supported by cDNA: gi_17065195
  misc_feature (37)..(225): Homolog of NCBI NO: 38346680 NR Description: OSJNBa0069D17.11 [Oryza sativa (japonica
ELKATANRSKRAGQEAEANGKLAHDDSRLEGRSGEISSFQSLCAHIWRAVTRARRLLAADKTTTFRMAVNCRHRLRPAISPLYFGNAIQSVATTATVAELASNDLGWAAARLNATVASHKDGAIRRAAAEWEAAPRCFPLGNPDGAALTMGSSPRFPMYDGNDFGWGRALAVRSGRANKFDGKMSSFPGQAGDGSIDVEVCLAPDTMAHLLLDKEFLQYVSSPAP

SEQ ID NO: 7447 - protein, 159 aa, Zea mays subsp. mays
  peptide (1)..(159): Ceres Seq. ID no. 12413967
  misc_feature (1)..(151): Pfam Name: Transferase family Pfam Description: Transferase family
  misc_feature (1)..(155): Homolog of NCBI NO: 34908396 NR Description: P0529E05.24 [Oryza sativa (japonica
  misc_feature (1)..(156): Homolog of NCBI NO: 15225603 NR Description: putative anthocyanin 5-aromatic acyltransferase; id: At2g39980.1, supported by cDNA: gi_13937225 [Arabidopsis
  misc_feature (1)..(155): Homolog of NCBI NO: 21666314 NR Description: AER [Nicotiana tabacum]
  misc_feature (1)..(155): Homolog of NCBI NO: 15240918 NR Description: anthranilate N-benzoyltransferase - like protein; id: At5g01210.1, supported by cDNA: gi_15912268, supported by gi_19699231 [Arabidopsis thaliana] >gi|11357170|pir||T45961
  misc_feature (1)..(149): Homolog of NCBI NO: 24413968 NR Description: N-hydroxycinnamoyl/benzoyltransferase-like
  misc_feature (1)..(155): Homolog of NCBI NO: 15239072 NR Description: N-hydroxycinnamoyl benzoyltransferase-like
  misc_feature (1)..(150): Homolog of NCBI NO: 34899602 NR Description: N-hydroxycinnamoyl benzoyltransferase-like
  misc_feature (1)..(152): Homolog of NCBI NO: 21636163 NR Description: HCBT-like putative defense response protein
  misc_feature (1)..(156): Homolog of NCBI NO: 15241431 NR Description: N-hydroxycinnamoyl benzoyltransferase - like protein id: At5g07860.1, supported by cDNA: gi_17065195
  misc_feature (1)..(159): Homolog of NCBI NO: 38346680 NR Description: OSJNBa0069D17.11 [Oryza sativa (japonica
MAVNCRHRLRPAISPLYFGNAIQSVATTATVAELASNDLGWAAARLNATVASHKDGAIRRAAAEWEAAPRCFPLGNPDGAALTMGSSPRFPMYDGNDFGWGRALAVRSGRANKFDGKMSSFPGQAGDGSIDVEVCLAPDTMAHLLLDKEFLQYVSSPAP

SEQ ID NO: 7448 - DNA, 1422 bp, Zea mays subsp. mays
  misc_feature (1)..(1422): Ceres Seq. ID no. 12407902
  misc_feature: MA Experiment ID: 108527 Result: Up-regulated in Transcription
  misc_feature: MA Experiment 108527 PARAMETER Experiment Name: Zm_5mM_NO_P Parameter: Age (day) Value: 8
  misc_feature: MA Experiment 108527 PARAMETER Experiment Name: Zm_5mM_NO_P Parameter: Organism Value: Zea mays
  misc_feature: MA Experiment 108527 PARAMETER Experiment Name: Zm_5mM_NO_P Parameter: Plant Line Value: 35A19
  misc_feature: MA Experiment 108527 PARAMETER Experiment Name: Zm_5mM_NO_P Parameter: Timepoint (hr) Value: 6
  misc_feature: MA Experiment 108527 PARAMETER Experiment Name: Zm_5mM_NO_P Parameter: Tissue Value: Aerial
  misc_feature: MA Experiment 108527 PARAMETER Experiment Name: Zm_5mM_NO_P Parameter: Treatment Value: 5mM NO vs. No Treatment
  misc_feature: MA Experiment ID: 108543 Result: Down-regulated in Transcription
aacccattcttcggcggttcggcccggcctgcaccctgcagccaccaagcaaacccagtgctctgctttctgcattcccccccgccgccactccgtcgggcttgatgagcctctgctccaagctcttcgcgttgctccgcaagtcccgcgccctcgccaccagcaccgccgccgcagccgccgcgacaacctccgcgacggcgtcggccaacgggatggaggaggctgtcgccgcggcgggcccgctgcgcacgcgcgtctgcatcatcggcagcggcccagccgcgcacacggcggccgtctacgccgcgcgcgccgagctcaagcccgtcctcttcgagggctggctcgccaacgacatcgccgcgggtggacagctcaccaccaccaccgacgtcgagaacttcccgggcttccccgacggcatcctcggcgccgacctcatggatcgctgccgcgcgcagtcgctcaggttcgggaccaagatcctcaccgagaccgtcaccaccgtggacttctccgcccgccccttccgtgtcgcctccgacgacaccgttgtgcacgccgactccgtcgtcgtcgccacgggcgccgtcgcgcgcaggctgcacttcgccggctccgacgccttctggaaccggggcatctccgcctgcgccgtctgcgacggggctgcgcctatcttccggaacaagcccatcgccgtcgtcggaggcggggactccgccatggaggaggctaacttcctcaccaagtacggctcgcaagtttacatcatccaccgccgcagcgacttccgggcgtccaagatcatgcaggcgcgcacgctctccaaccccaagatcaaggtcgtctggaactccgaggtcgtcgaggcctacggcggtgcggatggcggcccgctagccggcgtcaaggtcaaggacgtcgtcaccggcgaggtctctgatctccaggtggccgggctcttctttgccatcggtcacgagccggcgacaaaatttcttggagggcagctcgagctcgactctgatgggtatgtggtgaccaagcccggttccacgcacaccagtgtgcagggggtctttgcagctggggatgtccaggacaagaagtaccgccaggccattactgcagctggatcaggttgcatggctgctctggatgcagagcactacctgcaggaggttggagcacaggaagggaagaccgattgactatgtctgggccaagctgctcttgggccaaggaaaacttctccgaaagccgctctctagtggtgtaaacagcacattattatttggttttaggcctcaaattacgttacattggaaattgatttatatgagcgtgcgcaagcttgtatacattattcgcattgtttattactcttagagtcttagtcattaatcacactttgct

SEQ ID NO: 7449 - protein, 404 aa, Zea mays subsp. mays
  peptide (1)..(404): Ceres Seq. ID no. 12407903
  misc_feature (85)..(377): Pfam Name: Pyridine nucleotide-disulphide oxidoreductase Pfam Description: Pyridine nucleotide-disulphide oxidoreductase
  misc_feature (72)..(404): Homolog of NCBI NO: 17826833 NR Description: NADPH-thioredoxin reductase [Triticum aestivum]
  misc_feature (54)..(404): Homolog of NCBI NO: 12644431 NR Description: Thioredoxin reductase 2 (NADPH-dependent reductase 2) (NTR 2) >gi|25528214|pir||A84552 probable
  misc_feature (83)..(404): Homolog of NCBI NO: 30679976 NR Description: thioredoxin reductase 2 (NADPH-dependent
  misc_feature (84)..(404): Homolog of NCBI NO: 15237010 NR Description: thioredoxin reductase (NADPH) 2; protein id: [Arabidopsis thaliana] >gi|12644432|sp|Q39243|TRB1_ARATH
  misc_feature (84)..(404): Homolog of NCBI NO: 1942055 NR Description: Structure Of Nadph Dependent Thioredoxin Reductase
  misc_feature (84)..(404): Homolog of NCBI NO: 28393819 NR Description: putative thioredoxin reductase (NADPH) 2
  misc_feature (84)..(404): Homolog of NCBI NO: 1076418 NR Description: thioredoxin-disulfide reductase (EC 1.8.1.9) 2
  misc_feature (84)..(404): Homolog of NCBI NO: 468526 NR Description: Thioredoxin reductase [Arabidopsis thaliana]
  misc_feature (107)..(404): Homolog of NCBI NO: 1076358 NR Description: thioredoxin-disulfide reductase (EC 1.8.1.9) 2 - thaliana (fragment) >gi|468524|emb|CAA80655.1| NADPH thioredoxin
  misc_feature (116)..(404): Homolog of NCBI NO: 20466580 NR Description: putative thioredoxin reductase [Arabidopsis
PILRRFGPACTLQPPSKPSALLSAFPPAATPSGLMSLCSKLFALLRKSRALATSTAAAAAATTSATASANGMEEAVAAAGPLRTRVCIIGSGPAAHTAAVYAARAELKPVLFEGWLANDIAAGGQLTTTTDVENFPGFPDGILGADLMDRCRAQSLRFGTKILTETVTTVDFSARPFRVASDDTVVHADSVVVATGAVARRLHFAGSDAFWNRGISACAVCDGAAPIFRNKPIAVVGGGDSAMEEANFLTKYGSQVYIIHRRSDFRASKIMQARTLSNPKIKVVWNSEVVEAYGGADGGPLAGVKVKDVVTGEVSDLQVAGLFFAIGHEPATKFLGGQLELDSDGYVVTKPGSTHTSVQGVFAAGDVQDKKYRQAITAAGSGCMAALDAEHYLQEVGAQEGKTD

SEQ ID NO: 7450 - protein, 370 aa, Zea mays subsp. mays
  peptide (1)..(370): Ceres Seq. ID no. 12407904
  misc_feature (51)..(343): Pfam Name: Pyridine nucleotide-disulphide oxidoreductase Pfam Description: Pyridine nucleotide-disulphide oxidoreductase
  misc_feature (38)..(370): Homolog of NCBI NO: 17826833 NR Description: NADPH-thioredoxin reductase [Triticum aestivum]
  misc_feature (20)..(370): Homolog of NCBI NO: 12644431 NR Description: Thioredoxin reductase 2 (NADPH-dependent reductase 2) (NTR 2) >gi|25528214|pir||A84552 probable
  misc_feature (49)..(370): Homolog of NCBI NO: 30679976 NR Description: thioredoxin reductase 2 (NADPH-dependent
  misc_feature (50)..(370): Homolog of NCBI NO: 15237010 NR Description: thioredoxin reductase (NADPH) 2; protein id: [Arabidopsis thaliana] >gi|12644432|sp|Q39243|TRB1_ARATH
  misc_feature (50)..(370): Homolog of NCBI NO: 1942055 NR Description: Structure Of Nadph Dependent Thioredoxin Reductase
  misc_feature (50)..(370): Homolog of NCBI NO: 28393819 NR Description: putative thioredoxin reductase (NADPH) 2
  misc_feature (50)..(370): Homolog of NCBI NO: 1076418 NR Description: thioredoxin-disulfide reductase (EC 1.8.1.9) 2
  misc_feature (50)..(370): Homolog of NCBI NO: 468526 NR Description: Thioredoxin reductase [Arabidopsis thaliana]
  misc_feature (73)..(370): Homolog of NCBI NO: 1076358 NR Description: thioredoxin-disulfide reductase (EC 1.8.1.9) 2 - thaliana (fragment) >gi|468524|emb|CAA80655.1| NADPH thioredoxin
  misc_feature (82)..(370): Homolog of NCBI NO: 20466580 NR Description: putative thioredoxin reductase [Arabidopsis
MSLCSKLFALLRKSRALATSTAAAAAATTSATASANGMEEAVAAAGPLRTRVCIIGSGPAAHTAAVYAARAELKPVLFEGWLANDIAAGGQLTTTTDVENFPGFPDGILGADLMDRCRAQSLRFGTKILTETVTTVDFSARPFRVASDDTVVHADSVVVATGAVARRLHFAGSDAFWNRGISACAVCDGAAPIFRNKPIAVVGGGDSAMEEANFLTKYGSQVYIIHRRSDFRASKIMQARTLSNPKIKVVWNSEVVEAYGGADGGPLAGVKVKDVVTGEVSDLQVAGLFFAIGHEPATKFLGGQLELDSDGYVVTKPGSTHTSVQGVFAAGDVQDKKYRQAITAAGSGCMAALDAEHYLQEVGAQEGKTD

SEQ ID NO: 7451 - protein, 333 aa, Zea mays subsp. mays
  peptide (1)..(333): Ceres Seq. ID no. 12407905
  misc_feature (14)..(306): Pfam Name: Pyridine nucleotide-disulphide oxidoreductase Pfam Description: Pyridine nucleotide-disulphide oxidoreductase
  misc_feature (1)..(333): Homolog of NCBI NO: 17826833 NR Description: NADPH-thioredoxin reductase [Triticum aestivum]
  misc_feature (1)..(333): Homolog of NCBI NO: 12644431 NR Description: Thioredoxin reductase 2 (NADPH-dependent reductase 2) (NTR 2) >gi|25528214|pir||A84552 probable
  misc_feature (12)..(333): Homolog of NCBI NO: 30679976 NR Description: thioredoxin reductase 2 (NADPH-dependent
  misc_feature (13)..(333): Homolog of NCBI NO: 15237010 NR Description: thioredoxin reductase (NADPH) 2; protein id: [Arabidopsis thaliana] >gi|12644432|sp|Q39243|TRB1_ARATH
  misc_feature (13)..(333): Homolog of NCBI NO: 1942055 NR Description: Structure Of Nadph Dependent Thioredoxin Reductase
  misc_feature (13)..(333): Homolog of NCBI NO: 28393819 NR Description: putative thioredoxin reductase (NADPH) 2
  misc_feature (13)..(333): Homolog of NCBI NO: 1076418 NR Description: thioredoxin-disulfide reductase (EC 1.8.1.9) 2
  misc_feature (13)..(333): Homolog of NCBI NO: 468526 NR Description: Thioredoxin reductase [Arabidopsis thaliana]
  misc_feature (36)..(333): Homolog of NCBI NO: 1076358 NR Description: thioredoxin-disulfide reductase (EC 1.8.1.9) 2 - thaliana (fragment) >gi|468524|emb|CAA80655.1| NADPH thioredoxin
  misc_feature (45)..(333): Homolog of NCBI NO: 20466580 NR Description: putative thioredoxin reductase [Arabidopsis
MEEAVAAAGPLRTRVCIIGSGPAAHTAAVYAARAELKPVLFEGWLANDIAAGGQLTTTTDVENFPGFPDGILGADLMDRCRAQSLRFGTKILTETVTTVDFSARPFRVASDDTVVHADSVVVATGAVARRLHFAGSDAFWNRGISACAVCDGAAPIFRNKPIAVVGGGDSAMEEANFLTKYGSQVYIIHRRSDFRASKIMQARTLSNPKIKVVWNSEVVEAYGGADGGPLAGVKVKDVVTGEVSDLQVAGLFFAIGHEPATKFLGGQLELDSDGYVVTKPGSTHTSVQGVFAAGDVQDKKYRQAITAAGSGCMAALDAEHYLQEVGAQEGKTD

SEQ ID NO: 7452 - DNA, 1287 bp, Zea mays subsp. mays
  misc_feature (1)..(1287): Ceres Seq. ID no. 12408795
  misc_feature: MA Experiment ID: 108523 Result: Up-regulated in Transcription
  misc_feature: MA Experiment 108523 PARAMETER Experiment Name: Zm_42deg_Heat_P Parameter: Age (day) Value: 8
  misc_feature: MA Experiment 108523 PARAMETER Experiment Name: Zm_42deg_Heat_P Parameter: Organism Value: Zea mays
  misc_feature: MA Experiment 108523 PARAMETER Experiment Name: Zm_42deg_Heat_P Parameter: Plant Line Value: 35A19
  misc_feature: MA Experiment 108523 PARAMETER Experiment Name: Zm_42deg_Heat_P Parameter: Temperature (deg C) Value: 42 vs. 22
  misc_feature: MA Experiment 108523 PARAMETER Experiment Name: Zm_42deg_Heat_P Parameter: Timepoint (hr) Value: 6
  misc_feature: MA Experiment 108523 PARAMETER Experiment Name: Zm_42deg_Heat_P Parameter: Tissue Value: Aerial
  misc_feature: MA Experiment ID: 108527 Result: Up-regulated in Transcription
  misc_feature: MA Experiment 108527 PARAMETER Experiment Name: Zm_5mM_NO_P Parameter: Age (day) Value: 8
  misc_feature: MA Experiment 108527 PARAMETER Experiment Name: Zm_5mM_NO_P Parameter: Organism Value: Zea mays
  misc_feature: MA Experiment 108527 PARAMETER Experiment Name: Zm_5mM_NO_P Parameter: Plant Line Value: 35A19
  misc_feature: MA Experiment 108527 PARAMETER Experiment Name: Zm_5mM_NO_P Parameter: Timepoint (hr) Value: 6
  misc_feature: MA Experiment 108527 PARAMETER Experiment Name: Zm_5mM_NO_P Parameter: Tissue Value: Aerial
  misc_feature: MA Experiment 108527 PARAMETER Experiment Name: Zm_5mM_NO_P Parameter: Treatment Value: 5mM NO vs. No Treatment
  misc_feature: MA Experiment ID: 108529 Result: Up-regulated in Transcription
  misc_feature: MA Experiment 108529 PARAMETER Experiment Name: Zm_Imbibed_Seeds_P Parameter: Age (day) Value: 5 vs. 2
  misc_feature: MA Experiment 108529 PARAMETER Experiment Name: Zm_Imbibed_Seeds_P Parameter: Organism Value: Zea mays
  misc_feature: MA Experiment 108529 PARAMETER Experiment Name: Zm_Imbibed_Seeds_P Parameter: Plant Line Value: 35A19
  misc_feature: MA Experiment 108529 PARAMETER Experiment Name: Zm_Imbibed_Seeds_P Parameter: Tissue Value: Roots vs. Embryo
  misc_feature: MA Experiment ID: 108534 Result: Up-regulated in Transcription
  misc_feature: MA Experiment 108534 PARAMETER Experiment Name: Zm_4deg_Cold_P Parameter: Age (hr) Value: 8
  misc_feature: MA Experiment 108534 PARAMETER Experiment Name: Zm_4deg_Cold_P Parameter: Organism Value: Zea mays
  misc_feature: MA Experiment 108534 PARAMETER Experiment Name: Zm_4deg_Cold_P Parameter: Plant Line Value: 35A19
  misc_feature: MA Experiment 108534 PARAMETER Experiment Name: Zm_4deg_Cold_P Parameter: Temperature (deg C) Value: 4 vs. 22
  misc_feature: MA Experiment 108534 PARAMETER Experiment Name: Zm_4deg_Cold_P Parameter: Timepoint (hr) Value: 6
  misc_feature: MA Experiment 108534 PARAMETER Experiment Name: Zm_4deg_Cold_P Parameter: Tissue Value: Aerial
  misc_feature: MA Experiment ID: 108559 Result: Up-regulated in Transcription
  misc_feature: MA Experiment 108559 PARAMETER Experiment Name: Zm_5mM_NO_P Parameter: Age (day) Value: 8
  misc_feature: MA Experiment 108559 PARAMETER Experiment Name: Zm_5mM_NO_P Parameter: Organism Value: Zea mays
  misc_feature: MA Experiment 108559 PARAMETER Experiment Name: Zm_5mM_NO_P Parameter: Plant Line Value: 35A19
  misc_feature: MA Experiment 108559 PARAMETER Experiment Name: Zm_5mM_NO_P Parameter: Timepoint (hr) Value: 12
  misc_feature: MA Experiment 108559 PARAMETER Experiment Name: Zm_5mM_NO_P Parameter: Tissue Value: Aerial
  misc_feature: MA Experiment 108559 PARAMETER Experiment Name: Zm_5mM_NO_P Parameter: Treatment Value: 5mM NO vs. No Treatment
gcgttgccgcctccttccttccttctcacgaaaaggcaggcaagggaaaggcaaaggccaacccatcccctgcctcctccgttgctctgctgctccccctccttatctaatcctctggttcctggaccccggcctgcaagctcaagcagcagcagcggcgccggcgacgagaagggagtaggaggaggattgctaccatcctatatcatatcatacatatacagagacagcaaggaggaggagaaggtgtgtagcgaggttgagatccggaggatgccttccagtgccatgagttccgggctgttcgtggagtccgcctccggcagcggcgccgagccggtgctctgcgcgcctcggccgcgcagggtccagcaggtgcacccctgcagcgccgacctcatccttggcgcaccgcccttcccgcgcaacgccaacagcaagggcagcagcagcagggaaggaggcaggacgacgaccaggccggcggcggaggacgaggacgaggactgccgctgggcggcgttcggcgggtcgccgccggcgcgcgcggacaacccgctggtgcacgacccccggttcctgcggaaccagcgccacccggcgccgctggagctcgggtcgccgaaccaccggcggccgacctacagcagcggtggcgacggcagcgggtttgcctcgtcgtcgttcgcgccggccgtgaggatccagggcttcgacgtcgccgcgtgccgcgcgtgagagcgagctccggccgggcggggctttggcttttcgatctattaaattaaattaacagcaggtgaggtcaggtcagatcagatcatagtagggaggaaggcgaggagggcgggagggatgggatgagatctcctcttcctcctcctcgcgagggaggcgatccagtcgtatgagtgaagtaaagaagagtactccagtcgtactataggttgatgttcgccgataccacaccacacagcagccggtcaaagggagtgaaaactgattttttgtttacggggttttgtcagcaaggttattaggttttgtgtttgtgctgtagcctgtaagatgtaagctactactagcacgggtctcttgttcgttgatgctgctctgctctggcctctgggtgcccctgtattgtagatataaatcagcacccagttcgggcggtcggccagcgttcgtttttcttctagttgacgaggaggaagaagatgtccgctcctcgccatgtaatgtaaccatggctgtactcctacatacatgcaatcatgtataaagatg

SEQ ID NO: 7453 - protein, 245 aa, Zea mays subsp. mays
  peptide (1)..(245): Ceres Seq. ID no. 12408796
  misc_feature (101)..(245): Homolog of NCBI NO: 34907108 NR Description: OSJNBa0052O12.19 [Oryza sativa (japonica
ALPPPSFLLTKRQARERQRPTHPLPPPLLCCSPSLSNPLVPGPRPASSSSSSGAGDEKGVGGGLLPSYIISYIYRDSKEEEKVCSEVEIRRMPSSAMSSGLFVESASGSGAEPVLCAPRPRRVQQVHPCSADLILGAPPFPRNANSKGSSSREGGRTTTRPAAEDEDEDCRWAAFGGSPPARADNPLVHDPRFLRNQRHPAPLELGSPNHRRPTYSSGGDGSGFASSSFAPAVRIQGFDVAACRA

SEQ ID NO: 7454 - protein, 154 aa, Zea mays subsp. mays
  peptide (1)..(154): Ceres Seq. ID no. 12408797
  misc_feature (10)..(154): Homolog of NCBI NO: 34907108 NR Description: OSJNBa0052O12.19 [Oryza sativa (japonica
MPSSAMSSGLFVESASGSGAEPVLCAPRPRRVQQVHPCSADLILGAPPFPRNANSKGSSSREGGRTTTRPAAEDEDEDCRWAAFGGSPPARADNPLVHDPRFLRNQRHPAPLELGSPNHRRPTYSSGGDGSGFASSSFAPAVRIQGFDVAACRA

SEQ ID NO: 7455 - protein, 149 aa, Zea mays subsp. mays
  peptide (1)..(149): Ceres Seq. ID no. 12408798
  misc_feature (5)..(149): Homolog of NCBI NO: 34907108 NR Description: OSJNBa0052O12.19 [Oryza sativa (japonica
MSSGLFVESASGSGAEPVLCAPRPRRVQQVHPCSADLILGAPPFPRNANSKGSSSREGGRTTTRPAAEDEDEDCRWAAFGGSPPARADNPLVHDPRFLRNQRHPAPLELGSPNHRRPTYSSGGDGSGFASSSFAPAVRIQGFDVAACRA

SEQ ID NO: 7456 - DNA, 1201 bp, Zea mays subsp. mays
  misc_feature (1)..(1201): Ceres Seq. ID no. 12408788
  misc_feature: MA Experiment ID: 108559 Result: Up-regulated in Transcription
  misc_feature: MA Experiment 108559 PARAMETER Experiment Name: Zm_5mM_NO_P Parameter: Age (day) Value: 8
  misc_feature: MA Experiment 108559 PARAMETER Experiment Name: Zm_5mM_NO_P Parameter: Organism Value: Zea mays
  misc_feature: MA Experiment 108559 PARAMETER Experiment Name: Zm_5mM_NO_P Parameter: Plant Line Value: 35A19
  misc_feature: MA Experiment 108559 PARAMETER Experiment Name: Zm_5mM_NO_P Parameter: Timepoint (hr) Value: 12
  misc_feature: MA Experiment 108559 PARAMETER Experiment Name: Zm_5mM_NO_P Parameter: Tissue Value: Aerial
  misc_feature: MA Experiment 108559 PARAMETER Experiment Name: Zm_5mM_NO_P Parameter: Treatment Value: 5mM NO vs. No Treatment
  misc_feature: MA Experiment ID: 20000480 Result: Down-regulated in Transcription
  misc_feature: MA Experiment 20000480 PARAMETER Experiment Name: Zm_Drought_P Parameter: Age (day) Value: 11
  misc_feature: MA Experiment 20000480 PARAMETER Experiment Name: Zm_Drought_P Parameter: Organism Value: Zea mays
  misc_feature: MA Experiment 20000480 PARAMETER Experiment Name: Zm_Drought_P Parameter: Plant Line Value: 35A19
  misc_feature: MA Experiment 20000480 PARAMETER Experiment Name: Zm_Drought_P Parameter: Timepoint (hr) Value: 72
  misc_feature: MA Experiment 20000480 PARAMETER Experiment Name: Zm_Drought_P Parameter: Tissue Value: Aerial
  misc_feature: MA Experiment 20000480 PARAMETER Experiment Name: Zm_Drought_P Parameter: Treatment Value: Drought vs. No Drought
  misc_feature: MA Experiment ID: 20000534 Result: Down-regulated in Transcription
  misc_feature: MA Experiment 20000534 PARAMETER Experiment Name: Zm_Hybrid_Pollen_P Parameter: Age (day) Value: 8
  misc_feature: MA Experiment 20000534 PARAMETER Experiment Name: Zm_Hybrid_Pollen_P Parameter: Organism Value: Zea mays
  misc_feature: MA Experiment 20000534 PARAMETER Experiment Name: Zm_Hybrid_Pollen_P Parameter: Plant Line Value: 35A19
  misc_feature: MA Experiment 20000534 PARAMETER Experiment Name: Zm_Hybrid_Pollen_P Parameter: Tissue Value: Pollen vs. Aerial
aaaaacaaactaaaatcgagaaacgcgatcgtaagtagcggcggcggcggcgtggcgacagcaggagtaggattggcccagttcaatcgcacggccaatctggtaggcggtcatcgtcagaatccagactccacataccggcccatttacagcaaggaaccgcgaacgccaagctcgtcttctttcttggaagaggggccgctccactcgactgaaagcgcaatcaactctagtctctagccacaactcgaagtacgagtacctccggagtccggatggctgcagcgatggacgtcgacgaagccggcggcgaggagaggcgaccgtcggagaaggagctcttccgcgccgccgagtccggcgacgccgccgcgttcgcctccctcgcccccgccgacctctccctgcgcaacgaggacggccgctccctcctccacgtcgccgccgctgccggccatccccaggtggtgctcgcgcttgcccagtgcggtggtgacgccgcggctagcgtgctgaatgcgcaggacgaggaggggtgggcgccgatccactccgccgcgagctccggcaactctcaaatcgtcgacatcctgcttgagcgaggtgctgatgctaacctggttactgatggtggccgaactgctcttcattatgctgcgagtaaagggaggcttaacatagctgaaaaactaatagcccatggtgctaatgtcaacaagaaagacaagtttggctgcacacctttgcatagagctgcaagcactggaaacgcggagctgtgtgaattcctcattgaggaaggtgctgaagttgatgctgttgacaagacaggacaaacacctcttacgcatgctgttatatgtgagaacaaaggggctgctcttctgctaattagacatggtgctgatgttgatgtcgaggacaaggaaggctacactgcccttggccgagcatcgaacagcttcagacctgcactcatcgatgcagccaaggcaatgctcgaaggatgatctggtgctctgctcaaagacgatggaaagtgtgatacgagaaactgtgctgagtcgaggtgttaaagcttgttctggtgtgtaaacaaaggggctctacagaatcagatttgaccctgctagaattttgcccttgttgggtttatttaaccattgtgactaacatctcataagctaagctttggttctcc

SEQ ID NO: 7457 - protein, 244 aa, Zea mays subsp. mays
  peptide (1)..(244): Ceres Seq. ID no. 12408789
  misc_feature (152)..(184): Pfam Name: Ankyrin repeat Pfam Description: Ankyrin repeat
  misc_feature (1)..(244): Homolog of NCBI NO: 15341604 NR Description: putative ankyrin [Oryza sativa]
  misc_feature (19)..(244): Homolog of NCBI NO: 30678058 NR Description: ankyrin -related [Arabidopsis thaliana] putative ankyrin [Arabidopsis thaliana]
  misc_feature (19)..(244): Homolog of NCBI NO: 25295712 NR Description: probable ankyrin [imported] - Arabidopsis >gi|4335756|gb|AAD17433.1| putative ankyrin [Arabidopsis
  misc_feature (14)..(244): Homolog of NCBI NO: 37681913 NR Description: proteasome 26S subunit, non-ATPase, 10 [Danio
  misc_feature (37)..(244): Homolog of NCBI NO: 4506217 NR Description: proteasome 26S non-ATPase subunit 10 isoform 1;
  misc_feature (37)..(244): Homolog of NCBI NO: 39654744 NR Description: Chain A, X-Ray Structure Of Human Gankyrin
  misc_feature (49)..(222): Homolog of NCBI NO: 28274852 NR Description: ankyrin repeat protein E4_2 [synthetic construct]
  misc_feature (37)..(223): Homolog of NCBI NO: 16758980 NR Description: proteasome (prosome, macropain) 26S subunit,
  misc_feature (37)..(223): Homolog of NCBI NO: 25990817 NR Description: gankyrin oncoprotein [Mesocricetus auratus]
  misc_feature (37)..(223): Homolog of NCBI NO: 12857852 NR Description: unnamed protein product [Mus musculus]
MAAAMDVDEAGGEERRPSEKELFRAAESGDAAAFASLAPADLSLRNEDGRSLLHVAAAAGHPQVVLALAQCGGDAAASVLNAQDEEGWAPIHSAASSGNSQIVDILLERGADANLVTDGGRTALHYAASKGRLNIAEKLIAHGANVNKKDKFGCTPLHRAASTGNAELCEFLIEEGAEVDAVDKTGQTPLTHAVICENKGAALLLIRHGADVDVEDKEGYTALGRASNSFRPALIDAAKAMLEG

SEQ ID NO: 7458 - protein, 240 aa, Zea mays subsp. mays
  peptide (1)..(240): Ceres Seq. ID no. 12408790
  misc_feature (148)..(180): Pfam Name: Ankyrin repeat Pfam Description: Ankyrin repeat
  misc_feature (1)..(240): Homolog of NCBI NO: 15341604 NR Description: putative ankyrin [Oryza sativa]
  misc_feature (15)..(240): Homolog of NCBI NO: 30678058 NR Description: ankyrin -related [Arabidopsis thaliana] putative ankyrin [Arabidopsis thaliana]
  misc_feature (15)..(240): Homolog of NCBI NO: 25295712 NR Description: probable ankyrin [imported] - Arabidopsis >gi|4335756|gb|AAD17433.1| putative ankyrin [Arabidopsis
  misc_feature (10)..(240): Homolog of NCBI NO: 37681913 NR Description: proteasome 26S subunit, non-ATPase, 10 [Danio
  misc_feature (33)..(240): Homolog of NCBI NO: 4506217 NR Description: proteasome 26S non-ATPase subunit 10 isoform 1;
  misc_feature (33)..(240): Homolog of NCBI NO: 39654744 NR Description: Chain A, X-Ray Structure Of Human Gankyrin
  misc_feature (45)..(218): Homolog of NCBI NO: 28274852 NR Description: ankyrin repeat protein E4_2 [synthetic construct]
  misc_feature (33)..(219): Homolog of NCBI NO: 16758980 NR Description: proteasome (prosome, macropain) 26S subunit,
  misc_feature (33)..(219): Homolog of NCBI NO: 25990817 NR Description: gankyrin oncoprotein [Mesocricetus auratus]
  misc_feature (33)..(219): Homolog of NCBI NO: 12857852 NR Description: unnamed protein product [Mus musculus]
MDVDEAGGEERRPSEKELFRAAESGDAAAFASLAPADLSLRNEDGRSLLHVAAAAGHPQVVLALAQCGGDAAASVLNAQDEEGWAPIHSAASSGNSQIVDILLERGADANLVTDGGRTALHYAASKGRLNIAEKLIAHGANVNKKDKFGCTPLHRAASTGNAELCEFLIEEGAEVDAVDKTGQTPLTHAVICENKGAALLLIRHGADVDVEDKEGYTALGRASNSFRPALIDAAKAMLEG

SEQ ID NO: 7459 - DNA, 1848 bp, Zea mays subsp. mays
  misc_feature (1)..(1848): Ceres Seq. ID no. 12372600
  misc_feature: MA Experiment ID: 108543 Result: Up-regulated in Transcription
  misc_feature: MA Experiment ID: 108544 Result: Up-regulated in Transcription
  misc_feature: MA Experiment ID: 108689 Result: Up-regulated in Transcription
  misc_feature: MA Experiment 108689 PARAMETER Experiment Name: Zm_Drought_Roots_P Parameter: Age (day) Value: 9
  misc_feature: MA Experiment 108689 PARAMETER Experiment Name: Zm_Drought_Roots_P Parameter: Organism Value: Zea mays
  misc_feature: MA Experiment 108689 PARAMETER Experiment Name: Zm_Drought_Roots_P Parameter: Plant Line Value: 35A19
  misc_feature: MA Experiment 108689 PARAMETER Experiment Name: Zm_Drought_Roots_P Parameter: Timepoint (hr) Value: 24
  misc_feature: MA Experiment 108689 PARAMETER Experiment Name: Zm_Drought_Roots_P Parameter: Tissue Value: Roots
  misc_feature: MA Experiment 108689 PARAMETER Experiment Name: Zm_Drought_Roots_P Parameter: Treatment Value: Drought vs. No Drought
  misc_feature: MA Experiment ID: 20000479 Result: Up-regulated in Transcription
  misc_feature: MA Experiment 20000479 PARAMETER Experiment Name: Zm_Drought_P Parameter: Age (day) Value: 10
  misc_feature: MA Experiment 20000479 PARAMETER Experiment Name: Zm_Drought_P Parameter: Organism Value: Zea mays
  misc_feature: MA Experiment 20000479 PARAMETER Experiment Name: Zm_Drought_P Parameter: Plant Line Value: 35A19
  misc_feature: MA Experiment 20000479 PARAMETER Experiment Name: Zm_Drought_P Parameter: Timepoint (hr) Value: 48
  misc_feature: MA Experiment 20000479 PARAMETER Experiment Name: Zm_Drought_P Parameter: Tissue Value: Aerial
  misc_feature: MA Experiment 20000479 PARAMETER Experiment Name: Zm_Drought_P Parameter: Treatment Value: Drought vs. No Drought
  misc_feature: MA Experiment ID: 20000480 Result: Up-regulated in Transcription
  misc_feature: MA Experiment 20000480 PARAMETER Experiment Name: Zm_Drought_P Parameter: Age (day) Value: 11
  misc_feature: MA Experiment 20000480 PARAMETER Experiment Name: Zm_Drought_P Parameter: Organism Value: Zea mays
  misc_feature: MA Experiment 20000480 PARAMETER Experiment Name: Zm_Drought_P Parameter: Plant Line Value: 35A19
  misc_feature: MA Experiment 20000480 PARAMETER Experiment Name: Zm_Drought_P Parameter: Timepoint (hr) Value: 72
  misc_feature: MA Experiment 20000480 PARAMETER Experiment Name: Zm_Drought_P Parameter: Tissue Value: Aerial
  misc_feature: MA Experiment 20000480 PARAMETER Experiment Name: Zm_Drought_P Parameter: Treatment Value: Drought vs. No Drought
  misc_feature: MA Experiment ID: 20000535 Result: Up-regulated in Transcription
  misc_feature: MA Experiment 20000535 PARAMETER Experiment Name: Zm_Hybrid_Seed_Dev_P Parameter: DAP Value: 30 vs. 12
  misc_feature: MA Experiment 20000535 PARAMETER Experiment Name: Zm_Hybrid_Seed_Dev_P Parameter: Organism Value: Zea mays
  misc_feature: MA Experiment 20000535 PARAMETER Experiment Name: Zm_Hybrid_Seed_Dev_P Parameter: Plant Line Value: 35A19
  misc_feature: MA Experiment 20000535 PARAMETER Experiment Name: Zm_Hybrid_Seed_Dev_P Parameter: Tissue Value: Embryo vs. Unfert Floret
gcacgagaccattacctagaacatcctaatcgaaaacccatccggcctcccccccgtctcgatagtcgataccaggttctaaatggcgatggcgatgatggctatgcgacgcgcggtggcgctcggcgctcgccacatccccgccgccgcagcctcttcgttccgagtcgtctccctccgccacatgagcgcggacgcgggcgccgcgatggagaagatccgcgccgccgggctgctcaggacgcaggggcttatcgctgggcagtgggtggacgcctacgacggaaagaccattgaggtgcaaaatccagcaactggtgaggtcctggcaaacgtgtcctgtatgggcagcagagaaacatctgatgctattgcttctgctcacagtacattctattcttggagtaaattcactgcaagtgagaggagcaaggcactaagaaaatggtacgatctaattatttcacacaaggaagagcttgcacttctcatgacactggagcaggggaaacctatgaaagaagcccttggtgaggtcaattatggtgcaagtttcatagaatattttgcagaggaagcaaagcgtatatatggtgacatcattcccccaactttatctgatcgcagattgttggttttgaagcagcctgttggggtagttggagctattacaccatggaattttccattagcaatgataacccgcaaggttggaccagctttggcctgtggctgtactgttgttgtcaagccatcggagttcacacctctgacagcattagctgcagcagatcttgctcttcaagcgggaataccagcgggtgcattgaatgttgtgatgggtaatgctgctgagataggtgatgcgttgctgcagagtacacaggtcagaaagattacattcactggatcaacagctgttggcaaaaaactgatggctggatctgcaaatactgtgaaaaaggtctccttggaacttggtgggaatgcaccttgcattgttttcgatgatgcggacattgatgttgctgttaaaggcagtcttgctgccaagttccgtaacagtggacagacatgtgtttgtgcaaacaggatattggtgcaagaaggtatctacgaaaagtttgcaaaagcattcatccaggctgttcagagtttgaaggtcggtaacggtctagaagagagtacatctcagggtcctctgattaacgaagctgctgttcaaaaggtggagaagttcataaatgacgcaacttcaaagggagcaaatgtcatgctaggtggtaaaagacacagcctgggaatgtcattttatgagccaactgtagtagggaatgtcagcaacgatatgcttcttttcagagaagaagtttttggtccagttgcaccccttataccgttcaaaactgaggaagaagcagtccatatggccaacgatacaaacacaggcttagctgcatacatttttaccaagagcatacctcgttcttggcgtgtatctgaatctcttgagtacggcttagttggggtaaacgaggggattatttcaacggaggtggcgccatttggcggagtaaagcagtctggtctagggagagaaggatcgaagtacggcattgacgagtacttggagctcaagtacatctgcatgggcaacttgggttgagtcctgaagtcggcctctagctcgaaacactcggcagatgatgaacggagaaaccaggcgtgcttagaagggcgtgagttgcgtttagctgcaagatcggtcatgatggctgtgggagagcagttttagaataaatcgaataagccgcggagcattaaataaaagaagtggaaatgagatgt

SEQ ID NO: 7460 - protein, 527 aa, Zea mays subsp. mays
  peptide (1)..(527): Ceres Seq. ID no. 12372601
  misc_feature (3)..(526): Homolog of NCBI NO: 15219379 NR Description: succinic semialdehyde dehydrogenase (gabD), protein id: At1g79440.1, supported by cDNA: gi_15810164, by cDNA: gi_16226914, supported by cDNA: gi_6684441 [Arabidopsis
  misc_feature (38)..(526): Homolog of NCBI NO: 25284177 NR Description: hypothetical protein T8K14.14 [imported] - thaliana >gi|4835765|gb|AAD30232.1|AC007202_14 Is a member of the
  misc_feature (46)..(526): Homolog of NCBI NO: 23014760 NR Description: hypothetical protein [Magnetospirillum
  misc_feature (51)..(524): Homolog of NCBI NO: 23106028 NR Description: hypothetical protein [Azotobacter vinelandii]
  misc_feature (51)..(526): Homolog of NCBI NO: 27479656 NR Description: Orf17 [Photorhabdus luminescens]
  misc_feature (20)..(526): Homolog of NCBI NO: 23105708 NR Description: hypothetical protein [Azotobacter vinelandii]
  misc_feature (46)..(526): Homolog of NCBI NO: 23054134 NR Description: hypothetical protein [Geobacter metallireducens]
  misc_feature (43)..(522): Homolog of NCBI NO: 17223783 NR Description: AttK [Agrobacterium tumefaciens]
  misc_feature (42)..(522): Homolog of NCBI NO: 16119363 NR Description: AGR_pAT_197p [Agrobacterium tumefaciens]
  misc_feature (43)..(522): Homolog of NCBI NO: 17938723 NR Description: NAD-dependent succinate aldehyde dehydrogenases
MAMAMMAMRRAVALGARHIPAAAASSFRVVSLRHMSADAGAAMEKIRAAGLLRTQGLIAGQWVDAYDGKTIEVQNPATGEVLANVSCMGSRETSDAIASAHSTFYSWSKFTASERSKALRKWYDLIISHKEELALLMTLEQGKPMKEALGEVNYGASFIEYFAEEAKRIYGDIIPPTLSDRRLLVLKQPVGVVGAITPWNFPLAMITRKVGPALACGCTVVVKPSEFTPLTALAAADLALQAGIPAGALNVVMGNAAEIGDALLQSTQVRKITFTGSTAVGKKLMAGSANTVKKVSLELGGNAPCIVFDDADIDVAVKGSLAAKFRNSGQTCVCANRILVQEGIYEKFAKAFIQAVQSLKVGNGLEESTSQGPLINEAAVQKVEKFINDATSKGANVMLGGKRHSLGMSFYEPTVVGNVSNDMLLFREEVFGPVAPLIPFKTEEEAVHMANDTNTGLAAYIFTKSIPRSWRVSESLEYGLVGVNEGIISTEVAPFGGVKQSGLGREGSKYGIDEYLELKYICMGNLG

SEQ ID NO: 7461 - protein, 525 aa, Zea mays subsp. mays
  peptide (1)..(525): Ceres Seq. ID no. 12372602
  misc_feature (49)..(524): Homolog of NCBI NO: 27479656 NR Description: Orf17 [Photorhabdus luminescens]
  misc_feature (18)..(524): Homolog of NCBI NO: 23105708 NR Description: hypothetical protein [Azotobacter vinelandii]
  misc_feature (44)..(524): Homolog of NCBI NO: 23054134 NR Description: hypothetical protein [Geobacter metallireducens]
  misc_feature (41)..(520): Homolog of NCBI NO: 17223783 NR Description: AttK [Agrobacterium tumefaciens]
  misc_feature (40)..(520): Homolog of NCBI NO: 16119363 NR Description: AGR_pAT_197p [Agrobacterium tumefaciens]
  misc_feature (41)..(520): Homolog of NCBI NO: 17938723 NR Description: NAD-dependent succinate aldehyde dehydrogenases
  misc_feature (1)..(524): Homolog of NCBI NO: 15219379 NR Description: succinic semialdehyde dehydrogenase (gabD), protein id: At1g79440.1, supported by cDNA: gi_15810164, by cDNA: gi_16226914, supported by cDNA: gi_6684441 [Arabidopsis
  misc_feature (36)..(524): Homolog of NCBI NO: 25284177 NR Description: hypothetical protein T8K14.14 [imported] - thaliana >gi|4835765|gb|AAD30232.1|AC007202_14 Is a member of the
  misc_feature (44)..(524): Homolog of NCBI NO: 23014760 NR Description: hypothetical protein [Magnetospirillum
  misc_feature (49)..(522): Homolog of NCBI NO: 23106028 NR Description: hypothetical protein [Azotobacter vinelandii]
MAMMAMRRAVALGARHIPAAAASSFRVVSLRHMSADAGAAMEKIRAAGLLRTQGLIAGQWVDAYDGKTIEVQNPATGEVLANVSCMGSRETSDAIASAHSTFYSWSKFTASERSKALRKWYDLIISHKEELALLMTLEQGKPMKEALGEVNYGASFIEYFAEEAKRIYGDIIPPTLSDRRLLVLKQPVGVVGAITPWNFPLAMITRKVGPALACGCTVVVKPSEFTPLTALAAADLALQAGIPAGALNVVMGNAAEIGDALLQSTQVRKITFTGSTAVGKKLMAGSANTVKKVSLELGGNAPCIVFDDADIDVAVKGSLAAKFRNSGQTCVCANRILVQEGIYEKFAKAFIQAVQSLKVGNGLEESTSQGPLINEAAVQKVEKFINDATSKGANVMLGGKRHSLGMSFYEPTVVGNVSNDMLLFREEVFGPVAPLIPFKTEEEAVHMANDTNTGLAAYIFTKSIPRSWRVSESLEYGLVGVNEGIISTEVAPFGGVKQSGLGREGSKYGIDEYLELKYICMGNLG

SEQ ID NO: 7462 - protein, 523 aa, Zea mays subsp. mays
  peptide (1)..(523): Ceres Seq. ID no. 12372603
  misc_feature (1)..(522): Homolog of NCBI NO: 15219379 NR Description: succinic semialdehyde dehydrogenase (gabD), protein id: At1g79440.1, supported by cDNA: gi_15810164, by cDNA: gi_16226914, supported by cDNA: gi_6684441 [Arabidopsis
  misc_feature (34)..(522): Homolog of NCBI NO: 25284177 NR Description: hypothetical protein T8K14.14 [imported] - thaliana >gi|4835765|gb|AAD30232.1|AC007202_14 Is a member of the
  misc_feature (42)..(522): Homolog of NCBI NO: 23014760 NR Description: hypothetical protein [Magnetospirillum
  misc_feature (47)..(520): Homolog of NCBI NO: 23106028 NR Description: hypothetical protein [Azotobacter vinelandii]
  misc_feature (47)..(522): Homolog of NCBI NO: 27479656 NR Description: Orf17 [Photorhabdus luminescens]
  misc_feature (16)..(522): Homolog of NCBI NO: 23105708 NR Description: hypothetical protein [Azotobacter vinelandii]
  misc_feature (42)..(522): Homolog of NCBI NO: 23054134 NR Description: hypothetical protein [Geobacter metallireducens]
  misc_feature (39)..(518): Homolog of NCBI NO: 17223783 NR Description: AttK [Agrobacterium tumefaciens]
  misc_feature (38)..(518): Homolog of NCBI NO: 16119363 NR Description: AGR_pAT_197p [Agrobacterium tumefaciens]
  misc_feature (39)..(518): Homolog of NCBI NO: 17938723 NR Description: NAD-dependent succinate aldehyde dehydrogenases
MMAMRRAVALGARHIPAAAASSFRVVSLRHMSADAGAAMEKIRAAGLLRTQGLIAGQWVDAYDGKTIEVQNPATGEVLANVSCMGSRETSDAIASAHSTFYSWSKFTASERSKALRKWYDLIISHKEELALLMTLEQGKPMKEALGEVNYGASFIEYFAEEAKRIYGDIIPPTLSDRRLLVLKQPVGVVGAITPWNFPLAMITRKVGPALACGCTVVVKPSEFTPLTALAAADLALQAGIPAGALNVVMGNAAEIGDALLQSTQVRKITFTGSTAVGKKLMAGSANTVKKVSLELGGNAPCIVFDDADIDVAVKGSLAAKFRNSGQTCVCANRILVQEGIYEKFAKAFIQAVQSLKVGNGLEESTSQGPLINEAAVQKVEKFINDATSKGANVMLGGKRHSLGMSFYEPTVVGNVSNDMLLFREEVFGPVAPLIPFKTEEEAVHMANDTNTGLAAYIFTKSIPRSWRVSESLEYGLVGVNEGIISTEVAPFGGVKQSGLGREGSKYGIDEYLELKYICMGNLG

SEQ ID NO: 7463 - DNA, 1185 bp, Zea mays subsp. mays
  misc_feature (1)..(1185): Ceres Seq. ID no. 12408784
  misc_feature: MA Experiment ID: 108527 Result: Up-regulated in Transcription
  misc_feature: MA Experiment 108527 PARAMETER Experiment Name: Zm_5mM_NO_P Parameter: Age (day) Value: 8
  misc_feature: MA Experiment 108527 PARAMETER Experiment Name: Zm_5mM_NO_P Parameter: Organism Value: Zea mays
  misc_feature: MA Experiment 108527 PARAMETER Experiment Name: Zm_5mM_NO_P Parameter: Plant Line Value: 35A19
  misc_feature: MA Experiment 108527 PARAMETER Experiment Name: Zm_5mM_NO_P Parameter: Timepoint (hr) Value: 6
  misc_feature: MA Experiment 108527 PARAMETER Experiment Name: Zm_5mM_NO_P Parameter: Tissue Value: Aerial
  misc_feature: MA Experiment 108527 PARAMETER Experiment Name: Zm_5mM_NO_P Parameter: Treatment Value: 5mM NO vs. No Treatment
  misc_feature: MA Experiment ID: 108543 Result: Down-regulated in Transcription
  misc_feature: MA Experiment ID: 108559 Result: Up-regulated in Transcription
  misc_feature: MA Experiment 108559 PARAMETER Experiment Name: Zm_5mM_NO_P Parameter: Age (day) Value: 8
  misc_feature: MA Experiment 108559 PARAMETER Experiment Name: Zm_5mM_NO_P Parameter: Organism Value: Zea mays
  misc_feature: MA Experiment 108559 PARAMETER Experiment Name: Zm_5mM_NO_P Parameter: Plant Line Value: 35A19
  misc_feature: MA Experiment 108559 PARAMETER Experiment Name: Zm_5mM_NO_P Parameter: Timepoint (hr) Value: 12
  misc_feature: MA Experiment 108559 PARAMETER Experiment Name: Zm_5mM_NO_P Parameter: Tissue Value: Aerial
  misc_feature: MA Experiment 108559 PARAMETER Experiment Name: Zm_5mM_NO_P Parameter: Treatment Value: 5mM NO vs. No Treatment
  misc_feature: MA Experiment ID: 20000108 Result: Down-regulated in Transcription
  misc_feature: MA Experiment 20000108 PARAMETER Experiment Name: Zm_Root-Tips_P Parameter: Age (day) Value: 12
  misc_feature: MA Experiment 20000108 PARAMETER Experiment Name: Zm_Root-Tips_P Parameter: Organism Value: Zea mays
  misc_feature: MA Experiment 20000108 PARAMETER Experiment Name: Zm_Root-Tips_P Parameter: Tissue Value: Root tips vs. Root mid region    35
  misc_feature: MA Experiment 20000108 PARAMETER Experiment Name: Zm_Root-Tips_P Parameter: Tissue Value: Root tips vs. Root mid region   Sequence Listing-Misc Features (4)
aaaccagtcaccgcctaccaccgttttataatccacccctcccactccccctgttttttcttcttccgctgttctactccggcgtgttggtcgacggcggcgcagatgacgaccctcgatctgatgggagggtacgggcgggtggacgagcaggtggccatccaggaggccgccacggcgggggctgcgcgggatggagcgtctcatcttgcagctctcccaggctggcaccggggagcggtcgtcgtccccaccggcggtacaggcgcagcgccagcagcagaagcagctggagcagatccagcagcaggttgactgccgggagctcacggacatgacggtgtccaagttcaagaaggtgatctccatcctgaaccgcacggggcacgcgcggttccggcgtggccccgtggcggcgcggtcgcagtcgcagtcgcagggacctgcctcccccgagcccgcgcaatcggcgccggctcccgccgcgaggcccctgacgctggacttcaccaagtcggtgtccggttacagcagggactccgggttcagcgtgtccggcgcgagctcgtcgttcctgtcgtcggtgacgaccggggacgggagcgtgtcgaacgggcgcgcgggaggctcgtcgttcctcatgctcccaccggcgcccggcgcggccagctgcgcgaagccgccgcccgccggtgcggcgcagaagcgcaagtgccacgaccacgcgcactcggagaacgtcgccggcggcaagtacggtgctaacggcgggcgctgccactgctcgaagcgcaggaagcaccgtgtgaagcgcacgatccgcgtgccggcgatcagccccaaagtggcggacatccccgccgacgagtactcgtggcgcaagtacggccagaaacccatcaaggggtcgccctacccacgcggctactacaagtgcagcacggtgcgcggctgccccgcccggaagcatgtggagcgcgaccccgccgacccgtcgatgctgatcgtcacctacgagggcgagcaccgccacagccccgcctccggccaggacccgccgccgccgtcgctcgcgccgctgccggagctgcccagccattgatttggcttcctgcctgctctgtcctgtcaattactagtagctgttgtcataagttataaaatcaaaatcgccagttcagtttt

SEQ ID NO: 7464 - protein, 302 aa, Zea mays subsp. mays
  peptide (1)..(302): Ceres Seq. ID no. 12408785
  misc_feature (222)..(282): Pfam Name: WRKY DNA -binding domain Pfam Description: WRKY DNA -binding domain
  misc_feature (1)..(296): Homolog of NCBI NO: 38568048 NR Description: OSJNBa0065J03.18 [Oryza sativa (japonica
  misc_feature (1)..(299): Homolog of NCBI NO: 4894963 NR Description: DNA-binding protein WRKY3 [Avena sativa]
  misc_feature (37)..(296): Homolog of NCBI NO: 18400580 NR Description: WRKY family transcription factor; protein id: supported by cDNA: gi_15991743 [Arabidopsis thaliana] WRKY transcription factor 17 [Arabidopsis thaliana]
  misc_feature (37)..(292): Homolog of NCBI NO: 25348152 NR Description: probable WRKY-type DNA binding protein [imported]
  misc_feature (91)..(287): Homolog of NCBI NO: 30689072 NR Description: WRKY family transcription factor [Arabidopsis
  misc_feature (34)..(102): Homolog of NCBI NO: 30689072 NR Description: WRKY family transcription factor [Arabidopsis
  misc_feature (91)..(287): Homolog of NCBI NO: 22329054 NR Description: WRKY family transcription factor; protein id: supported by cDNA: gi_15384214 [Arabidopsis thaliana]
  misc_feature (34)..(102): Homolog of NCBI NO: 22329054 NR Description: WRKY family transcription factor; protein id: supported by cDNA: gi_15384214 [Arabidopsis thaliana]
  misc_feature (91)..(287): Homolog of NCBI NO: 16604573 NR Description: putative putaive DNA-binding protein [Arabidopsis
  misc_feature (34)..(102): Homolog of NCBI NO: 16604573 NR Description: putative putaive DNA-binding protein [Arabidopsis
MERLILQLSQAGTGERSSSPPAVQAQRQQQKQLEQIQQQVDCRELTDMTVSKFKKVISILNRTGHARFRRGPVAARSQSQSQGPASPEPAQSAPAPAARPLTLDFTKSVSGYSRDSGFSVSGASSSFLSSVTTGDGSVSNGRAGGSSFLMLPPAPGAASCAKPPPAGAAQKRKCHDHAHSENVAGGKYGANGGRCHCSKRRKHRVKRTIRVPAISPKVADIPADEYSWRKYGQKPIKGSPYPRGYYKCSTVRGCPARKHVERDPADPSMLIVTYEGEHRHSPASGQDPPPPSLAPLPELPSH

SEQ ID NO: 7465 - protein, 255 aa, Zea mays subsp. mays
  peptide (1)..(255): Ceres Seq. ID no. 12408786
  misc_feature (175)..(235): Pfam Name: WRKY DNA -binding domain Pfam Description: WRKY DNA -binding domain
  misc_feature (1)..(249): Homolog of NCBI NO: 38568048 NR Description: OSJNBa0065J03.18 [Oryza sativa (japonica
  misc_feature (1)..(252): Homolog of NCBI NO: 4894963 NR Description: DNA-binding protein WRKY3 [Avena sativa]
  misc_feature (1)..(249): Homolog of NCBI NO: 18400580 NR Description: WRKY family transcription factor; protein id: supported by cDNA: gi_15991743 [Arabidopsis thaliana] WRKY transcription factor 17 [Arabidopsis thaliana]
  misc_feature (1)..(245): Homolog of NCBI NO: 25348152 NR Description: probable WRKY-type DNA binding protein [imported]
  misc_feature (44)..(240): Homolog of NCBI NO: 30689072 NR Description: WRKY family transcription factor [Arabidopsis
  misc_feature (1)..(55): Homolog of NCBI NO: 30689072 NR Description: WRKY family transcription factor [Arabidopsis
  misc_feature (44)..(240): Homolog of NCBI NO: 22329054 NR Description: WRKY family transcription factor; protein id: supported by cDNA: gi_15384214 [Arabidopsis thaliana]
  misc_feature (1)..(55): Homolog of NCBI NO: 22329054 NR Description: WRKY family transcription factor; protein id: supported by cDNA: gi_15384214 [Arabidopsis thaliana]
  misc_feature (44)..(240): Homolog of NCBI NO: 16604573 NR Description: putative putaive DNA-binding protein [Arabidopsis
  misc_feature (1)..(55): Homolog of NCBI NO: 16604573 NR Description: putative putaive DNA-binding protein [Arabidopsis
MTVSKFKKVISILNRTGHARFRRGPVAARSQSQSQGPASPEPAQSAPAPAARPLTLDFTKSVSGYSRDSGFSVSGASSSFLSSVTTGDGSVSNGRAGGSSFLMLPPAPGAASCAKPPPAGAAQKRKCHDHAHSENVAGGKYGANGGRCHCSKRRKHRVKRTIRVPAISPKVADIPADEYSWRKYGQKPIKGSPYPRGYYKCSTVRGCPARKHVERDPADPSMLIVTYEGEHRHSPASGQDPPPPSLAPLPELPSH

SEQ ID NO: 7466 - protein, 153 aa, Zea mays subsp. mays
  peptide (1)..(153): Ceres Seq. ID no. 12408787
  misc_feature (73)..(133): Pfam Name: WRKY DNA -binding domain Pfam Description: WRKY DNA -binding domain
  misc_feature (1)..(147): Homolog of NCBI NO: 38568048 NR Description: OSJNBa0065J03.18 [Oryza sativa (japonica
  misc_feature (1)..(150): Homolog of NCBI NO: 4894963 NR Description: DNA-binding protein WRKY3 [Avena sativa]
  misc_feature (1)..(147): Homolog of NCBI NO: 18400580 NR Description: WRKY family transcription factor; protein id: supported by cDNA: gi_15991743 [Arabidopsis thaliana] WRKY transcription factor 17 [Arabidopsis thaliana]
  misc_feature (1)..(143): Homolog of NCBI NO: 25348152 NR Description: probable WRKY-type DNA binding protein [imported]
  misc_feature (1)..(138): Homolog of NCBI NO: 30689072 NR Description: WRKY family transcription factor [Arabidopsis
  misc_feature (1)..(138): Homolog of NCBI NO: 22329054 NR Description: WRKY family transcription factor; protein id: supported by cDNA: gi_15384214 [Arabidopsis thaliana]
  misc_feature (1)..(138): Homolog of NCBI NO: 16604573 NR Description: putative putaive DNA-binding protein [Arabidopsis
  misc_feature (1)..(138): Homolog of NCBI NO: 21537078 NR Description: putaive DNA-binding protein [Arabidopsis thaliana]
  misc_feature (1)..(142): Homolog of NCBI NO: 38175580 NR Description: putative DNA-binding protein NtWRKY3 [Oryza
  misc_feature (1)..(151): Homolog of NCBI NO: 38346908 NR Description: OSJNBb0015N08.8 [Oryza sativa (japonica
MLPPAPGAASCAKPPPAGAAQKRKCHDHAHSENVAGGKYGANGGRCHCSKRRKHRVKRTIRVPAISPKVADIPADEYSWRKYGQKPIKGSPYPRGYYKCSTVRGCPARKHVERDPADPSMLIVTYEGEHRHSPASGQDPPPPSLAPLPELPSH

SEQ ID NO: 7467 - DNA, 1818 bp, Zea mays subsp. mays
  misc_feature (1)..(1818): Ceres Seq. ID no. 12406318
  misc_feature: MA Experiment ID: 108535 Result: Down-regulated in Transcription
  misc_feature: MA Experiment 108535 PARAMETER Experiment Name: Zm_Meristem_P Parameter: Age (day) Value: 8
  misc_feature: MA Experiment 108535 PARAMETER Experiment Name: Zm_Meristem_P Parameter: Organism Value: Zea mays
  misc_feature: MA Experiment 108535 PARAMETER Experiment Name: Zm_Meristem_P Parameter: Plant Line Value: 35A19
  misc_feature: MA Experiment 108535 PARAMETER Experiment Name: Zm_Meristem_P Parameter: Tissue Value: Root Meristem vs. Above Root Meristem
  misc_feature: MA Experiment ID: 108536 Result: Down-regulated in Transcription
  misc_feature: MA Experiment 108536 PARAMETER Experiment Name: Zm_Meristem_P Parameter: Age (day) Value: 8
  misc_feature: MA Experiment 108536 PARAMETER Experiment Name: Zm_Meristem_P Parameter: Organism Value: Zea mays
  misc_feature: MA Experiment 108536 PARAMETER Experiment Name: Zm_Meristem_P Parameter: Plant Line Value: 35A19
  misc_feature: MA Experiment 108536 PARAMETER Experiment Name: Zm_Meristem_P Parameter: Tissue Value: Shoot Meristem vs. Above Shoot Meristem
  misc_feature: MA Experiment ID: 108543 Result: Up-regulated in Transcription
  misc_feature: MA Experiment ID: 108687 Result: Down-regulated in Transcription
  misc_feature: MA Experiment 108687 PARAMETER Experiment Name: Zm_Embryos-Flowers__P Parameter: Tissue Value: Embryo vs. Aerial+
  misc_feature: MA Experiment ID: 108688 Result: Down-regulated in Transcription
  misc_feature: MA Experiment 108688 PARAMETER Experiment Name: Zm_Embryos-Flowers__P Parameter: Tissue Value: Immature Flowers vs. Aerial+
  misc_feature: MA Experiment ID: 20000108 Result: Down-regulated in Transcription
  misc_feature: MA Experiment 20000108 PARAMETER Experiment Name: Zm_Root-Tips_P Parameter: Age (day) Value: 12
  misc_feature: MA Experiment 20000108 PARAMETER Experiment Name: Zm_Root-Tips_P Parameter: Organism Value: Zea mays
  misc_feature: MA Experiment 20000108 PARAMETER Experiment Name: Zm_Root-Tips_P Parameter: Tissue Value: Root tips vs. Root mid region    35
  misc_feature: MA Experiment 20000108 PARAMETER Experiment Name: Zm_Root-Tips_P Parameter: Tissue Value: Root tips vs. Root mid region   Sequence Listing-Misc Features (4)
  misc_feature: MA Experiment ID: 20000492 Result: Down-regulated in Transcription
  misc_feature: MA Experiment 20000492 PARAMETER Experiment Name: Zm_Hybrid_Seed_Dev_P Parameter: DAP Value: 12
  misc_feature: MA Experiment 20000492 PARAMETER Experiment Name: Zm_Hybrid_Seed_Dev_P Parameter: Organism Value: Zea mays
  misc_feature: MA Experiment 20000492 PARAMETER Experiment Name: Zm_Hybrid_Seed_Dev_P Parameter: Plant Line Value: 35A19
  misc_feature: MA Experiment 20000492 PARAMETER Experiment Name: Zm_Hybrid_Seed_Dev_P Parameter: Tissue Value: Fert Kernel vs. Unfert Floret
  misc_feature: MA Experiment ID: 20000535 Result: Down-regulated in Transcription
  misc_feature: MA Experiment 20000535 PARAMETER Experiment Name: Zm_Hybrid_Seed_Dev_P Parameter: DAP Value: 30 vs. 12
  misc_feature: MA Experiment 20000535 PARAMETER Experiment Name: Zm_Hybrid_Seed_Dev_P Parameter: Organism Value: Zea mays
  misc_feature: MA Experiment 20000535 PARAMETER Experiment Name: Zm_Hybrid_Seed_Dev_P Parameter: Plant Line Value: 35A19
  misc_feature: MA Experiment 20000535 PARAMETER Experiment Name: Zm_Hybrid_Seed_Dev_P Parameter: Tissue Value: Embryo vs. Unfert Floret
gcacgagaccattacctagaacatcctaatcaaaactctctctctctcattcatctcgcctttctttcttaccggccggccggccggcggctgggctctgcaattcacccaacttttctctgttttcactacgatctcagggctccggcgaccgtgcggcctcatcatcagctacaacctaccagctgctaccgtctcggtcgccgcctagctctccgcagcggctagctcatccggccggccgccccttttctcttgccgttgcgcagttgcgcccccttccccgcggcttaggaaccatcgaaaagacgcctcaccatctcctttgtgtccttgctaactaactcccccattaaatcctctccttcctcccgcgctggccgtgtggtctctcagccctccgagttgatccataagctagcgccatcatcgatcgccatatatacatagccaaggacgcacgcgcgcgcgcgcgcaaaccagcgggagcgaacaccaaccggccggaccaattaagaagcaggctagcaagtcgaagaggaaagaagagaaggggggtaccgggggtaccggccggtcatcgatcgagcttggcgaagcagcgaccgccgggtcgtcgtcgtcggtacatgcatgcagcgcggcggtgatcaagcaggagcgagcctgggcatggagatgggggtggggtacgccggcggcggcggcggcggcgagtgctcgtcgtcctcggcggctgccgcggccgcggccgcggcggagggggaggagcggcagctgctcaagggggagatcgcggtgcacccgctgtgcgagcagctagtggcggcgcacgtggggtgcctgcgcgtggccacgcccatcgaccacctccccctcatcgacgcccagctcgcgcagtccagcggcctcctccactcctacgccgcccaccaccgccccttcctctccccgcacgacaagcacgacctcgactcgttcctcgcgcagtacctgatgctgctgtgctcgttccgggagcagctgcagcagcacgtccgggtgcacgccgtggaggccgtcatggcgtgccgcgagatcgagcagtccctgcaggacctaaccggggcgacacttgaggaagggacgggggcgaccatgtcagaggacgaggacgaggcgccgatgctggaggtgggcctggatatgggctccgacgggcacgacatgatgggcttcggcccgctcatgcccaccgactcggagcgctcgctcatggagagggtcaggcaggagctcaagatggagctcaagcagggtttcaagtcgagaatagaggatgtgcgggaggagatcctgaggaaaaggagggccgggaagctgcctggggacaccaccagcatcctcaagcaatggtggcaggagcactccaagtggccataccccacggaagacgataaggctaagctcgtcgaagagaccggcctgcagctgaagcaaatcaacaactggttcatcaaccagaggaagaggaactggcacaacaactcccagacgtcaaccctcaaatcgaagcgtaaaaggtgatggaggagagctagctgcaccgtatataccgtgtatgtaacgcacacctgctgacacacatgtacacatgtataccataccaacacgctaatcaaacggagctctgcatggcgactgtactcacggaaataaagaggaccatatcgaccggttcaactgtatatctagccattagtctgaccactggcatatttgtttgctgcggctgatactttgagctgatgatgtgtggctcacagcatactttattcc

SEQ ID NO: 7468 - protein, 310 aa, Zea mays subsp. mays
  peptide (1)..(310): Ceres Seq. ID no. 12406319
  misc_feature (103)..(158): Pfam Name: KNOX2 domain Pfam Description: KNOX2 domain
  misc_feature (7)..(310): Homolog of NCBI NO: 14149141 NR Description: KNOX family class 2 homeodomain protein [Oryza
  misc_feature (7)..(310): Homolog of NCBI NO: 4098246 NR Description: homeobox 2 protein [Lycopersicon esculentum]
  misc_feature (32)..(309): Homolog of NCBI NO: 21618231 NR Description: homeodomain-containing protein HD1, putative
  misc_feature (10)..(309): Homolog of NCBI NO: 18407708 NR Description: homeodomain-containing protein HD1, putative; id: At1g62990.1, supported by cDNA: 106887., supported by cDNA: [Arabidopsis thaliana] >gi|11878230|gb|AAG40858.1|AF308451_1
  misc_feature (41)..(309): Homolog of NCBI NO: 25386223 NR Description: hypothetical protein F16P17.16 [imported] - thaliana >gi|8493589|gb|AAF75812.1|AC011000_15 Strong similarity Homeobox Protein HD1 from Brassica napus gi|1170191, and contains
  misc_feature (41)..(309): Homolog of NCBI NO: 26451690 NR Description: putative homeodomain transcription factor KNAT6
  misc_feature (10)..(309): Homolog of NCBI NO: 1170191 NR Description: Homeobox protein HD1 >gi|1076449|pir||S47535
  misc_feature (118)..(310): Homolog of NCBI NO: 4887620 NR Description: homeobox gene [Oryza sativa (japonica
  misc_feature (1)..(310): Homolog of NCBI NO: 3023961 NR Description: Homeobox protein knotted-1 like 3 (KNAP3)
  misc_feature (1)..(310): Homolog of NCBI NO: 7446253 NR Description: probable homeobox protein OSH45, splice form OSH44
MQRGGDQAGASLGMEMGVGYAGGGGGGECSSSSAAAAAAAAAEGEERQLLKGEIAVHPLCEQLVAAHVGCLRVATPIDHLPLIDAQLAQSSGLLHSYAAHHRPFLSPHDKHDLDSFLAQYLMLLCSFREQLQQHVRVHAVEAVMACREIEQSLQDLTGATLEEGTGATMSEDEDEAPMLEVGLDMGSDGHDMMGFGPLMPTDSERSLMERVRQELKMELKQGFKSRIEDVREEILRKRRAGKLPGDTTSILKQWWQEHSKWPYPTEDDKAKLVEETGLQLKQINNWFINQRKRNWHNNSQTSTLKSKRKR

SEQ ID NO: 7469 - protein, 297 aa, Zea mays subsp. mays
  peptide (1)..(297): Ceres Seq. ID no. 12406320
  misc_feature (90)..(145): Pfam Name: KNOX2 domain Pfam Description: KNOX2 domain
  misc_feature (1)..(297): Homolog of NCBI NO: 14149141 NR Description: KNOX family class 2 homeodomain protein [Oryza
  misc_feature (1)..(297): Homolog of NCBI NO: 4098246 NR Description: homeobox 2 protein [Lycopersicon esculentum]
  misc_feature (19)..(296): Homolog of NCBI NO: 21618231 NR Description: homeodomain-containing protein HD1, putative
  misc_feature (1)..(296): Homolog of NCBI NO: 18407708 NR Description: homeodomain-containing protein HD1, putative; id: At1g62990.1, supported by cDNA: 106887., supported by cDNA: [Arabidopsis thaliana] >gi|11878230|gb|AAG40858.1|AF308451_1
  misc_feature (28)..(296): Homolog of NCBI NO: 25386223 NR Description: hypothetical protein F16P17.16 [imported] - thaliana >gi|8493589|gb|AAF75812.1|AC011000_15 Strong similarity Homeobox Protein HD1 from Brassica napus gi|1170191, and contains
  misc_feature (28)..(296): Homolog of NCBI NO: 26451690 NR Description: putative homeodomain transcription factor KNAT6
  misc_feature (1)..(296): Homolog of NCBI NO: 1170191 NR Description: Homeobox protein HD1 >gi|1076449|pir||S47535
  misc_feature (105)..(297): Homolog of NCBI NO: 4887620 NR Description: homeobox gene [Oryza sativa (japonica
  misc_feature (1)..(297): Homolog of NCBI NO: 3023961 NR Description: Homeobox protein knotted-1 like 3 (KNAP3)
  misc_feature (1)..(297): Homolog of NCBI NO: 7446253 NR Description: probable homeobox protein OSH45, splice form OSH44
MEMGVGYAGGGGGGECSSSSAAAAAAAAAEGEERQLLKGEIAVHPLCEQLVAAHVGCLRVATPIDHLPLIDAQLAQSSGLLHSYAAHHRPFLSPHDKHDLDSFLAQYLMLLCSFREQLQQHVRVHAVEAVMACREIEQSLQDLTGATLEEGTGATMSEDEDEAPMLEVGLDMGSDGHDMMGFGPLMPTDSERSLMERVRQELKMELKQGFKSRIEDVREEILRKRRAGKLPGDTTSILKQWWQEHSKWPYPTEDDKAKLVEETGLQLKQINNWFINQRKRNWHNNSQTSTLKSKRKR

SEQ ID NO: 7470 - protein, 295 aa, Zea mays subsp. mays
  peptide (1)..(295): Ceres Seq. ID no. 12406321
  misc_feature (88)..(143): Pfam Name: KNOX2 domain Pfam Description: KNOX2 domain
  misc_feature (1)..(295): Homolog of NCBI NO: 14149141 NR Description: KNOX family class 2 homeodomain protein [Oryza
  misc_feature (1)..(295): Homolog of NCBI NO: 4098246 NR Description: homeobox 2 protein [Lycopersicon esculentum]
  misc_feature (17)..(294): Homolog of NCBI NO: 21618231 NR Description: homeodomain-containing protein HD1, putative
  misc_feature (1)..(294): Homolog of NCBI NO: 18407708 NR Description: homeodomain-containing protein HD1, putative; id: At1g62990.1, supported by cDNA: 106887., supported by cDNA: [Arabidopsis thaliana] >gi|11878230|gb|AAG40858.1|AF308451_1
  misc_feature (26)..(294): Homolog of NCBI NO: 25386223 NR Description: hypothetical protein F16P17.16 [imported] - thaliana >gi|8493589|gb|AAF75812.1|AC011000_15 Strong similarity Homeobox Protein HD1 from Brassica napus gi|1170191, and contains
  misc_feature (26)..(294): Homolog of NCBI NO: 26451690 NR Description: putative homeodomain transcription factor KNAT6
  misc_feature (1)..(294): Homolog of NCBI NO: 1170191 NR Description: Homeobox protein HD1 >gi|1076449|pir||S47535
  misc_feature (103)..(295): Homolog of NCBI NO: 4887620 NR Description: homeobox gene [Oryza sativa (japonica
  misc_feature (1)..(295): Homolog of NCBI NO: 3023961 NR Description: Homeobox protein knotted-1 like 3 (KNAP3)
  misc_feature (1)..(295): Homolog of NCBI NO: 7446253 NR Description: probable homeobox protein OSH45, splice form OSH44
MGVGYAGGGGGGECSSSSAAAAAAAAAEGEERQLLKGEIAVHPLCEQLVAAHVGCLRVATPIDHLPLIDAQLAQSSGLLHSYAAHHRPFLSPHDKHDLDSFLAQYLMLLCSFREQLQQHVRVHAVEAVMACREIEQSLQDLTGATLEEGTGATMSEDEDEAPMLEVGLDMGSDGHDMMGFGPLMPTDSERSLMERVRQELKMELKQGFKSRIEDVREEILRKRRAGKLPGDTTSILKQWWQEHSKWPYPTEDDKAKLVEETGLQLKQINNWFINQRKRNWHNNSQTSTLKSKRKR

SEQ ID NO: 7471 - DNA, 1215 bp, Zea mays subsp. mays
  misc_feature (1)..(1215): Ceres Seq. ID no. 12406200
  misc_feature: MA Experiment ID: 108504 Result: Down-regulated in Transcription
  misc_feature: MA Experiment 108504 PARAMETER Experiment Name: Zm_Drought_P Parameter: Age (day) Value: 8
  misc_feature: MA Experiment 108504 PARAMETER Experiment Name: Zm_Drought_P Parameter: Organism Value: Zea mays
  misc_feature: MA Experiment 108504 PARAMETER Experiment Name: Zm_Drought_P Parameter: Plant Line Value: 35A19
  misc_feature: MA Experiment 108504 PARAMETER Experiment Name: Zm_Drought_P Parameter: Timepoint (hr) Value: 12
  misc_feature: MA Experiment 108504 PARAMETER Experiment Name: Zm_Drought_P Parameter: Tissue Value: Aerial
  misc_feature: MA Experiment 108504 PARAMETER Experiment Name: Zm_Drought_P Parameter: Treatment Value: Drought vs. No Drought
  misc_feature: MA Experiment ID: 108522 Result: Down-regulated in Transcription
  misc_feature: MA Experiment 108522 PARAMETER Experiment Name: Zm_42deg_Heat_P Parameter: Age (day) Value: 8
  misc_feature: MA Experiment 108522 PARAMETER Experiment Name: Zm_42deg_Heat_P Parameter: Organism Value: Zea mays
  misc_feature: MA Experiment 108522 PARAMETER Experiment Name: Zm_42deg_Heat_P Parameter: Plant Line Value: 35A19
  misc_feature: MA Experiment 108522 PARAMETER Experiment Name: Zm_42deg_Heat_P Parameter: Temperature (deg C) Value: 42 vs. 22
  misc_feature: MA Experiment 108522 PARAMETER Experiment Name: Zm_42deg_Heat_P Parameter: Timepoint (hr) Value: 1
  misc_feature: MA Experiment 108522 PARAMETER Experiment Name: Zm_42deg_Heat_P Parameter: Tissue Value: Aerial
  misc_feature: MA Experiment ID: 108527 Result: Down-regulated in Transcription
  misc_feature: MA Experiment 108527 PARAMETER Experiment Name: Zm_5mM_NO_P Parameter: Age (day) Value: 8
  misc_feature: MA Experiment 108527 PARAMETER Experiment Name: Zm_5mM_NO_P Parameter: Organism Value: Zea mays
  misc_feature: MA Experiment 108527 PARAMETER Experiment Name: Zm_5mM_NO_P Parameter: Plant Line Value: 35A19
  misc_feature: MA Experiment 108527 PARAMETER Experiment Name: Zm_5mM_NO_P Parameter: Timepoint (hr) Value: 6
  misc_feature: MA Experiment 108527 PARAMETER Experiment Name: Zm_5mM_NO_P Parameter: Tissue Value: Aerial
  misc_feature: MA Experiment 108527 PARAMETER Experiment Name: Zm_5mM_NO_P Parameter: Treatment Value: 5mM NO vs. No Treatment
  misc_feature: MA Experiment ID: 108528 Result: Down-regulated in Transcription
  misc_feature: MA Experiment 108528 PARAMETER Experiment Name: Zm_Imbibed_Seeds_P Parameter: Age (day) Value: 5 vs. 2
  misc_feature: MA Experiment 108528 PARAMETER Experiment Name: Zm_Imbibed_Seeds_P Parameter: Organism Value: Zea mays
  misc_feature: MA Experiment 108528 PARAMETER Experiment Name: Zm_Imbibed_Seeds_P Parameter: Plant Line Value: 35A19
  misc_feature: MA Experiment 108528 PARAMETER Experiment Name: Zm_Imbibed_Seeds_P Parameter: Tissue Value: Aerial vs. Embryo
  misc_feature: MA Experiment ID: 108530 Result: Down-regulated in Transcription
  misc_feature: MA Experiment 108530 PARAMETER Experiment Name: Zm_Imbibed_Seeds_P Parameter: Age (day) Value: 6 vs. 2
  misc_feature: MA Experiment 108530 PARAMETER Experiment Name: Zm_Imbibed_Seeds_P Parameter: Organism Value: Zea mays
  misc_feature: MA Experiment 108530 PARAMETER Experiment Name: Zm_Imbibed_Seeds_P Parameter: Plant Line Value: 35A19
  misc_feature: MA Experiment 108530 PARAMETER Experiment Name: Zm_Imbibed_Seeds_P Parameter: Tissue Value: Aerial vs. Embryo
  misc_feature: MA Experiment ID: 108535 Result: Down-regulated in Transcription
  misc_feature: MA Experiment 108535 PARAMETER Experiment Name: Zm_Meristem_P Parameter: Age (day) Value: 8
  misc_feature: MA Experiment 108535 PARAMETER Experiment Name: Zm_Meristem_P Parameter: Organism Value: Zea mays
  misc_feature: MA Experiment 108535 PARAMETER Experiment Name: Zm_Meristem_P Parameter: Plant Line Value: 35A19
  misc_feature: MA Experiment 108535 PARAMETER Experiment Name: Zm_Meristem_P Parameter: Tissue Value: Root Meristem vs. Above Root Meristem
  misc_feature: MA Experiment ID: 108543 Result: Up-regulated in Transcription
  misc_feature: MA Experiment ID: 108544 Result: Down-regulated in Transcription
  misc_feature: MA Experiment ID: 108545 Result: Down-regulated in Transcription
  misc_feature: MA Experiment 108545 PARAMETER Experiment Name: Zm_Imbibed_Seeds_P Parameter: Age (day) Value: 3 vs. 2
  misc_feature: MA Experiment 108545 PARAMETER Experiment Name: Zm_Imbibed_Seeds_P Parameter: Organism Value: Zea mays
  misc_feature: MA Experiment 108545 PARAMETER Experiment Name: Zm_Imbibed_Seeds_P Parameter: Plant Line Value: 35A19
  misc_feature: MA Experiment 108545 PARAMETER Experiment Name: Zm_Imbibed_Seeds_P Parameter: Tissue Value: Aerial vs. Embryo
  misc_feature: MA Experiment ID: 108547 Result: Down-regulated in Transcription
  misc_feature: MA Experiment 108547 PARAMETER Experiment Name: Zm_Imbibed_Seeds_P Parameter: Age (day) Value: 4 vs. 2
  misc_feature: MA Experiment 108547 PARAMETER Experiment Name: Zm_Imbibed_Seeds_P Parameter: Organism Value: Zea mays
  misc_feature: MA Experiment 108547 PARAMETER Experiment Name: Zm_Imbibed_Seeds_P Parameter: Plant Line Value: 35A19
  misc_feature: MA Experiment 108547 PARAMETER Experiment Name: Zm_Imbibed_Seeds_P Parameter: Tissue Value: Aerial vs. Embryo
  misc_feature: MA Experiment ID: 108556 Result: Down-regulated in Transcription
  misc_feature: MA Experiment 108556 PARAMETER Experiment Name: Zm_Drought_P Parameter: Age (day) Value: 9
  misc_feature: MA Experiment 108556 PARAMETER Experiment Name: Zm_Drought_P Parameter: Organism Value: Zea mays
  misc_feature: MA Experiment 108556 PARAMETER Experiment Name: Zm_Drought_P Parameter: Plant Line Value: 35A19
  misc_feature: MA Experiment 108556 PARAMETER Experiment Name: Zm_Drought_P Parameter: Timepoint (hr) Value: 24
  misc_feature: MA Experiment 108556 PARAMETER Experiment Name: Zm_Drought_P Parameter: Tissue Value: Aerial
  misc_feature: MA Experiment 108556 PARAMETER Experiment Name: Zm_Drought_P Parameter: Treatment Value: Drought vs. No Drought
  misc_feature: MA Experiment ID: 108559 Result: Down-regulated in Transcription
  misc_feature: MA Experiment 108559 PARAMETER Experiment Name: Zm_5mM_NO_P Parameter: Age (day) Value: 8
  misc_feature: MA Experiment 108559 PARAMETER Experiment Name: Zm_5mM_NO_P Parameter: Organism Value: Zea mays
  misc_feature: MA Experiment 108559 PARAMETER Experiment Name: Zm_5mM_NO_P Parameter: Plant Line Value: 35A19
  misc_feature: MA Experiment 108559 PARAMETER Experiment Name: Zm_5mM_NO_P Parameter: Timepoint (hr) Value: 12
  misc_feature: MA Experiment 108559 PARAMETER Experiment Name: Zm_5mM_NO_P Parameter: Tissue Value: Aerial
  misc_feature: MA Experiment 108559 PARAMETER Experiment Name: Zm_5mM_NO_P Parameter: Treatment Value: 5mM NO vs. No Treatment
  misc_feature: MA Experiment ID: 108597 Result: Down-regulated in Transcription
  misc_feature: MA Experiment 108597 PARAMETER Experiment Name: Zm_100uM_ABA_P Parameter: Age (day) Value: 9
  misc_feature: MA Experiment 108597 PARAMETER Experiment Name: Zm_100uM_ABA_P Parameter: Organism Value: Zea mays
  misc_feature: MA Experiment 108597 PARAMETER Experiment Name: Zm_100uM_ABA_P Parameter: Plant Line Value: 35A19
  misc_feature: MA Experiment 108597 PARAMETER Experiment Name: Zm_100uM_ABA_P Parameter: Timepoint (hr) Value: 24
  misc_feature: MA Experiment 108597 PARAMETER Experiment Name: Zm_100uM_ABA_P Parameter: Tissue Value: Aerial
  misc_feature: MA Experiment 108597 PARAMETER Experiment Name: Zm_100uM_ABA_P Parameter: Treatment Value: 100uM ABA vs. No Treatment
  misc_feature: MA Experiment ID: 20000477 Result: Down-regulated in Transcription
  misc_feature: MA Experiment 20000477 PARAMETER Experiment Name: Zm_5mM_SA_P Parameter: Age (day) Value: 10
  misc_feature: MA Experiment 20000477 PARAMETER Experiment Name: Zm_5mM_SA_P Parameter: Organism Value: Zea mays
  misc_feature: MA Experiment 20000477 PARAMETER Experiment Name: Zm_5mM_SA_P Parameter: Plant Line Value: 35A19
  misc_feature: MA Experiment 20000477 PARAMETER Experiment Name: Zm_5mM_SA_P Parameter: Timepoint (hr) Value: 48
  misc_feature: MA Experiment 20000477 PARAMETER Experiment Name: Zm_5mM_SA_P Parameter: Tissue Value: Aerial
  misc_feature: MA Experiment 20000477 PARAMETER Experiment Name: Zm_5mM_SA_P Parameter: Treatment Value: 5mM SA vs. No Treatment
  misc_feature: MA Experiment ID: 20000478 Result: Down-regulated in Transcription
  misc_feature: MA Experiment 20000478 PARAMETER Experiment Name: Zm_5mM_SA_P Parameter: Age (day) Value: 11
  misc_feature: MA Experiment 20000478 PARAMETER Experiment Name: Zm_5mM_SA_P Parameter: Organism Value: Zea mays
  misc_feature: MA Experiment 20000478 PARAMETER Experiment Name: Zm_5mM_SA_P Parameter: Plant Line Value: 35A19
  misc_feature: MA Experiment 20000478 PARAMETER Experiment Name: Zm_5mM_SA_P Parameter: Timepoint (hr) Value: 72
  misc_feature: MA Experiment 20000478 PARAMETER Experiment Name: Zm_5mM_SA_P Parameter: Tissue Value: Aerial
  misc_feature: MA Experiment 20000478 PARAMETER Experiment Name: Zm_5mM_SA_P Parameter: Treatment Value: 5mM SA vs. No Treatment
  misc_feature: MA Experiment ID: 20000480 Result: Down-regulated in Transcription
  misc_feature: MA Experiment 20000480 PARAMETER Experiment Name: Zm_Drought_P Parameter: Age (day) Value: 11
  misc_feature: MA Experiment 20000480 PARAMETER Experiment Name: Zm_Drought_P Parameter: Organism Value: Zea mays
  misc_feature: MA Experiment 20000480 PARAMETER Experiment Name: Zm_Drought_P Parameter: Plant Line Value: 35A19
  misc_feature: MA Experiment 20000480 PARAMETER Experiment Name: Zm_Drought_P Parameter: Timepoint (hr) Value: 72
  misc_feature: MA Experiment 20000480 PARAMETER Experiment Name: Zm_Drought_P Parameter: Tissue Value: Aerial
  misc_feature: MA Experiment 20000480 PARAMETER Experiment Name: Zm_Drought_P Parameter: Treatment Value: Drought vs. No Drought
  misc_feature: MA Experiment ID: 20000535 Result: Up-regulated in Transcription
  misc_feature: MA Experiment 20000535 PARAMETER Experiment Name: Zm_Hybrid_Seed_Dev_P Parameter: DAP Value: 30 vs. 12
  misc_feature: MA Experiment 20000535 PARAMETER Experiment Name: Zm_Hybrid_Seed_Dev_P Parameter: Organism Value: Zea mays
  misc_feature: MA Experiment 20000535 PARAMETER Experiment Name: Zm_Hybrid_Seed_Dev_P Parameter: Plant Line Value: 35A19
  misc_feature: MA Experiment 20000535 PARAMETER Experiment Name: Zm_Hybrid_Seed_Dev_P Parameter: Tissue Value: Embryo vs. Unfert Floret
  misc_feature: MA Experiment ID: 20000629 Result: Up-regulated in Transcription
  misc_feature: MA Experiment 20000629 PARAMETER Experiment Name: Zm_Herbicide-Treatments_P Parameter: Timepoint (hr) Value: 12
  misc_feature: MA Experiment 20000629 PARAMETER Experiment Name: Zm_Herbicide-Treatments_P Parameter: Tissue Value: Aerial
  misc_feature: MA Experiment 20000629 PARAMETER Experiment Name: Zm_Herbicide-Treatments_P Parameter: Treatment Value: Trimec vs. No Treatment
  misc_feature: MA Experiment ID: 20000633 Result: Up-regulated in Transcription
  misc_feature: MA Experiment 20000633 PARAMETER Experiment Name: Zm_Herbicide-Treatments_P Parameter: Timepoint (hr) Value: 4
  misc_feature: MA Experiment 20000633 PARAMETER Experiment Name: Zm_Herbicide-Treatments_P Parameter: Tissue Value: Aerial
  misc_feature: MA Experiment 20000633 PARAMETER Experiment Name: Zm_Herbicide-Treatments_P Parameter: Treatment Value: Trimec vs. No Treatment
  misc_feature: MA Experiment ID: 20001614 Result: Up-regulated in Transcription
  misc_feature: MA Experiment 20001614 PARAMETER Experiment Name: Zm_50ppm_KNO3_L-to-H_P Parameter: Age (day) Value: 21
  misc_feature: MA Experiment 20001614 PARAMETER Experiment Name: Zm_50ppm_KNO3_L-to-H_P Parameter: Organism Value: Zea mays
  misc_feature: MA Experiment 20001614 PARAMETER Experiment Name: Zm_50ppm_KNO3_L-to-H_P Parameter: Plant Line Value: 35A19
  misc_feature: MA Experiment 20001614 PARAMETER Experiment Name: Zm_50ppm_KNO3_L-to-H_P Parameter: Timepoint (hr) Value: 48
  misc_feature: MA Experiment 20001614 PARAMETER Experiment Name: Zm_50ppm_KNO3_L-to-H_P Parameter: Tissue Value: Roots
  misc_feature: MA Experiment 20001614 PARAMETER Experiment Name: Zm_50ppm_KNO3_L-to-H_P Parameter: Treatment Value: 50ppm KNO3 vs. 50ppm KCl
atacggacacaggatatttggtcgctggagacagacacacgacacgacacagacatgcgtcgaggtcacgaggtccagagcagtaggaaagtagttttctcgaggccacgaggtcccctgtacctgtagctgtagcatgggcggtacagcagcaccaatgcaagctgcaaggcgatcgaatgatactaccccaccggcgtcggacatgcaggtacggtagcgttctgtttttgtttataaataaaaaaaaactgctccacgctttgcacacggccgatccaggcagcagcagcagcatgttcccacaggcagatgcgcatccagcccacgagcctctcgccggccgggtggccatcgtgacaggaggcgccgggggcatcggctcggcggtggccgcgcacctggcgtccctgggcgcccgcgtcgtggtcggcttcatcggcgacccggcccccgcggaccagctcgtggcggccctcaacaactcctcgccggcaggcaacagcgacccgcgcgccgtggcggtggcagcggacgtgtcggacccggcgcaggtggcgcggctgttcgacgcggcggaggcggcgttcgggccggagctgcacgtgctggtggccgcggcgggggtgcaggacgcgacgtacccgcggatcgcggacacgtcgcccgagcagtgggacctcgcgttcggcgtgaacacgcgcggcacgttcctgtgctgccgggaggcggcgcggcggctggcgcgcggcggcgcgggccgcatcgtcaccctctcgtcctccaacgtggggtcgctgcggcccgggtacggcgcgtacgctgccagcaaggcggccgtggaggccatgacaaaggtgctggccaaggagctgggcgggacggggatcacggtcaacgccgtggcgccgggccccgtggccacgcccatgttctacgcgggcaagtcggaggagcgcgtggccgccgcngcgcgcgagtgccccatggggaggctcgccgagccggcggacgtggcgcccgtggtggggttcctgtgcaccgacgccgccggctggatcaacgggcaggtcatccgagtcaacggcggctacgtgtgagtgtactgtgatgagagggaggaggcatagctagctagcttagcttggagtgtcagcgtgtcaccaaccgacaattacacgtgctccttccnttaataataataataataataat

SEQ ID NO: 7472 - protein, 306 aa, Zea mays subsp. mays
  peptide (1)..(306): Ceres Seq. ID no. 12406201
  misc_feature (53)..(306): Homolog of NCBI NO: 18087667 NR Description: putative dehydrogenase [Oryza sativa]
  misc_feature (44)..(304): Homolog of NCBI NO: 34395018 NR Description: putative short-chain dehydrogenase/reductase
  misc_feature (49)..(306): Homolog of NCBI NO: 34393370 NR Description: putative short-chain dehydrogenase/reductase
  misc_feature (52)..(306): Homolog of NCBI NO: 15235621 NR Description: short-chain alcohol dehydrogenase like protein; id: At4g13180.1, supported by cDNA: 748., supported by cDNA:
  misc_feature (52)..(306): Homolog of NCBI NO: 15229203 NR Description: putative short-chain type protein id: At3g03980.1, supported by cDNA: gi_14326546
  misc_feature (32)..(306): Homolog of NCBI NO: 34395019 NR Description: putative short-chain dehydrogenase/reductase
  misc_feature (52)..(305): Homolog of NCBI NO: 37534988 NR Description: putative short-chain alcohol dehydrogenase [Oryza
  misc_feature (53)..(306): Homolog of NCBI NO: 9758903 NR Description: Brn1-like protein [Arabidopsis thaliana]
  misc_feature (52)..(306): Homolog of NCBI NO: 1711355 NR Description: SHORT-CHAIN TYPE DEHYDROGENASE/REDUCTASE
  misc_feature (53)..(304): Homolog of NCBI NO: 30679011 NR Description: short-chain type dehydrogenase/reductase -related
  misc_feature (264)..(264): Xaa is any aa, unknown or other
MILPHRRRTCRYGSVLFLFINKKKLLHALHTADPGSSSSMFPQADAHPAHEPLAGRVAIVTGGAGGIGSAVAAHLASLGARVVVGFIGDPAPADQLVAALNNSSPAGNSDPRAVAVAADVSDPAQVARLFDAAEAAFGPELHVLVAAAGVQDATYPRIADTSPEQWDLAFGVNTRGTFLCCREAARRLARGGAGRIVTLSSSNVGSLRPGYGAYAASKAAVEAMTKVLAKELGGTGITVNAVAPGPVATPMFYAGKSEERVAAXARECPMGRLAEPADVAPVVGFLCTDAAGWINGQVIRVNGGYV

SEQ ID NO: 7473 - protein, 267 aa, Zea mays subsp. mays
  peptide (1)..(267): Ceres Seq. ID no. 12406202
  misc_feature (14)..(267): Homolog of NCBI NO: 18087667 NR Description: putative dehydrogenase [Oryza sativa]
  misc_feature (5)..(265): Homolog of NCBI NO: 34395018 NR Description: putative short-chain dehydrogenase/reductase
  misc_feature (10)..(267): Homolog of NCBI NO: 34393370 NR Description: putative short-chain dehydrogenase/reductase
  misc_feature (13)..(267): Homolog of NCBI NO: 15235621 NR Description: short-chain alcohol dehydrogenase like protein; id: At4g13180.1, supported by cDNA: 748., supported by cDNA:
  misc_feature (13)..(267): Homolog of NCBI NO: 15229203 NR Description: putative short-chain type protein id: At3g03980.1, supported by cDNA: gi_14326546
  misc_feature (1)..(267): Homolog of NCBI NO: 34395019 NR Description: putative short-chain dehydrogenase/reductase
  misc_feature (13)..(266): Homolog of NCBI NO: 37534988 NR Description: putative short-chain alcohol dehydrogenase [Oryza
  misc_feature (14)..(267): Homolog of NCBI NO: 9758903 NR Description: Brn1-like protein [Arabidopsis thaliana]
  misc_feature (13)..(267): Homolog of NCBI NO: 1711355 NR Description: SHORT-CHAIN TYPE DEHYDROGENASE/REDUCTASE
  misc_feature (14)..(265): Homolog of NCBI NO: 30679011 NR Description: short-chain type dehydrogenase/reductase -related
  misc_feature (225)..(225): Xaa is any aa, unknown or other
MFPQADAHPAHEPLAGRVAIVTGGAGGIGSAVAAHLASLGARVVVGFIGDPAPADQLVAALNNSSPAGNSDPRAVAVAADVSDPAQVARLFDAAEAAFGPELHVLVAAAGVQDATYPRIADTSPEQWDLAFGVNTRGTFLCCREAARRLARGGAGRIVTLSSSNVGSLRPGYGAYAASKAAVEAMTKVLAKELGGTGITVNAVAPGPVATPMFYAGKSEERVAAXARECPMGRLAEPADVAPVVGFLCTDAAGWINGQVIRVNGGYV

SEQ ID NO: 7474 - DNA, 1432 bp, Zea mays subsp. mays
  misc_feature (1)..(1432): Ceres Seq. ID no. 12407071
  misc_feature: MA Experiment ID: 108504 Result: Down-regulated in Transcription
  misc_feature: MA Experiment 108504 PARAMETER Experiment Name: Zm_Drought_P Parameter: Age (day) Value: 8
  misc_feature: MA Experiment 108504 PARAMETER Experiment Name: Zm_Drought_P Parameter: Organism Value: Zea mays
  misc_feature: MA Experiment 108504 PARAMETER Experiment Name: Zm_Drought_P Parameter: Plant Line Value: 35A19
  misc_feature: MA Experiment 108504 PARAMETER Experiment Name: Zm_Drought_P Parameter: Timepoint (hr) Value: 12
  misc_feature: MA Experiment 108504 PARAMETER Experiment Name: Zm_Drought_P Parameter: Tissue Value: Aerial
  misc_feature: MA Experiment 108504 PARAMETER Experiment Name: Zm_Drought_P Parameter: Treatment Value: Drought vs. No Drought
  misc_feature: MA Experiment ID: 108523 Result: Down-regulated in Transcription
  misc_feature: MA Experiment 108523 PARAMETER Experiment Name: Zm_42deg_Heat_P Parameter: Age (day) Value: 8
  misc_feature: MA Experiment 108523 PARAMETER Experiment Name: Zm_42deg_Heat_P Parameter: Organism Value: Zea mays
  misc_feature: MA Experiment 108523 PARAMETER Experiment Name: Zm_42deg_Heat_P Parameter: Plant Line Value: 35A19
  misc_feature: MA Experiment 108523 PARAMETER Experiment Name: Zm_42deg_Heat_P Parameter: Temperature (deg C) Value: 42 vs. 22
  misc_feature: MA Experiment 108523 PARAMETER Experiment Name: Zm_42deg_Heat_P Parameter: Timepoint (hr) Value: 6
  misc_feature: MA Experiment 108523 PARAMETER Experiment Name: Zm_42deg_Heat_P Parameter: Tissue Value: Aerial
  misc_feature: MA Experiment ID: 108528 Result: Up-regulated in Transcription
  misc_feature: MA Experiment 108528 PARAMETER Experiment Name: Zm_Imbibed_Seeds_P Parameter: Age (day) Value: 5 vs. 2
  misc_feature: MA Experiment 108528 PARAMETER Experiment Name: Zm_Imbibed_Seeds_P Parameter: Organism Value: Zea mays
  misc_feature: MA Experiment 108528 PARAMETER Experiment Name: Zm_Imbibed_Seeds_P Parameter: Plant Line Value: 35A19
  misc_feature: MA Experiment 108528 PARAMETER Experiment Name: Zm_Imbibed_Seeds_P Parameter: Tissue Value: Aerial vs. Embryo
  misc_feature: MA Experiment ID: 108529 Result: Down-regulated in Transcription
  misc_feature: MA Experiment 108529 PARAMETER Experiment Name: Zm_Imbibed_Seeds_P Parameter: Age (day) Value: 5 vs. 2
  misc_feature: MA Experiment 108529 PARAMETER Experiment Name: Zm_Imbibed_Seeds_P Parameter: Organism Value: Zea mays
  misc_feature: MA Experiment 108529 PARAMETER Experiment Name: Zm_Imbibed_Seeds_P Parameter: Plant Line Value: 35A19
  misc_feature: MA Experiment 108529 PARAMETER Experiment Name: Zm_Imbibed_Seeds_P Parameter: Tissue Value: Roots vs. Embryo
  misc_feature: MA Experiment ID: 108535 Result: Up-regulated in Transcription
  misc_feature: MA Experiment 108535 PARAMETER Experiment Name: Zm_Meristem_P Parameter: Age (day) Value: 8
  misc_feature: MA Experiment 108535 PARAMETER Experiment Name: Zm_Meristem_P Parameter: Organism Value: Zea mays
  misc_feature: MA Experiment 108535 PARAMETER Experiment Name: Zm_Meristem_P Parameter: Plant Line Value: 35A19
  misc_feature: MA Experiment 108535 PARAMETER Experiment Name: Zm_Meristem_P Parameter: Tissue Value: Root Meristem vs. Above Root Meristem
  misc_feature: MA Experiment ID: 108536 Result: Down-regulated in Transcription
  misc_feature: MA Experiment 108536 PARAMETER Experiment Name: Zm_Meristem_P Parameter: Age (day) Value: 8
  misc_feature: MA Experiment 108536 PARAMETER Experiment Name: Zm_Meristem_P Parameter: Organism Value: Zea mays
  misc_feature: MA Experiment 108536 PARAMETER Experiment Name: Zm_Meristem_P Parameter: Plant Line Value: 35A19
  misc_feature: MA Experiment 108536 PARAMETER Experiment Name: Zm_Meristem_P Parameter: Tissue Value: Shoot Meristem vs. Above Shoot Meristem
  misc_feature: MA Experiment ID: 108543 Result: Up-regulated in Transcription
  misc_feature: MA Experiment ID: 108544 Result: Down-regulated in Transcription
  misc_feature: MA Experiment ID: 108545 Result: Up-regulated in Transcription
  misc_feature: MA Experiment 108545 PARAMETER Experiment Name: Zm_Imbibed_Seeds_P Parameter: Age (day) Value: 3 vs. 2
  misc_feature: MA Experiment 108545 PARAMETER Experiment Name: Zm_Imbibed_Seeds_P Parameter: Organism Value: Zea mays
  misc_feature: MA Experiment 108545 PARAMETER Experiment Name: Zm_Imbibed_Seeds_P Parameter: Plant Line Value: 35A19
  misc_feature: MA Experiment 108545 PARAMETER Experiment Name: Zm_Imbibed_Seeds_P Parameter: Tissue Value: Aerial vs. Embryo
  misc_feature: MA Experiment ID: 108546 Result: Down-regulated in Transcription
  misc_feature: MA Experiment 108546 PARAMETER Experiment Name: Zm_Imbibed_Seeds_P Parameter: Age (day) Value: 3 vs. 2
  misc_feature: MA Experiment 108546 PARAMETER Experiment Name: Zm_Imbibed_Seeds_P Parameter: Organism Value: Zea mays
  misc_feature: MA Experiment 108546 PARAMETER Experiment Name: Zm_Imbibed_Seeds_P Parameter: Plant Line Value: 35A19
  misc_feature: MA Experiment 108546 PARAMETER Experiment Name: Zm_Imbibed_Seeds_P Parameter: Tissue Value: Roots vs. Embryo
  misc_feature: MA Experiment ID: 108547 Result: Up-regulated in Transcription
  misc_feature: MA Experiment 108547 PARAMETER Experiment Name: Zm_Imbibed_Seeds_P Parameter: Age (day) Value: 4 vs. 2
  misc_feature: MA Experiment 108547 PARAMETER Experiment Name: Zm_Imbibed_Seeds_P Parameter: Organism Value: Zea mays
  misc_feature: MA Experiment 108547 PARAMETER Experiment Name: Zm_Imbibed_Seeds_P Parameter: Plant Line Value: 35A19
  misc_feature: MA Experiment 108547 PARAMETER Experiment Name: Zm_Imbibed_Seeds_P Parameter: Tissue Value: Aerial vs. Embryo
  misc_feature: MA Experiment ID: 108556 Result: Down-regulated in Transcription
  misc_feature: MA Experiment 108556 PARAMETER Experiment Name: Zm_Drought_P Parameter: Age (day) Value: 9
  misc_feature: MA Experiment 108556 PARAMETER Experiment Name: Zm_Drought_P Parameter: Organism Value: Zea mays
  misc_feature: MA Experiment 108556 PARAMETER Experiment Name: Zm_Drought_P Parameter: Plant Line Value: 35A19
  misc_feature: MA Experiment 108556 PARAMETER Experiment Name: Zm_Drought_P Parameter: Timepoint (hr) Value: 24
  misc_feature: MA Experiment 108556 PARAMETER Experiment Name: Zm_Drought_P Parameter: Tissue Value: Aerial
  misc_feature: MA Experiment 108556 PARAMETER Experiment Name: Zm_Drought_P Parameter: Treatment Value: Drought vs. No Drought
  misc_feature: MA Experiment ID: 108597 Result: Down-regulated in Transcription
  misc_feature: MA Experiment 108597 PARAMETER Experiment Name: Zm_100uM_ABA_P Parameter: Age (day) Value: 9
  misc_feature: MA Experiment 108597 PARAMETER Experiment Name: Zm_100uM_ABA_P Parameter: Organism Value: Zea mays
  misc_feature: MA Experiment 108597 PARAMETER Experiment Name: Zm_100uM_ABA_P Parameter: Plant Line Value: 35A19
  misc_feature: MA Experiment 108597 PARAMETER Experiment Name: Zm_100uM_ABA_P Parameter: Timepoint (hr) Value: 24
  misc_feature: MA Experiment 108597 PARAMETER Experiment Name: Zm_100uM_ABA_P Parameter: Tissue Value: Aerial
  misc_feature: MA Experiment 108597 PARAMETER Experiment Name: Zm_100uM_ABA_P Parameter: Treatment Value: 100uM ABA vs. No Treatment
  misc_feature: MA Experiment ID: 108689 Result: Down-regulated in Transcription
  misc_feature: MA Experiment 108689 PARAMETER Experiment Name: Zm_Drought_Roots_P Parameter: Age (day) Value: 9
  misc_feature: MA Experiment 108689 PARAMETER Experiment Name: Zm_Drought_Roots_P Parameter: Organism Value: Zea mays
  misc_feature: MA Experiment 108689 PARAMETER Experiment Name: Zm_Drought_Roots_P Parameter: Plant Line Value: 35A19
  misc_feature: MA Experiment 108689 PARAMETER Experiment Name: Zm_Drought_Roots_P Parameter: Timepoint (hr) Value: 24
  misc_feature: MA Experiment 108689 PARAMETER Experiment Name: Zm_Drought_Roots_P Parameter: Tissue Value: Roots
  misc_feature: MA Experiment 108689 PARAMETER Experiment Name: Zm_Drought_Roots_P Parameter: Treatment Value: Drought vs. No Drought
  misc_feature: MA Experiment ID: 20000477 Result: Down-regulated in Transcription
  misc_feature: MA Experiment 20000477 PARAMETER Experiment Name: Zm_5mM_SA_P Parameter: Age (day) Value: 10
  misc_feature: MA Experiment 20000477 PARAMETER Experiment Name: Zm_5mM_SA_P Parameter: Organism Value: Zea mays
  misc_feature: MA Experiment 20000477 PARAMETER Experiment Name: Zm_5mM_SA_P Parameter: Plant Line Value: 35A19
  misc_feature: MA Experiment 20000477 PARAMETER Experiment Name: Zm_5mM_SA_P Parameter: Timepoint (hr) Value: 48
  misc_feature: MA Experiment 20000477 PARAMETER Experiment Name: Zm_5mM_SA_P Parameter: Tissue Value: Aerial
  misc_feature: MA Experiment 20000477 PARAMETER Experiment Name: Zm_5mM_SA_P Parameter: Treatment Value: 5mM SA vs. No Treatment
  misc_feature: MA Experiment ID: 20000478 Result: Down-regulated in Transcription
  misc_feature: MA Experiment 20000478 PARAMETER Experiment Name: Zm_5mM_SA_P Parameter: Age (day) Value: 11
  misc_feature: MA Experiment 20000478 PARAMETER Experiment Name: Zm_5mM_SA_P Parameter: Organism Value: Zea mays
  misc_feature: MA Experiment 20000478 PARAMETER Experiment Name: Zm_5mM_SA_P Parameter: Plant Line Value: 35A19
  misc_feature: MA Experiment 20000478 PARAMETER Experiment Name: Zm_5mM_SA_P Parameter: Timepoint (hr) Value: 72
  misc_feature: MA Experiment 20000478 PARAMETER Experiment Name: Zm_5mM_SA_P Parameter: Tissue Value: Aerial
  misc_feature: MA Experiment 20000478 PARAMETER Experiment Name: Zm_5mM_SA_P Parameter: Treatment Value: 5mM SA vs. No Treatment
  misc_feature: MA Experiment ID: 20000479 Result: Down-regulated in Transcription
  misc_feature: MA Experiment 20000479 PARAMETER Experiment Name: Zm_Drought_P Parameter: Age (day) Value: 10
  misc_feature: MA Experiment 20000479 PARAMETER Experiment Name: Zm_Drought_P Parameter: Organism Value: Zea mays
  misc_feature: MA Experiment 20000479 PARAMETER Experiment Name: Zm_Drought_P Parameter: Plant Line Value: 35A19
  misc_feature: MA Experiment 20000479 PARAMETER Experiment Name: Zm_Drought_P Parameter: Timepoint (hr) Value: 48
  misc_feature: MA Experiment 20000479 PARAMETER Experiment Name: Zm_Drought_P Parameter: Tissue Value: Aerial
  misc_feature: MA Experiment 20000479 PARAMETER Experiment Name: Zm_Drought_P Parameter: Treatment Value: Drought vs. No Drought
  misc_feature: MA Experiment ID: 20000480 Result: Down-regulated in Transcription
  misc_feature: MA Experiment 20000480 PARAMETER Experiment Name: Zm_Drought_P Parameter: Age (day) Value: 11
  misc_feature: MA Experiment 20000480 PARAMETER Experiment Name: Zm_Drought_P Parameter: Organism Value: Zea mays
  misc_feature: MA Experiment 20000480 PARAMETER Experiment Name: Zm_Drought_P Parameter: Plant Line Value: 35A19
  misc_feature: MA Experiment 20000480 PARAMETER Experiment Name: Zm_Drought_P Parameter: Timepoint (hr) Value: 72
  misc_feature: MA Experiment 20000480 PARAMETER Experiment Name: Zm_Drought_P Parameter: Tissue Value: Aerial
  misc_feature: MA Experiment 20000480 PARAMETER Experiment Name: Zm_Drought_P Parameter: Treatment Value: Drought vs. No Drought
  misc_feature: MA Experiment ID: 20000488 Result: Down-regulated in Transcription
  misc_feature: MA Experiment 20000488 PARAMETER Experiment Name: Zm_50mM_NH4NO3_L_to_H_P Parameter: Organism Value: Zea mays
  misc_feature: MA Experiment 20000488 PARAMETER Experiment Name: Zm_50mM_NH4NO3_L_to_H_P Parameter: Timepoint (hr) Value: 8
  misc_feature: MA Experiment 20000488 PARAMETER Experiment Name: Zm_50mM_NH4NO3_L_to_H_P Parameter: Tissue Value: Leaves
  misc_feature: MA Experiment 20000488 PARAMETER Experiment Name: Zm_50mM_NH4NO3_L_to_H_P Parameter: Treatment Value: 50mM NH4NO3 vs. 100mM Mannitol
  misc_feature: MA Experiment ID: 20000492 Result: Up-regulated in Transcription
  misc_feature: MA Experiment 20000492 PARAMETER Experiment Name: Zm_Hybrid_Seed_Dev_P Parameter: DAP Value: 12
  misc_feature: MA Experiment 20000492 PARAMETER Experiment Name: Zm_Hybrid_Seed_Dev_P Parameter: Organism Value: Zea mays
  misc_feature: MA Experiment 20000492 PARAMETER Experiment Name: Zm_Hybrid_Seed_Dev_P Parameter: Plant Line Value: 35A19
  misc_feature: MA Experiment 20000492 PARAMETER Experiment Name: Zm_Hybrid_Seed_Dev_P Parameter: Tissue Value: Fert Kernel vs. Unfert Floret
  misc_feature: MA Experiment ID: 20000534 Result: Down-regulated in Transcription
  misc_feature: MA Experiment 20000534 PARAMETER Experiment Name: Zm_Hybrid_Pollen_P Parameter: Age (day) Value: 8
  misc_feature: MA Experiment 20000534 PARAMETER Experiment Name: Zm_Hybrid_Pollen_P Parameter: Organism Value: Zea mays
  misc_feature: MA Experiment 20000534 PARAMETER Experiment Name: Zm_Hybrid_Pollen_P Parameter: Plant Line Value: 35A19
  misc_feature: MA Experiment 20000534 PARAMETER Experiment Name: Zm_Hybrid_Pollen_P Parameter: Tissue Value: Pollen vs. Aerial
  misc_feature: MA Experiment ID: 20000626 Result: Down-regulated in Transcription
  misc_feature: MA Experiment 20000626 PARAMETER Experiment Name: Zm_Herbicide-Treatments_P Parameter: Timepoint (hr) Value: 12
  misc_feature: MA Experiment 20000626 PARAMETER Experiment Name: Zm_Herbicide-Treatments_P Parameter: Tissue Value: Aerial
  misc_feature: MA Experiment 20000626 PARAMETER Experiment Name: Zm_Herbicide-Treatments_P Parameter: Treatment Value: Roundup vs. No Treatment
atcttccccgtgcttgcagttgcagtgcagctgtacccacagtgccctgtcagtctcggccattgcaatgcctcaagaagcagcaatggagttgccaagaccaatgggcgtgcttctgctcgtgttcttcgtcttgtgcagagtgggggacgcggcgacgttcatgttcgtgaaccggtgcacggacacggtgtggccgggcgtcctgtccaacgccggcagcccaaggctggagccgacggggttcgagctcccgccgggcgcggcacgcgcggtgccggcgccggcgggctggtccggccgcatgtgggcgcgcacgggctgctcccaggacggcgccacggggcggctcgtctgtgccacgggcgactgcggctctggctccgccgagtgcgcgggcgcgggcgctgcgccgccggccacgctggccgagttcacgctcgacggcagtggcgggctggacttctacgacgtcagcctcgtggatggctacaacctccccgtgctggtggagacctccggcggcgcaggctccagcgggccggcgtcgtgcgcggcggccgggtgcgcagcgaacctgaaacncgatgtgccccgccgagctccgagccgggggcggcgccgcgtgccggagcgcgtgcgacgcgttcgcgcggcccgagtactgctgcagcggcgccttcgcgtccccggcggcgtgccggccgactacctactcgcaggtgttcaagagcgcgtgcccgcgctcctacagttacgccttcgacgatcccacctccacattcacctgcggcggcggcccagactacaccgtcaccttctgccccggcgccaccccaagccagaagtcgacgaccacaccgggcgcgacgccggcgacggtgccggggacaatgacgacgacggtgccggaggcaacgccgatgccgggcgcgaccccggctatgccgacggggaccatgatgccaccgggcgcgacgttcacggacgccaccccggacagcgcgatgatgccgatgggtggcctgggcatcgagggcgggggccaaggcagcgtgctcctgggcggcagcagcagcgaaggcagcgtctcttggctcgccaacatggccaccggcgacgcggccgtcccgctggtggcttcggctcggttattggtggcgccactggcaacgttgctctgcggcctccatttgctgtagtagtggtgatggagggagcagaggaatctgttggcgattcgcacggtggcgcctttgtattgccgtgtctgtagatgattttactgtccattgatcatgttgcgttagccccggtcccaggattagatacttgtggctactagtagtactagttctagaggagaaattaaagcatggatgtggacattgattaaagttaatcgctgtcgtgctagctgcgctttgttgtt

SEQ ID NO: 7475 - protein, 424 aa, Zea mays subsp. mays
  peptide (1)..(424): Ceres Seq. ID no. 12407072
  misc_feature (58)..(205): Pfam Name: Thaumatin family Pfam Description: Thaumatin family
  misc_feature (31)..(205): Homolog of NCBI NO: 37531036 NR Description: putative thaumatin-like protein [Oryza sativa
  misc_feature (33)..(198): Homolog of NCBI NO: 21592749 NR Description: putative thaumatin-like protein [Arabidopsis
  misc_feature (33)..(198): Homolog of NCBI NO: 18420282 NR Description: putative thaumatin-like protein; protein id: supported by cDNA: 32152., supported by cDNA: gi_17979354, by cDNA: gi_20466020 [Arabidopsis thaliana]
  misc_feature (52)..(198): Homolog of NCBI NO: 7442168 NR Description: pathogenesis-related protein F20M13.220 -
  misc_feature (33)..(198): Homolog of NCBI NO: 37531042 NR Description: putative thaumatin-like protein [Oryza sativa
  misc_feature (38)..(198): Homolog of NCBI NO: 15233437 NR Description: thaumatin-like protein; protein id: At4g36010.1, by cDNA: gi_13430505, supported by cDNA: gi_21280948 [Arabidopsis
  misc_feature (29)..(198): Homolog of NCBI NO: 15222875 NR Description: thaumatin, putative; protein id: At1g75800.1, by cDNA: gi_18377859, supported by cDNA: gi_20334825 [Arabidopsis
  misc_feature (37)..(198): Homolog of NCBI NO: 2262099 NR Description: thaumatin isolog [Arabidopsis thaliana]
  misc_feature (39)..(198): Homolog of NCBI NO: 15233738 NR Description: thaumatin-like protein; protein id: At4g24180.1
  misc_feature (34)..(198): Homolog of NCBI NO: 38346455 NR Description: OSJNBa0019G23.3 [Oryza sativa (japonica
  misc_feature (195)..(195): Xaa is any aa, unknown or other
SSPCLQLQCSCTHSALSVSAIAMPQEAAMELPRPMGVLLLVFFVLCRVGDAATFMFVNRCTDTVWPGVLSNAGSPRLEPTGFELPPGAARAVPAPAGWSGRMWARTGCSQDGATGRLVCATGDCGSGSAECAGAGAAPPATLAEFTLDGSGGLDFYDVSLVDGYNLPVLVETSGGAGSSGPASCAAAGCAANLKXDVPRRAPSRGRRRVPERVRRVRAARVLLQRRLRVPGGVPADYLLAGVQERVPALLQLRLRRSHLHIHLRRRPRLHRHLLPRRHPKPEVDDHTGRDAGDGAGDNDDDGAGGNADAGRDPGYADGDHDATGRDVHGRHPGQRDDADGWPGHRGRGPRQRAPGRQQQRRQRLLARQHGHRRRGRPAGGFGSVIGGATGNVALRPPFAVVVVMEGAEESVGDSHGGAFVLPCL

SEQ ID NO: 7476 - protein, 402 aa, Zea mays subsp. mays
  peptide (1)..(402): Ceres Seq. ID no. 12407073
  misc_feature (36)..(183): Pfam Name: Thaumatin family Pfam Description: Thaumatin family
  misc_feature (9)..(183): Homolog of NCBI NO: 37531036 NR Description: putative thaumatin-like protein [Oryza sativa
  misc_feature (11)..(176): Homolog of NCBI NO: 21592749 NR Description: putative thaumatin-like protein [Arabidopsis
  misc_feature (11)..(176): Homolog of NCBI NO: 18420282 NR Description: putative thaumatin-like protein; protein id: supported by cDNA: 32152., supported by cDNA: gi_17979354, by cDNA: gi_20466020 [Arabidopsis thaliana]
  misc_feature (30)..(176): Homolog of NCBI NO: 7442168 NR Description: pathogenesis-related protein F20M13.220 -
  misc_feature (11)..(176): Homolog of NCBI NO: 37531042 NR Description: putative thaumatin-like protein [Oryza sativa
  misc_feature (16)..(176): Homolog of NCBI NO: 15233437 NR Description: thaumatin-like protein; protein id: At4g36010.1, by cDNA: gi_13430505, supported by cDNA: gi_21280948 [Arabidopsis
  misc_feature (7)..(176): Homolog of NCBI NO: 15222875 NR Description: thaumatin, putative; protein id: At1g75800.1, by cDNA: gi_18377859, supported by cDNA: gi_20334825 [Arabidopsis
  misc_feature (15)..(176): Homolog of NCBI NO: 2262099 NR Description: thaumatin isolog [Arabidopsis thaliana]
  misc_feature (17)..(176): Homolog of NCBI NO: 15233738 NR Description: thaumatin-like protein; protein id: At4g24180.1
  misc_feature (12)..(176): Homolog of NCBI NO: 38346455 NR Description: OSJNBa0019G23.3 [Oryza sativa (japonica
  misc_feature (173)..(173): Xaa is any aa, unknown or other
MPQEAAMELPRPMGVLLLVFFVLCRVGDAATFMFVNRCTDTVWPGVLSNAGSPRLEPTGFELPPGAARAVPAPAGWSGRMWARTGCSQDGATGRLVCATGDCGSGSAECAGAGAAPPATLAEFTLDGSGGLDFYDVSLVDGYNLPVLVETSGGAGSSGPASCAAAGCAANLKXDVPRRAPSRGRRRVPERVRRVRAARVLLQRRLRVPGGVPADYLLAGVQERVPALLQLRLRRSHLHIHLRRRPRLHRHLLPRRHPKPEVDDHTGRDAGDGAGDNDDDGAGGNADAGRDPGYADGDHDATGRDVHGRHPGQRDDADGWPGHRGRGPRQRAPGRQQQRRQRLLARQHGHRRRGRPAGGFGSVIGGATGNVALRPPFAVVVVMEGAEESVGDSHGGAFVLPCL

SEQ ID NO: 7477 - protein, 396 aa, Zea mays subsp. mays
  peptide (1)..(396): Ceres Seq. ID no. 12407074
  misc_feature (30)..(177): Pfam Name: Thaumatin family Pfam Description: Thaumatin family
  misc_feature (3)..(177): Homolog of NCBI NO: 37531036 NR Description: putative thaumatin-like protein [Oryza sativa
  misc_feature (5)..(170): Homolog of NCBI NO: 21592749 NR Description: putative thaumatin-like protein [Arabidopsis
  misc_feature (5)..(170): Homolog of NCBI NO: 18420282 NR Description: putative thaumatin-like protein; protein id: supported by cDNA: 32152., supported by cDNA: gi_17979354, by cDNA: gi_20466020 [Arabidopsis thaliana]
  misc_feature (24)..(170): Homolog of NCBI NO: 7442168 NR Description: pathogenesis-related protein F20M13.220 -
  misc_feature (5)..(170): Homolog of NCBI NO: 37531042 NR Description: putative thaumatin-like protein [Oryza sativa
  misc_feature (10)..(170): Homolog of NCBI NO: 15233437 NR Description: thaumatin-like protein; protein id: At4g36010.1, by cDNA: gi_13430505, supported by cDNA: gi_21280948 [Arabidopsis
  misc_feature (1)..(170): Homolog of NCBI NO: 15222875 NR Description: thaumatin, putative; protein id: At1g75800.1, by cDNA: gi_18377859, supported by cDNA: gi_20334825 [Arabidopsis
  misc_feature (9)..(170): Homolog of NCBI NO: 2262099 NR Description: thaumatin isolog [Arabidopsis thaliana]
  misc_feature (11)..(170): Homolog of NCBI NO: 15233738 NR Description: thaumatin-like protein; protein id: At4g24180.1
  misc_feature (6)..(170): Homolog of NCBI NO: 38346455 NR Description: OSJNBa0019G23.3 [Oryza sativa (japonica
  misc_feature (167)..(167): Xaa is any aa, unknown or other
MELPRPMGVLLLVFFVLCRVGDAATFMFVNRCTDTVWPGVLSNAGSPRLEPTGFELPPGAARAVPAPAGWSGRMWARTGCSQDGATGRLVCATGDCGSGSAECAGAGAAPPATLAEFTLDGSGGLDFYDVSLVDGYNLPVLVETSGGAGSSGPASCAAAGCAANLKXDVPRRAPSRGRRRVPERVRRVRAARVLLQRRLRVPGGVPADYLLAGVQERVPALLQLRLRRSHLHIHLRRRPRLHRHLLPRRHPKPEVDDHTGRDAGDGAGDNDDDGAGGNADAGRDPGYADGDHDATGRDVHGRHPGQRDDADGWPGHRGRGPRQRAPGRQQQRRQRLLARQHGHRRRGRPAGGFGSVIGGATGNVALRPPFAVVVVMEGAEESVGDSHGGAFVLPCL

SEQ ID NO: 7478 - DNA, 1708 bp, Zea mays subsp. mays
  misc_feature (1)..(1708): Ceres Seq. ID no. 12408780
  misc_feature: MA Experiment ID: 20000534 Result: Down-regulated in Transcription
  misc_feature: MA Experiment 20000534 PARAMETER Experiment Name: Zm_Hybrid_Pollen_P Parameter: Age (day) Value: 8
  misc_feature: MA Experiment 20000534 PARAMETER Experiment Name: Zm_Hybrid_Pollen_P Parameter: Organism Value: Zea mays
  misc_feature: MA Experiment 20000534 PARAMETER Experiment Name: Zm_Hybrid_Pollen_P Parameter: Plant Line Value: 35A19
  misc_feature: MA Experiment 20000534 PARAMETER Experiment Name: Zm_Hybrid_Pollen_P Parameter: Tissue Value: Pollen vs. Aerial
ccttttcccaaatcccacacctatggcgatcgtcggcggcggcgggagctggagcatccacggccgcgctgatgtcacatcccgctacgaggtcctcggccgtgcgggctccggttcctatgctgatgtctaccgcggccgccgccgatccgacggtgctgctgtcgcgctcaaggaggtccacgacgctgtcagcgctcgcagcgaggtcgaggctctcctcgccattcccccttcccccaacgttgtcgcactcatcgaccacttccccggcggcgattgcgacgacgacgtcctcgtcctcgagtggctcccgctcgacctcgccgccgttgtgcgtgacgcgaggaggcgcgcgggcgggggcgagggaggggaaggcatccccgcctcgcaactcaaacggtggatgctgcaggtgcttgagggggtcgccgcgtgccaccgcgccggcgtcgtgcaccgtgacctgaagcctgagaacctgctcatctccgaagacggggtgctcaaagtcgccgattttggtcaggctaggatacttcagcagtcagcacctacatttcaagaaatgtacccacacgagcaaagttcaggcatggaaacatgggttccacaacaacaaccagcagtgctacaagggacagaagaggaaccaacatcttatgaatcagatgctactgctggtcaggagccagagaccctaactgctgctgactacctgcgtgaactggaccaactccgagaaaaatccagcgatgttgacaaaatgagctttcaggatgaacatgcatcctgtcttgccacgtgcagcacaggagacattgaagatgatccatacccagcctcctactctgacgatatggaaggcataggtgaagattctggtgccttcacttcttgtgttggcactaggtggttcagggctcctgagcttttatatgggtcaacaaactatgggctagagattgatctctggtcgcttggatgcattttggcagaactgatgaaattggaggctttgttcccagggatatctgatattgatcagattagtagaatcatcaatgtcctgggcgatataacagaagaaacctttccaggctgttcaaacttgccagattacaacaagatttcctttaacaaagttgagaaaccgacaggccttgaagcatgtctgcctaacagatctcctactgaggttagcatcataaagcagctaatttgctatgacacagcaaagaggaccagtgctgttgatctgctgaatgatcggtactttaccgaagagcccttgccggcacctatagaaggattacatgtcccggcatcaaaggacgaggatgatgacagctcaactgaagaatggggtaattacagggatggtgtctctcgggttgactttgatgagtttggtagtatggatgccaccaaaactgagaagggtttcagcatacagttttcgtgacgaagaaagacgtagacgtacggaccatgcgtgccatgtccaaactaagaccatatcatggtatttatctacatgggagttgaattgctgtcaacatagacgaacatcagtaagcgatcaaaggttgtgcaatgttgctttgggtttaacatttttttagtttctatggaactttgtgattctttgtacggcagaaccagttttttccctggcaagaataaaactgtgtgtggtagtctg

SEQ ID NO: 7479 - protein, 488 aa, Zea mays subsp. mays
  peptide (1)..(488): Ceres Seq. ID no. 12408781
  misc_feature (29)..(426): Pfam Name: Protein kinase domain Pfam Description: Protein kinase domain
  misc_feature (16)..(487): Homolog of NCBI NO: 15235518 NR Description: Cyclin-dependent kinase F;1; protein id: supported by cDNA: gi_14596056, supported by cDNA: gi_17978692, by cDNA: gi_3218549 [Arabidopsis thaliana]
  misc_feature (3)..(488): Homolog of NCBI NO: 6984233 NR Description: CDK-activating kinase [Euphorbia esula]
  misc_feature (28)..(217): Homolog of NCBI NO: 16716469 NR Description: cell cycle related kinase; CDK-related protein
  misc_feature (294)..(442): Homolog of NCBI NO: 16716469 NR Description: cell cycle related kinase; CDK-related protein
  misc_feature (28)..(217): Homolog of NCBI NO: 23344742 NR Description: cell cycle related kinase [Homo sapiens]
  misc_feature (293)..(442): Homolog of NCBI NO: 23344742 NR Description: cell cycle related kinase [Homo sapiens]
  misc_feature (28)..(217): Homolog of NCBI NO: 34873735 NR Description: similar to CDK-related protein kinase PNQLARE
  misc_feature (294)..(442): Homolog of NCBI NO: 34873735 NR Description: similar to CDK-related protein kinase PNQLARE
  misc_feature (29)..(223): Homolog of NCBI NO: 4557439 NR Description: cyclin-dependent kinase 3 [Homo sapiens]
  misc_feature (298)..(434): Homolog of NCBI NO: 4557439 NR Description: cyclin-dependent kinase 3 [Homo sapiens]
LFPNPTPMAIVGGGGSWSIHGRADVTSRYEVLGRAGSGSYADVYRGRRRSDGAAVALKEVHDAVSARSEVEALLAIPPSPNVVALIDHFPGGDCDDDVLVLEWLPLDLAAVVRDARRRAGGGEGGEGIPASQLKRWMLQVLEGVAACHRAGVVHRDLKPENLLISEDGVLKVADFGQARILQQSAPTFQEMYPHEQSSGMETWVPQQQPAVLQGTEEEPTSYESDATAGQEPETLTAADYLRELDQLREKSSDVDKMSFQDEHASCLATCSTGDIEDDPYPASYSDDMEGIGEDSGAFTSCVGTRWFRAPELLYGSTNYGLEIDLWSLGCILAELMKLEALFPGISDIDQISRIINVLGDITEETFPGCSNLPDYNKISFNKVEKPTGLEACLPNRSPTEVSIIKQLICYDTAKRTSAVDLLNDRYFTEEPLPAPIEGLHVPASKDEDDDSSTEEWGNYRDGVSRVDFDEFGSMDATKTEKGFSIQFS

SEQ ID NO: 7480 - protein, 481 aa, Zea mays subsp. mays
  peptide (1)..(481): Ceres Seq. ID no. 12408782
  misc_feature (22)..(419): Pfam Name: Protein kinase domain Pfam Description: Protein kinase domain
  misc_feature (9)..(480): Homolog of NCBI NO: 15235518 NR Description: Cyclin-dependent kinase F;1; protein id: supported by cDNA: gi_14596056, supported by cDNA: gi_17978692, by cDNA: gi_3218549 [Arabidopsis thaliana]
  misc_feature (1)..(481): Homolog of NCBI NO: 6984233 NR Description: CDK-activating kinase [Euphorbia esula]
  misc_feature (21)..(210): Homolog of NCBI NO: 16716469 NR Description: cell cycle related kinase; CDK-related protein
  misc_feature (287)..(435): Homolog of NCBI NO: 16716469 NR Description: cell cycle related kinase; CDK-related protein
  misc_feature (21)..(210): Homolog of NCBI NO: 23344742 NR Description: cell cycle related kinase [Homo sapiens]
  misc_feature (286)..(435): Homolog of NCBI NO: 23344742 NR Description: cell cycle related kinase [Homo sapiens]
  misc_feature (21)..(210): Homolog of NCBI NO: 34873735 NR Description: similar to CDK-related protein kinase PNQLARE
  misc_feature (287)..(435): Homolog of NCBI NO: 34873735 NR Description: similar to CDK-related protein kinase PNQLARE
  misc_feature (22)..(216): Homolog of NCBI NO: 4557439 NR Description: cyclin-dependent kinase 3 [Homo sapiens]
  misc_feature (291)..(427): Homolog of NCBI NO: 4557439 NR Description: cyclin-dependent kinase 3 [Homo sapiens]
MAIVGGGGSWSIHGRADVTSRYEVLGRAGSGSYADVYRGRRRSDGAAVALKEVHDAVSARSEVEALLAIPPSPNVVALIDHFPGGDCDDDVLVLEWLPLDLAAVVRDARRRAGGGEGGEGIPASQLKRWMLQVLEGVAACHRAGVVHRDLKPENLLISEDGVLKVADFGQARILQQSAPTFQEMYPHEQSSGMETWVPQQQPAVLQGTEEEPTSYESDATAGQEPETLTAADYLRELDQLREKSSDVDKMSFQDEHASCLATCSTGDIEDDPYPASYSDDMEGIGEDSGAFTSCVGTRWFRAPELLYGSTNYGLEIDLWSLGCILAELMKLEALFPGISDIDQISRIINVLGDITEETFPGCSNLPDYNKISFNKVEKPTGLEACLPNRSPTEVSIIKQLICYDTAKRTSAVDLLNDRYFTEEPLPAPIEGLHVPASKDEDDDSSTEEWGNYRDGVSRVDFDEFGSMDATKTEKGFSIQFS

SEQ ID NO: 7481 - protein, 352 aa, Zea mays subsp. mays
  peptide (1)..(352): Ceres Seq. ID no. 12408783
  misc_feature (1)..(290): Pfam Name: Protein kinase domain Pfam Description: Protein kinase domain
  misc_feature (1)..(351): Homolog of NCBI NO: 15235518 NR Description: Cyclin-dependent kinase F;1; protein id: supported by cDNA: gi_14596056, supported by cDNA: gi_17978692, by cDNA: gi_3218549 [Arabidopsis thaliana]
  misc_feature (1)..(352): Homolog of NCBI NO: 6984233 NR Description: CDK-activating kinase [Euphorbia esula]
  misc_feature (1)..(81): Homolog of NCBI NO: 16716469 NR Description: cell cycle related kinase; CDK-related protein
  misc_feature (158)..(306): Homolog of NCBI NO: 16716469 NR Description: cell cycle related kinase; CDK-related protein
  misc_feature (1)..(81): Homolog of NCBI NO: 23344742 NR Description: cell cycle related kinase [Homo sapiens]
  misc_feature (157)..(306): Homolog of NCBI NO: 23344742 NR Description: cell cycle related kinase [Homo sapiens]
  misc_feature (1)..(81): Homolog of NCBI NO: 34873735 NR Description: similar to CDK-related protein kinase PNQLARE
  misc_feature (158)..(306): Homolog of NCBI NO: 34873735 NR Description: similar to CDK-related protein kinase PNQLARE
  misc_feature (1)..(87): Homolog of NCBI NO: 4557439 NR Description: cyclin-dependent kinase 3 [Homo sapiens]
  misc_feature (162)..(298): Homolog of NCBI NO: 4557439 NR Description: cyclin-dependent kinase 3 [Homo sapiens]
MLQVLEGVAACHRAGVVHRDLKPENLLISEDGVLKVADFGQARILQQSAPTFQEMYPHEQSSGMETWVPQQQPAVLQGTEEEPTSYESDATAGQEPETLTAADYLRELDQLREKSSDVDKMSFQDEHASCLATCSTGDIEDDPYPASYSDDMEGIGEDSGAFTSCVGTRWFRAPELLYGSTNYGLEIDLWSLGCILAELMKLEALFPGISDIDQISRIINVLGDITEETFPGCSNLPDYNKISFNKVEKPTGLEACLPNRSPTEVSIIKQLICYDTAKRTSAVDLLNDRYFTEEPLPAPIEGLHVPASKDEDDDSSTEEWGNYRDGVSRVDFDEFGSMDATKTEKGFSIQFS

SEQ ID NO: 7482 - DNA, 1844 bp, Zea mays subsp. mays
  misc_feature (1)..(1844): Ceres Seq. ID no. 12408772
  misc_feature: MA Experiment ID: 108528 Result: Down-regulated in Transcription
  misc_feature: MA Experiment 108528 PARAMETER Experiment Name: Zm_Imbibed_Seeds_P Parameter: Age (day) Value: 5 vs. 2
  misc_feature: MA Experiment 108528 PARAMETER Experiment Name: Zm_Imbibed_Seeds_P Parameter: Organism Value: Zea mays
  misc_feature: MA Experiment 108528 PARAMETER Experiment Name: Zm_Imbibed_Seeds_P Parameter: Plant Line Value: 35A19
  misc_feature: MA Experiment 108528 PARAMETER Experiment Name: Zm_Imbibed_Seeds_P Parameter: Tissue Value: Aerial vs. Embryo
  misc_feature: MA Experiment ID: 108543 Result: Up-regulated in Transcription
aaaaaaagcatgcgaattattcgaggcggctttatggtcggacggatcacccccagcaaggagccgccacccgccactccgccagagcattgcagcgccagccacctcgccccctctcgctgtcccgcaccacccgctccgagggaaggagaggtaaccggtgggggggcgcggcggcgagcggagatcccgggaactccgatcgagcgcaagcggcgggacctgcgggagcagagagcgcgcagggaggacaagtgagtagcgtggttcgatggtaagggagacgggatactacgacgtgctggaagtgagcccgacggcctccgaggccgagatcaagaaggcatactacgtcaaggcgaggcaggtccatccggacaagaacccagatgatccgcttgcggcggcgaggttccaggaattgggggaggcataccaagtgctcagtaatcccaagcagcgtgaagactatgacttacatgggaaacctggtatttcaacggaagcgataattgatcctgcagcaatttttgcgatgctgttcggtagcgagctttttgaggactacattggtcagctggcgatggcatccatggcttcacttgatggttttactgaaaacgaacagatcgatccaagaaggttgcaagagcaaatgcgagttgtacaaaaagaaagagaggagaaacttgcagaggcactaaaagataggttgcatctttatgttcaaggaaacaaagaggaatttatccagtatgctgatgctgaggttactagactctctaatgccgcatacggtgttgatatgttgagtactattggttatgtgtattcgagacaagcttctaaggagcttggaaagcaagctaaatatcttggtgttccatttattgctgaatggttcagaaacaaagggcattctattaaatcccaaataactgctgcaacaggtgcattagctcttatgcagctgcaggaagactggagaaagcatctcagtgatgagtgccactacaatgaagaggaactggaggcttacatgctgacacataagagtgttatggtggactcgttatggaagcttaatgttgctgatatagaggaaaccctgtcacatgtgtgtcaaatggtgcttcatgacagcagtgccaggaaagaggaactgcgagttcgagctaaaggattgaaaactttaggcaaaatattccatcaagccaagcttagcactgctgagggagatccagcagcaatgaataatacaataaataacttggatgagaatgatgatagttcaccggagtcatctccaagatctcccagggaccaaatgttcgatacaaacccaccttattcccagagtccatacgtggaggcccctgagttgggcgggtatttttccttcgacttcccaatgcctatcgctccgcctggcgcgcagagggaccctattccgtgaccgccgtgagtgcggcggctctgttttgtgtggatcgtcattttgtacaatattgcctgtgtaaatcatttttatttgtaacattagtagcagtagtgtgagacagcagcttggcacccattgcatcgtttcttttctttttcttcgtgtaatcaatcaatcaagcatgcgacgacggcagccttgtcttgttcgtagggcttggtctgcttctggccacgggtcagccattggtgtacatgaactaccacctctttgtttcttgtgtttatcagtttatgggtgcataattgtttagcctatgggcccatctgggcaaacaacacttgcttgtgctaagctttgctcgaacttcgtctcgtgaaatttgatcatctcctcttcctgc

SEQ ID NO: 7483 - protein, 394 aa, Zea mays subsp. mays
  peptide (1)..(394): Ceres Seq. ID no. 12408773
  misc_feature (7)..(71): Pfam Name: DnaJ domain Pfam Description: DnaJ domain
  misc_feature (122)..(394): Homolog of NCBI NO: 27817868 NR Description: OJ1081_B12.17 [Oryza sativa (japonica
  misc_feature (1)..(130): Homolog of NCBI NO: 27817868 NR Description: OJ1081_B12.17 [Oryza sativa (japonica
  misc_feature (1)..(390): Homolog of NCBI NO: 18394951 NR Description: expressed protein; protein id: At1g21080.1, by cDNA: gi_15028270 [Arabidopsis thaliana]
  misc_feature (1)..(388): Homolog of NCBI NO: 15223142 NR Description: putative DnaJ protein; protein id: At1g76700.1
  misc_feature (1)..(388): Homolog of NCBI NO: 26449747 NR Description: putative DnaJ protein [Arabidopsis thaliana]
  misc_feature (1)..(394): Homolog of NCBI NO: 2230757 NR Description: dnaJ-like protein [Arabidopsis thaliana]
  misc_feature (1)..(349): Homolog of NCBI NO: 30699227 NR Description: DnaJ protein family [Arabidopsis thaliana]
  misc_feature (89)..(390): Homolog of NCBI NO: 15982848 NR Description: At1g21080/T22I11_9 [Arabidopsis thaliana]
  misc_feature (1)..(344): Homolog of NCBI NO: 15226572 NR Description: putative DnaJ protein; protein id: At2g21510.1, by cDNA: 151802. [Arabidopsis thaliana] >gi|25412044|pir||B84602
  misc_feature (1)..(297): Homolog of NCBI NO: 25406486 NR Description: hypothetical protein F22K20.12 [imported] -
MVRETGYYDVLEVSPTASEAEIKKAYYVKARQVHPDKNPDDPLAAARFQELGEAYQVLSNPKQREDYDLHGKPGISTEAIIDPAAIFAMLFGSELFEDYIGQLAMASMASLDGFTENEQIDPRRLQEQMRVVQKEREEKLAEALKDRLHLYVQGNKEEFIQYADAEVTRLSNAAYGVDMLSTIGYVYSRQASKELGKQAKYLGVPFIAEWFRNKGHSIKSQITAATGALALMQLQEDWRKHLSDECHYNEEELEAYMLTHKSVMVDSLWKLNVADIEETLSHVCQMVLHDSSARKEELRVRAKGLKTLGKIFHQAKLSTAEGDPAAMNNTINNLDENDDSSPESSPRSPRDQMFDTNPPYSQSPYVEAPELGGYFSFDFPMPIAPPGAQRDPIP

SEQ ID NO: 7484 - protein, 306 aa, Zea mays subsp. mays
  peptide (1)..(306): Ceres Seq. ID no. 12408774
  misc_feature (34)..(306): Homolog of NCBI NO: 27817868 NR Description: OJ1081_B12.17 [Oryza sativa (japonica
  misc_feature (1)..(42): Homolog of NCBI NO: 27817868 NR Description: OJ1081_B12.17 [Oryza sativa (japonica
  misc_feature (1)..(302): Homolog of NCBI NO: 18394951 NR Description: expressed protein; protein id: At1g21080.1, by cDNA: gi_15028270 [Arabidopsis thaliana]
  misc_feature (1)..(300): Homolog of NCBI NO: 15223142 NR Description: putative DnaJ protein; protein id: At1g76700.1
  misc_feature (1)..(300): Homolog of NCBI NO: 26449747 NR Description: putative DnaJ protein [Arabidopsis thaliana]
  misc_feature (1)..(306): Homolog of NCBI NO: 2230757 NR Description: dnaJ-like protein [Arabidopsis thaliana]
  misc_feature (1)..(261): Homolog of NCBI NO: 30699227 NR Description: DnaJ protein family [Arabidopsis thaliana]
  misc_feature (1)..(302): Homolog of NCBI NO: 15982848 NR Description: At1g21080/T22I11_9 [Arabidopsis thaliana]
  misc_feature (1)..(256): Homolog of NCBI NO: 15226572 NR Description: putative DnaJ protein; protein id: At2g21510.1, by cDNA: 151802. [Arabidopsis thaliana] >gi|25412044|pir||B84602
  misc_feature (1)..(209): Homolog of NCBI NO: 25406486 NR Description: hypothetical protein F22K20.12 [imported] -
MLFGSELFEDYIGQLAMASMASLDGFTENEQIDPRRLQEQMRVVQKEREEKLAEALKDRLHLYVQGNKEEFIQYADAEVTRLSNAAYGVDMLSTIGYVYSRQASKELGKQAKYLGVPFIAEWFRNKGHSIKSQITAATGALALMQLQEDWRKHLSDECHYNEEELEAYMLTHKSVMVDSLWKLNVADIEETLSHVCQMVLHDSSARKEELRVRAKGLKTLGKIFHQAKLSTAEGDPAAMNNTINNLDENDDSSPESSPRSPRDQMFDTNPPYSQSPYVEAPELGGYFSFDFPMPIAPPGAQRDPIP

SEQ ID NO: 7485 - protein, 290 aa, Zea mays subsp. mays
  peptide (1)..(290): Ceres Seq. ID no. 12408775
  misc_feature (18)..(290): Homolog of NCBI NO: 27817868 NR Description: OJ1081_B12.17 [Oryza sativa (japonica
  misc_feature (1)..(26): Homolog of NCBI NO: 27817868 NR Description: OJ1081_B12.17 [Oryza sativa (japonica
  misc_feature (1)..(286): Homolog of NCBI NO: 18394951 NR Description: expressed protein; protein id: At1g21080.1, by cDNA: gi_15028270 [Arabidopsis thaliana]
  misc_feature (1)..(284): Homolog of NCBI NO: 15223142 NR Description: putative DnaJ protein; protein id: At1g76700.1
  misc_feature (1)..(284): Homolog of NCBI NO: 26449747 NR Description: putative DnaJ protein [Arabidopsis thaliana]
  misc_feature (1)..(290): Homolog of NCBI NO: 2230757 NR Description: dnaJ-like protein [Arabidopsis thaliana]
  misc_feature (1)..(245): Homolog of NCBI NO: 30699227 NR Description: DnaJ protein family [Arabidopsis thaliana]
  misc_feature (1)..(286): Homolog of NCBI NO: 15982848 NR Description: At1g21080/T22I11_9 [Arabidopsis thaliana]
  misc_feature (1)..(240): Homolog of NCBI NO: 15226572 NR Description: putative DnaJ protein; protein id: At2g21510.1, by cDNA: 151802. [Arabidopsis thaliana] >gi|25412044|pir||B84602
  misc_feature (1)..(193): Homolog of NCBI NO: 25406486 NR Description: hypothetical protein F22K20.12 [imported] -
MASMASLDGFTENEQIDPRRLQEQMRVVQKEREEKLAEALKDRLHLYVQGNKEEFIQYADAEVTRLSNAAYGVDMLSTIGYVYSRQASKELGKQAKYLGVPFIAEWFRNKGHSIKSQITAATGALALMQLQEDWRKHLSDECHYNEEELEAYMLTHKSVMVDSLWKLNVADIEETLSHVCQMVLHDSSARKEELRVRAKGLKTLGKIFHQAKLSTAEGDPAAMNNTINNLDENDDSSPESSPRSPRDQMFDTNPPYSQSPYVEAPELGGYFSFDFPMPIAPPGAQRDPIP

SEQ ID NO: 7486 - DNA, 1334 bp, Zea mays subsp. mays
  misc_feature (1)..(1334): Ceres Seq. ID no. 12408768
  misc_feature: MA Experiment ID: 108522 Result: Down-regulated in Transcription
  misc_feature: MA Experiment 108522 PARAMETER Experiment Name: Zm_42deg_Heat_P Parameter: Age (day) Value: 8
  misc_feature: MA Experiment 108522 PARAMETER Experiment Name: Zm_42deg_Heat_P Parameter: Organism Value: Zea mays
  misc_feature: MA Experiment 108522 PARAMETER Experiment Name: Zm_42deg_Heat_P Parameter: Plant Line Value: 35A19
  misc_feature: MA Experiment 108522 PARAMETER Experiment Name: Zm_42deg_Heat_P Parameter: Temperature (deg C) Value: 42 vs. 22
  misc_feature: MA Experiment 108522 PARAMETER Experiment Name: Zm_42deg_Heat_P Parameter: Timepoint (hr) Value: 1
  misc_feature: MA Experiment 108522 PARAMETER Experiment Name: Zm_42deg_Heat_P Parameter: Tissue Value: Aerial
  misc_feature: MA Experiment ID: 108535 Result: Up-regulated in Transcription
  misc_feature: MA Experiment 108535 PARAMETER Experiment Name: Zm_Meristem_P Parameter: Age (day) Value: 8
  misc_feature: MA Experiment 108535 PARAMETER Experiment Name: Zm_Meristem_P Parameter: Organism Value: Zea mays
  misc_feature: MA Experiment 108535 PARAMETER Experiment Name: Zm_Meristem_P Parameter: Plant Line Value: 35A19
  misc_feature: MA Experiment 108535 PARAMETER Experiment Name: Zm_Meristem_P Parameter: Tissue Value: Root Meristem vs. Above Root Meristem
  misc_feature: MA Experiment ID: 108544 Result: Down-regulated in Transcription
  misc_feature: MA Experiment ID: 108556 Result: Down-regulated in Transcription
  misc_feature: MA Experiment 108556 PARAMETER Experiment Name: Zm_Drought_P Parameter: Age (day) Value: 9
  misc_feature: MA Experiment 108556 PARAMETER Experiment Name: Zm_Drought_P Parameter: Organism Value: Zea mays
  misc_feature: MA Experiment 108556 PARAMETER Experiment Name: Zm_Drought_P Parameter: Plant Line Value: 35A19
  misc_feature: MA Experiment 108556 PARAMETER Experiment Name: Zm_Drought_P Parameter: Timepoint (hr) Value: 24
  misc_feature: MA Experiment 108556 PARAMETER Experiment Name: Zm_Drought_P Parameter: Tissue Value: Aerial
  misc_feature: MA Experiment 108556 PARAMETER Experiment Name: Zm_Drought_P Parameter: Treatment Value: Drought vs. No Drought
  misc_feature: MA Experiment ID: 20000108 Result: Up-regulated in Transcription
  misc_feature: MA Experiment 20000108 PARAMETER Experiment Name: Zm_Root-Tips_P Parameter: Age (day) Value: 12
  misc_feature: MA Experiment 20000108 PARAMETER Experiment Name: Zm_Root-Tips_P Parameter: Organism Value: Zea mays
  misc_feature: MA Experiment 20000108 PARAMETER Experiment Name: Zm_Root-Tips_P Parameter: Tissue Value: Root tips vs. Root mid region    35
  misc_feature: MA Experiment 20000108 PARAMETER Experiment Name: Zm_Root-Tips_P Parameter: Tissue Value: Root tips vs. Root mid region   Sequence Listing-Misc Features (4)
  misc_feature: MA Experiment ID: 20000487 Result: Up-regulated in Transcription
  misc_feature: MA Experiment 20000487 PARAMETER Experiment Name: Zm_50mM_NH4NO3_L_to_H_P Parameter: Organism Value: Zea mays
  misc_feature: MA Experiment 20000487 PARAMETER Experiment Name: Zm_50mM_NH4NO3_L_to_H_P Parameter: Timepoint (hr) Value: 4
  misc_feature: MA Experiment 20000487 PARAMETER Experiment Name: Zm_50mM_NH4NO3_L_to_H_P Parameter: Tissue Value: Leaves
  misc_feature: MA Experiment 20000487 PARAMETER Experiment Name: Zm_50mM_NH4NO3_L_to_H_P Parameter: Treatment Value: 50mM NH4NO3 vs. 100mM Mannitol
  misc_feature: MA Experiment ID: 20000488 Result: Up-regulated in Transcription
  misc_feature: MA Experiment 20000488 PARAMETER Experiment Name: Zm_50mM_NH4NO3_L_to_H_P Parameter: Organism Value: Zea mays
  misc_feature: MA Experiment 20000488 PARAMETER Experiment Name: Zm_50mM_NH4NO3_L_to_H_P Parameter: Timepoint (hr) Value: 8
  misc_feature: MA Experiment 20000488 PARAMETER Experiment Name: Zm_50mM_NH4NO3_L_to_H_P Parameter: Tissue Value: Leaves
  misc_feature: MA Experiment 20000488 PARAMETER Experiment Name: Zm_50mM_NH4NO3_L_to_H_P Parameter: Treatment Value: 50mM NH4NO3 vs. 100mM Mannitol
  misc_feature: MA Experiment ID: 20000492 Result: Up-regulated in Transcription
  misc_feature: MA Experiment 20000492 PARAMETER Experiment Name: Zm_Hybrid_Seed_Dev_P Parameter: DAP Value: 12
  misc_feature: MA Experiment 20000492 PARAMETER Experiment Name: Zm_Hybrid_Seed_Dev_P Parameter: Organism Value: Zea mays
  misc_feature: MA Experiment 20000492 PARAMETER Experiment Name: Zm_Hybrid_Seed_Dev_P Parameter: Plant Line Value: 35A19
  misc_feature: MA Experiment 20000492 PARAMETER Experiment Name: Zm_Hybrid_Seed_Dev_P Parameter: Tissue Value: Fert Kernel vs. Unfert Floret
  misc_feature: MA Experiment ID: 20000626 Result: Up-regulated in Transcription
  misc_feature: MA Experiment 20000626 PARAMETER Experiment Name: Zm_Herbicide-Treatments_P Parameter: Timepoint (hr) Value: 12
  misc_feature: MA Experiment 20000626 PARAMETER Experiment Name: Zm_Herbicide-Treatments_P Parameter: Tissue Value: Aerial
  misc_feature: MA Experiment 20000626 PARAMETER Experiment Name: Zm_Herbicide-Treatments_P Parameter: Treatment Value: Roundup vs. No Treatment
  misc_feature: MA Experiment ID: 20001606 Result: Up-regulated in Transcription
  misc_feature: MA Experiment 20001606 PARAMETER Experiment Name: Zm_50ppm_KNO3_L-to-H_P Parameter: Age (day) Value: 19
  misc_feature: MA Experiment 20001606 PARAMETER Experiment Name: Zm_50ppm_KNO3_L-to-H_P Parameter: Organism Value: Zea mays
  misc_feature: MA Experiment 20001606 PARAMETER Experiment Name: Zm_50ppm_KNO3_L-to-H_P Parameter: Plant Line Value: 35A19
  misc_feature: MA Experiment 20001606 PARAMETER Experiment Name: Zm_50ppm_KNO3_L-to-H_P Parameter: Timepoint (hr) Value: 8
  misc_feature: MA Experiment 20001606 PARAMETER Experiment Name: Zm_50ppm_KNO3_L-to-H_P Parameter: Tissue Value: Shoots
  misc_feature: MA Experiment 20001606 PARAMETER Experiment Name: Zm_50ppm_KNO3_L-to-H_P Parameter: Treatment Value: 50ppm KNO3 vs. 50ppm KCl
gccgccatctctctctctctctctctctctctcttcatcgccgcagtgcgcgctcctacaacccatcgctcaccaccacctgctcctccagcggcggcgtccagggtgaacccgaatccccaacaccatggcggggggcaagatccagaagaagcgccacggcgcggcgggaggcgcccggctgcagggcggtatcccgttcgagaagtccaaggggcagcacatcctgcggaacccggcgctggtggactccatcgtcgccaaggccggtctcaagcccaccgacaccgtcctggagatcgggccgggcacaggaaacctcaccaagcgcctcctcgaggctggtgtcaaggccgtcgtcgccgtcgagctcgacccgcgcatggtgctcgagctcaaccggcggttccaggggcacccgctctcctcgcgcctcaaggttatccaaggagatgtcctcaaatgtgatctcccatactttgatatttgtgtggcaaacatcccgtaccagatctcatctccccttactttcaagcttctgtcacaccgtccaatctttaggtgtgctgtgattatgtttcaacgtgaatttgccatgagacttgtggcacaaccgggagatagcctctactgtcgtctctccgtgaatgtgcagctcctgtcacgagtgtcgcatctcctgaaggtggggaggaacaactttaggcctccacccaaagttgattcatcagttgtgcgaatagagcccaggaagcccctccctcctgtcagcttcaaggagtgggatgggcttgtgaggatttgtttcaaccggaagaacaagaccctgggctccctctttaaacagaaacgtgttctggaattgctagagaagaactacaagactatgcagtctctccaaactgtgcaagatgcagaaatgggtgaggagaagatgtccgcagacgatgtcgcgttgctggctaatatggttgaagatatgagcatggagactggctatgataaggaagatgatgaaatggaaatggatgatgcagacatggctggagatggtgctgcaagctttaaagaaaagattatgggtatattgcagcagggcgattttgcagaaaagagaggttccaagctgagccaagttgatttcttatacctgctgtccctcttcaacaaagctggtatacatttctcgtgattggtggtccagcttctcttcagtagtagtctgtttctttctgttttatttgtcgtgctgttaatgtacttattagttactgaaaaaacctctaagcttgtgctcgtagaaattttttacaggctccgtcctagtttgagct

SEQ ID NO: 7487 - protein, 354 aa, Zea mays subsp. mays
  peptide (1)..(354): Ceres Seq. ID no. 12408769
  misc_feature (1)..(354): Homolog of NCBI NO: 15226591 NR Description: putative dimethyladenosine transferase; protein At2g47420.1, supported by cDNA: gi_14532649, supported by cDNA: [Arabidopsis thaliana] >gi|7433486|pir||T00442 probable
  misc_feature (21)..(302): Homolog of NCBI NO: 21313560 NR Description: RIKEN cDNA 1500031M22 [Mus musculus]
  misc_feature (312)..(354): Homolog of NCBI NO: 21313560 NR Description: RIKEN cDNA 1500031M22 [Mus musculus]
  misc_feature (21)..(302): Homolog of NCBI NO: 7657198 NR Description: putative dimethyladenosine transferase [Homo
  misc_feature (312)..(354): Homolog of NCBI NO: 7657198 NR Description: putative dimethyladenosine transferase [Homo
  misc_feature (21)..(302): Homolog of NCBI NO: 27151490 NR Description: Probable dimethyladenosine transferase (S-
  misc_feature (312)..(354): Homolog of NCBI NO: 27151490 NR Description: Probable dimethyladenosine transferase (S-
  misc_feature (5)..(300): Homolog of NCBI NO: 21358017 NR Description: CG11837-PA [Drosophila melanogaster]
  misc_feature (314)..(354): Homolog of NCBI NO: 21358017 NR Description: CG11837-PA [Drosophila melanogaster]
  misc_feature (2)..(302): Homolog of NCBI NO: 34854204 NR Description: similar to RIKEN cDNA 1500031M22 [Rattus
MAGGKIQKKRHGAAGGARLQGGIPFEKSKGQHILRNPALVDSIVAKAGLKPTDTVLEIGPGTGNLTKRLLEAGVKAVVAVELDPRMVLELNRRFQGHPLSSRLKVIQGDVLKCDLPYFDICVANIPYQISSPLTFKLLSHRPIFRCAVIMFQREFAMRLVAQPGDSLYCRLSVNVQLLSRVSHLLKVGRNNFRPPPKVDSSVVRIEPRKPLPPVSFKEWDGLVRICFNRKNKTLGSLFKQKRVLELLEKNYKTMQSLQTVQDAEMGEEKMSADDVALLANMVEDMSMETGYDKEDDEMEMDDADMAGDGAASFKEKIMGILQQGDFAEKRGSKLSQVDFLYLLSLFNKAGIHFS

SEQ ID NO: 7488 - protein, 269 aa, Zea mays subsp. mays
  peptide (1)..(269): Ceres Seq. ID no. 12408770
  misc_feature (1)..(269): Homolog of NCBI NO: 15226591 NR Description: putative dimethyladenosine transferase; protein At2g47420.1, supported by cDNA: gi_14532649, supported by cDNA: [Arabidopsis thaliana] >gi|7433486|pir||T00442 probable
  misc_feature (1)..(217): Homolog of NCBI NO: 21313560 NR Description: RIKEN cDNA 1500031M22 [Mus musculus]
  misc_feature (227)..(269): Homolog of NCBI NO: 21313560 NR Description: RIKEN cDNA 1500031M22 [Mus musculus]
  misc_feature (1)..(217): Homolog of NCBI NO: 7657198 NR Description: putative dimethyladenosine transferase [Homo
  misc_feature (227)..(269): Homolog of NCBI NO: 7657198 NR Description: putative dimethyladenosine transferase [Homo
  misc_feature (1)..(217): Homolog of NCBI NO: 27151490 NR Description: Probable dimethyladenosine transferase (S-
  misc_feature (227)..(269): Homolog of NCBI NO: 27151490 NR Description: Probable dimethyladenosine transferase (S-
  misc_feature (1)..(215): Homolog of NCBI NO: 21358017 NR Description: CG11837-PA [Drosophila melanogaster]
  misc_feature (229)..(269): Homolog of NCBI NO: 21358017 NR Description: CG11837-PA [Drosophila melanogaster]
  misc_feature (1)..(217): Homolog of NCBI NO: 34854204 NR Description: similar to RIKEN cDNA 1500031M22 [Rattus
MVLELNRRFQGHPLSSRLKVIQGDVLKCDLPYFDICVANIPYQISSPLTFKLLSHRPIFRCAVIMFQREFAMRLVAQPGDSLYCRLSVNVQLLSRVSHLLKVGRNNFRPPPKVDSSVVRIEPRKPLPPVSFKEWDGLVRICFNRKNKTLGSLFKQKRVLELLEKNYKTMQSLQTVQDAEMGEEKMSADDVALLANMVEDMSMETGYDKEDDEMEMDDADMAGDGAASFKEKIMGILQQGDFAEKRGSKLSQVDFLYLLSLFNKAGIHFS

SEQ ID NO: 7489 - protein, 205 aa, Zea mays subsp. mays
  peptide (1)..(205): Ceres Seq. ID no. 12408771
  misc_feature (1)..(205): Homolog of NCBI NO: 15226591 NR Description: putative dimethyladenosine transferase; protein At2g47420.1, supported by cDNA: gi_14532649, supported by cDNA: [Arabidopsis thaliana] >gi|7433486|pir||T00442 probable
  misc_feature (1)..(153): Homolog of NCBI NO: 21313560 NR Description: RIKEN cDNA 1500031M22 [Mus musculus]
  misc_feature (163)..(205): Homolog of NCBI NO: 21313560 NR Description: RIKEN cDNA 1500031M22 [Mus musculus]
  misc_feature (1)..(153): Homolog of NCBI NO: 7657198 NR Description: putative dimethyladenosine transferase [Homo
  misc_feature (163)..(205): Homolog of NCBI NO: 7657198 NR Description: putative dimethyladenosine transferase [Homo
  misc_feature (1)..(153): Homolog of NCBI NO: 27151490 NR Description: Probable dimethyladenosine transferase (S-
  misc_feature (163)..(205): Homolog of NCBI NO: 27151490 NR Description: Probable dimethyladenosine transferase (S-
  misc_feature (1)..(151): Homolog of NCBI NO: 21358017 NR Description: CG11837-PA [Drosophila melanogaster]
  misc_feature (165)..(205): Homolog of NCBI NO: 21358017 NR Description: CG11837-PA [Drosophila melanogaster]
  misc_feature (1)..(153): Homolog of NCBI NO: 34854204 NR Description: similar to RIKEN cDNA 1500031M22 [Rattus
MFQREFAMRLVAQPGDSLYCRLSVNVQLLSRVSHLLKVGRNNFRPPPKVDSSVVRIEPRKPLPPVSFKEWDGLVRICFNRKNKTLGSLFKQKRVLELLEKNYKTMQSLQTVQDAEMGEEKMSADDVALLANMVEDMSMETGYDKEDDEMEMDDADMAGDGAASFKEKIMGILQQGDFAEKRGSKLSQVDFLYLLSLFNKAGIHFS

SEQ ID NO: 7490 - DNA, 1432 bp, Zea mays subsp. mays
  misc_feature (1)..(1432): Ceres Seq. ID no. 12357962
  misc_feature: MA Experiment ID: 108504 Result: Up-regulated in Transcription
  misc_feature: MA Experiment 108504 PARAMETER Experiment Name: Zm_Drought_P Parameter: Age (day) Value: 8
  misc_feature: MA Experiment 108504 PARAMETER Experiment Name: Zm_Drought_P Parameter: Organism Value: Zea mays
  misc_feature: MA Experiment 108504 PARAMETER Experiment Name: Zm_Drought_P Parameter: Plant Line Value: 35A19
  misc_feature: MA Experiment 108504 PARAMETER Experiment Name: Zm_Drought_P Parameter: Timepoint (hr) Value: 12
  misc_feature: MA Experiment 108504 PARAMETER Experiment Name: Zm_Drought_P Parameter: Tissue Value: Aerial
  misc_feature: MA Experiment 108504 PARAMETER Experiment Name: Zm_Drought_P Parameter: Treatment Value: Drought vs. No Drought
  misc_feature: MA Experiment ID: 108522 Result: Up-regulated in Transcription
  misc_feature: MA Experiment 108522 PARAMETER Experiment Name: Zm_42deg_Heat_P Parameter: Age (day) Value: 8
  misc_feature: MA Experiment 108522 PARAMETER Experiment Name: Zm_42deg_Heat_P Parameter: Organism Value: Zea mays
  misc_feature: MA Experiment 108522 PARAMETER Experiment Name: Zm_42deg_Heat_P Parameter: Plant Line Value: 35A19
  misc_feature: MA Experiment 108522 PARAMETER Experiment Name: Zm_42deg_Heat_P Parameter: Temperature (deg C) Value: 42 vs. 22
  misc_feature: MA Experiment 108522 PARAMETER Experiment Name: Zm_42deg_Heat_P Parameter: Timepoint (hr) Value: 1
  misc_feature: MA Experiment 108522 PARAMETER Experiment Name: Zm_42deg_Heat_P Parameter: Tissue Value: Aerial
  misc_feature: MA Experiment ID: 108523 Result: Up-regulated in Transcription
  misc_feature: MA Experiment 108523 PARAMETER Experiment Name: Zm_42deg_Heat_P Parameter: Age (day) Value: 8
  misc_feature: MA Experiment 108523 PARAMETER Experiment Name: Zm_42deg_Heat_P Parameter: Organism Value: Zea mays
  misc_feature: MA Experiment 108523 PARAMETER Experiment Name: Zm_42deg_Heat_P Parameter: Plant Line Value: 35A19
  misc_feature: MA Experiment 108523 PARAMETER Experiment Name: Zm_42deg_Heat_P Parameter: Temperature (deg C) Value: 42 vs. 22
  misc_feature: MA Experiment 108523 PARAMETER Experiment Name: Zm_42deg_Heat_P Parameter: Timepoint (hr) Value: 6
  misc_feature: MA Experiment 108523 PARAMETER Experiment Name: Zm_42deg_Heat_P Parameter: Tissue Value: Aerial
  misc_feature: MA Experiment ID: 108556 Result: Up-regulated in Transcription
  misc_feature: MA Experiment 108556 PARAMETER Experiment Name: Zm_Drought_P Parameter: Age (day) Value: 9
  misc_feature: MA Experiment 108556 PARAMETER Experiment Name: Zm_Drought_P Parameter: Organism Value: Zea mays
  misc_feature: MA Experiment 108556 PARAMETER Experiment Name: Zm_Drought_P Parameter: Plant Line Value: 35A19
  misc_feature: MA Experiment 108556 PARAMETER Experiment Name: Zm_Drought_P Parameter: Timepoint (hr) Value: 24
  misc_feature: MA Experiment 108556 PARAMETER Experiment Name: Zm_Drought_P Parameter: Tissue Value: Aerial
  misc_feature: MA Experiment 108556 PARAMETER Experiment Name: Zm_Drought_P Parameter: Treatment Value: Drought vs. No Drought
  misc_feature: MA Experiment ID: 108597 Result: Up-regulated in Transcription
  misc_feature: MA Experiment 108597 PARAMETER Experiment Name: Zm_100uM_ABA_P Parameter: Age (day) Value: 9
  misc_feature: MA Experiment 108597 PARAMETER Experiment Name: Zm_100uM_ABA_P Parameter: Organism Value: Zea mays
  misc_feature: MA Experiment 108597 PARAMETER Experiment Name: Zm_100uM_ABA_P Parameter: Plant Line Value: 35A19
  misc_feature: MA Experiment 108597 PARAMETER Experiment Name: Zm_100uM_ABA_P Parameter: Timepoint (hr) Value: 24
  misc_feature: MA Experiment 108597 PARAMETER Experiment Name: Zm_100uM_ABA_P Parameter: Tissue Value: Aerial
  misc_feature: MA Experiment 108597 PARAMETER Experiment Name: Zm_100uM_ABA_P Parameter: Treatment Value: 100uM ABA vs. No Treatment
  misc_feature: MA Experiment ID: 108689 Result: Up-regulated in Transcription
  misc_feature: MA Experiment 108689 PARAMETER Experiment Name: Zm_Drought_Roots_P Parameter: Age (day) Value: 9
  misc_feature: MA Experiment 108689 PARAMETER Experiment Name: Zm_Drought_Roots_P Parameter: Organism Value: Zea mays
  misc_feature: MA Experiment 108689 PARAMETER Experiment Name: Zm_Drought_Roots_P Parameter: Plant Line Value: 35A19
  misc_feature: MA Experiment 108689 PARAMETER Experiment Name: Zm_Drought_Roots_P Parameter: Timepoint (hr) Value: 24
  misc_feature: MA Experiment 108689 PARAMETER Experiment Name: Zm_Drought_Roots_P Parameter: Tissue Value: Roots
  misc_feature: MA Experiment 108689 PARAMETER Experiment Name: Zm_Drought_Roots_P Parameter: Treatment Value: Drought vs. No Drought
  misc_feature: MA Experiment ID: 20000478 Result: Up-regulated in Transcription
  misc_feature: MA Experiment 20000478 PARAMETER Experiment Name: Zm_5mM_SA_P Parameter: Age (day) Value: 11
  misc_feature: MA Experiment 20000478 PARAMETER Experiment Name: Zm_5mM_SA_P Parameter: Organism Value: Zea mays
  misc_feature: MA Experiment 20000478 PARAMETER Experiment Name: Zm_5mM_SA_P Parameter: Plant Line Value: 35A19
  misc_feature: MA Experiment 20000478 PARAMETER Experiment Name: Zm_5mM_SA_P Parameter: Timepoint (hr) Value: 72
  misc_feature: MA Experiment 20000478 PARAMETER Experiment Name: Zm_5mM_SA_P Parameter: Tissue Value: Aerial
  misc_feature: MA Experiment 20000478 PARAMETER Experiment Name: Zm_5mM_SA_P Parameter: Treatment Value: 5mM SA vs. No Treatment
  misc_feature: MA Experiment ID: 20000479 Result: Up-regulated in Transcription
  misc_feature: MA Experiment 20000479 PARAMETER Experiment Name: Zm_Drought_P Parameter: Age (day) Value: 10
  misc_feature: MA Experiment 20000479 PARAMETER Experiment Name: Zm_Drought_P Parameter: Organism Value: Zea mays
  misc_feature: MA Experiment 20000479 PARAMETER Experiment Name: Zm_Drought_P Parameter: Plant Line Value: 35A19
  misc_feature: MA Experiment 20000479 PARAMETER Experiment Name: Zm_Drought_P Parameter: Timepoint (hr) Value: 48
  misc_feature: MA Experiment 20000479 PARAMETER Experiment Name: Zm_Drought_P Parameter: Tissue Value: Aerial
  misc_feature: MA Experiment 20000479 PARAMETER Experiment Name: Zm_Drought_P Parameter: Treatment Value: Drought vs. No Drought
  misc_feature: MA Experiment ID: 20000480 Result: Up-regulated in Transcription
  misc_feature: MA Experiment 20000480 PARAMETER Experiment Name: Zm_Drought_P Parameter: Age (day) Value: 11
  misc_feature: MA Experiment 20000480 PARAMETER Experiment Name: Zm_Drought_P Parameter: Organism Value: Zea mays
  misc_feature: MA Experiment 20000480 PARAMETER Experiment Name: Zm_Drought_P Parameter: Plant Line Value: 35A19
  misc_feature: MA Experiment 20000480 PARAMETER Experiment Name: Zm_Drought_P Parameter: Timepoint (hr) Value: 72
  misc_feature: MA Experiment 20000480 PARAMETER Experiment Name: Zm_Drought_P Parameter: Tissue Value: Aerial
  misc_feature: MA Experiment 20000480 PARAMETER Experiment Name: Zm_Drought_P Parameter: Treatment Value: Drought vs. No Drought
  misc_feature: MA Experiment ID: 20000535 Result: Up-regulated in Transcription
  misc_feature: MA Experiment 20000535 PARAMETER Experiment Name: Zm_Hybrid_Seed_Dev_P Parameter: DAP Value: 30 vs. 12
  misc_feature: MA Experiment 20000535 PARAMETER Experiment Name: Zm_Hybrid_Seed_Dev_P Parameter: Organism Value: Zea mays
  misc_feature: MA Experiment 20000535 PARAMETER Experiment Name: Zm_Hybrid_Seed_Dev_P Parameter: Plant Line Value: 35A19
  misc_feature: MA Experiment 20000535 PARAMETER Experiment Name: Zm_Hybrid_Seed_Dev_P Parameter: Tissue Value: Embryo vs. Unfert Floret
gcaggttccagtattccaccacgcggcgtcgcctgccgaaccccgaaccttctcgaggtcgaggcccctcccctttcgccaggaggtgcgcacggcacgactaacctccacactccccactagcttttcttcccagtttgctccgattttgattccatgaaaacaatgagcaggcgcaacagccgtaccatctatgtaggcaatctccctggggacatccgtgagagggaggttgaggatctcttctacaagtatggccgtattttggatattgacttgaaaatacctccgagacctcctggatacgcattcgttgagtttgaggatccacgtgatgctgatgatgcaatttatggccgtgatgggtataactttgatggctacaggttgagggttgaattagctcatggtggcagaggccagtcttattcttatgatcgttcaagcagctatagcagtgcatgccgtggaggtgtttctaggcgctctgatttccgtgttatggtcactggtttaccctcatcggcatcgtggcaagatctgaaggaccacatgcggcgcgctggtgatgtctgtttctctgatgtataccgtgaggctggagaaactattggaattgtggattatacaaattatgacgatatgaaatacgcgattaggaagcttgatgactcacagttcaggaatgcattttcaagagcatatatcagggtgagggagtatgatgctagatcacgaagcagaagccgtagccactcgtactctagaacccccagctacagcaggagcaggagtccaaaatctgtttctcagtcaccctcatctgtggatgaaagatcgctatcaagatctcgatccccaatttcttctccttctcatgcaagatatgcgacaagccctaggagcagaagcgcatcccgttctcggtctcctgttagatccgattgaactttgagagcccttgaagcagtgagcagccccagggagaagaaaggaacttgagagtatgccgtgccatcacaatggtccgagtgattatgctgttgccactgctccctcacatttaagaggtttcctcttatttagacggcgcatttaattaacattatcttgctaaagagagacttatgcgtagtctacttgtgtactcgttcgtttgtcctcatgttcttggcttcaggaactctggttttttatcattgtacccatagtaaaacctagatgtagttggggtatgccgtatgcgtctatattcggttggtcgaatgtaaatctggatgcatatatgcatctgtttggtttcatttaggcctttccttggtttcgtgattaatgacaacataagcttattgctgtgatcaaagtatattttgtanaggtaattaaagctagtcncncaataatggagattgcttagacaacgtatggtttt

SEQ ID NO: 7491 - protein, 263 aa, Zea mays subsp. mays
  peptide (1)..(263): Ceres Seq. ID no. 12357963
  misc_feature (12)..(80): Pfam Name: RNA recognition motif. (a.k.a. RRM, RBD, or RNP domain) Pfam Description: RNA recognition motif. (a.k.a. RRM, RBD, or RNP
  misc_feature (4)..(263): Homolog of NCBI NO: 34894608 NR Description: putative pre-mRNA splicing factor SF2 [Oryza
  misc_feature (4)..(259): Homolog of NCBI NO: 33146854 NR Description: putative pre-mRNA splicing factor SF2 [Oryza
  misc_feature (4)..(263): Homolog of NCBI NO: 22329428 NR Description: arginine/serine-rich splicing factor, atSRp30;
  misc_feature (4)..(260): Homolog of NCBI NO: 4775270 NR Description: SF2/ASF-like splicing modulator Srp30 thaliana] >gi|23297699|gb|AAN13011.1| putative SF2/ASF splicing
  misc_feature (4)..(262): Homolog of NCBI NO: 30678391 NR Description: pre-mRNA splicing factor SF2 (SR1 protein)
  misc_feature (4)..(242): Homolog of NCBI NO: 4775271 NR Description: SF2/ASF-like splicing modulator Srp30, variant 1
  misc_feature (4)..(261): Homolog of NCBI NO: 2443473 NR Description: ASF/SF2 homolog [Arabidopsis thaliana]
  misc_feature (4)..(263): Homolog of NCBI NO: 12324445 NR Description: putative splicing factor; 53460-55514
  misc_feature (4)..(259): Homolog of NCBI NO: 22331714 NR Description: arginine/serine-rich splicing factor (atSRp34),
  misc_feature (4)..(184): Homolog of NCBI NO: 7484802 NR Description: alternative splicing factor ASF-2 homolog - Arabidopsis thaliana >gi|3193304|gb|AAC19288.1| contains
MKTMSRRNSRTIYVGNLPGDIREREVEDLFYKYGRILDIDLKIPPRPPGYAFVEFEDPRDADDAIYGRDGYNFDGYRLRVELAHGGRGQSYSYDRSSSYSSACRGGVSRRSDFRVMVTGLPSSASWQDLKDHMRRAGDVCFSDVYREAGETIGIVDYTNYDDMKYAIRKLDDSQFRNAFSRAYIRVREYDARSRSRSRSHSYSRTPSYSRSRSPKSVSQSPSSVDERSLSRSRSPISSPSHARYATSPRSRSASRSRSPVRSD

SEQ ID NO: 7492 - protein, 260 aa, Zea mays subsp. mays
  peptide (1)..(260): Ceres Seq. ID no. 12357964
  misc_feature (9)..(77): Pfam Name: RNA recognition motif. (a.k.a. RRM, RBD, or RNP domain) Pfam Description: RNA recognition motif. (a.k.a. RRM, RBD, or RNP
  misc_feature (1)..(260): Homolog of NCBI NO: 34894608 NR Description: putative pre-mRNA splicing factor SF2 [Oryza
  misc_feature (1)..(256): Homolog of NCBI NO: 33146854 NR Description: putative pre-mRNA splicing factor SF2 [Oryza
  misc_feature (1)..(260): Homolog of NCBI NO: 22329428 NR Description: arginine/serine-rich splicing factor, atSRp30;
  misc_feature (1)..(257): Homolog of NCBI NO: 4775270 NR Description: SF2/ASF-like splicing modulator Srp30 thaliana] >gi|23297699|gb|AAN13011.1| putative SF2/ASF splicing
  misc_feature (1)..(259): Homolog of NCBI NO: 30678391 NR Description: pre-mRNA splicing factor SF2 (SR1 protein)
  misc_feature (1)..(239): Homolog of NCBI NO: 4775271 NR Description: SF2/ASF-like splicing modulator Srp30, variant 1
  misc_feature (1)..(258): Homolog of NCBI NO: 2443473 NR Description: ASF/SF2 homolog [Arabidopsis thaliana]
  misc_feature (1)..(260): Homolog of NCBI NO: 12324445 NR Description: putative splicing factor; 53460-55514
  misc_feature (1)..(256): Homolog of NCBI NO: 22331714 NR Description: arginine/serine-rich splicing factor (atSRp34),
  misc_feature (1)..(181): Homolog of NCBI NO: 7484802 NR Description: alternative splicing factor ASF-2 homolog - Arabidopsis thaliana >gi|3193304|gb|AAC19288.1| contains
MSRRNSRTIYVGNLPGDIREREVEDLFYKYGRILDIDLKIPPRPPGYAFVEFEDPRDADDAIYGRDGYNFDGYRLRVELAHGGRGQSYSYDRSSSYSSACRGGVSRRSDFRVMVTGLPSSASWQDLKDHMRRAGDVCFSDVYREAGETIGIVDYTNYDDMKYAIRKLDDSQFRNAFSRAYIRVREYDARSRSRSRSHSYSRTPSYSRSRSPKSVSQSPSSVDERSLSRSRSPISSPSHARYATSPRSRSASRSRSPVRSD

SEQ ID NO: 7493 - protein, 148 aa, Zea mays subsp. mays
  peptide (1)..(148): Ceres Seq. ID no. 12357965
  misc_feature (1)..(145): Homolog of NCBI NO: 4775270 NR Description: SF2/ASF-like splicing modulator Srp30 thaliana] >gi|23297699|gb|AAN13011.1| putative SF2/ASF splicing
  misc_feature (1)..(147): Homolog of NCBI NO: 30678391 NR Description: pre-mRNA splicing factor SF2 (SR1 protein)
  misc_feature (1)..(127): Homolog of NCBI NO: 4775271 NR Description: SF2/ASF-like splicing modulator Srp30, variant 1
  misc_feature (1)..(146): Homolog of NCBI NO: 2443473 NR Description: ASF/SF2 homolog [Arabidopsis thaliana]
  misc_feature (1)..(148): Homolog of NCBI NO: 12324445 NR Description: putative splicing factor; 53460-55514
  misc_feature (1)..(144): Homolog of NCBI NO: 22331714 NR Description: arginine/serine-rich splicing factor (atSRp34),
  misc_feature (1)..(69): Homolog of NCBI NO: 7484802 NR Description: alternative splicing factor ASF-2 homolog - Arabidopsis thaliana >gi|3193304|gb|AAC19288.1| contains
  misc_feature (1)..(148): Homolog of NCBI NO: 34894608 NR Description: putative pre-mRNA splicing factor SF2 [Oryza
  misc_feature (1)..(144): Homolog of NCBI NO: 33146854 NR Description: putative pre-mRNA splicing factor SF2 [Oryza
  misc_feature (1)..(148): Homolog of NCBI NO: 22329428 NR Description: arginine/serine-rich splicing factor, atSRp30;
MVTGLPSSASWQDLKDHMRRAGDVCFSDVYREAGETIGIVDYTNYDDMKYAIRKLDDSQFRNAFSRAYIRVREYDARSRSRSRSHSYSRTPSYSRSRSPKSVSQSPSSVDERSLSRSRSPISSPSHARYATSPRSRSASRSRSPVRSD

SEQ ID NO: 7494 - DNA, 1692 bp, Zea mays subsp. mays
  misc_feature (1)..(1692): Ceres Seq. ID no. 12408764
  misc_feature: MA Experiment ID: 108527 Result: Up-regulated in Transcription
  misc_feature: MA Experiment 108527 PARAMETER Experiment Name: Zm_5mM_NO_P Parameter: Age (day) Value: 8
  misc_feature: MA Experiment 108527 PARAMETER Experiment Name: Zm_5mM_NO_P Parameter: Organism Value: Zea mays
  misc_feature: MA Experiment 108527 PARAMETER Experiment Name: Zm_5mM_NO_P Parameter: Plant Line Value: 35A19
  misc_feature: MA Experiment 108527 PARAMETER Experiment Name: Zm_5mM_NO_P Parameter: Timepoint (hr) Value: 6
  misc_feature: MA Experiment 108527 PARAMETER Experiment Name: Zm_5mM_NO_P Parameter: Tissue Value: Aerial
  misc_feature: MA Experiment 108527 PARAMETER Experiment Name: Zm_5mM_NO_P Parameter: Treatment Value: 5mM NO vs. No Treatment
  misc_feature: MA Experiment ID: 108528 Result: Down-regulated in Transcription
  misc_feature: MA Experiment 108528 PARAMETER Experiment Name: Zm_Imbibed_Seeds_P Parameter: Age (day) Value: 5 vs. 2
  misc_feature: MA Experiment 108528 PARAMETER Experiment Name: Zm_Imbibed_Seeds_P Parameter: Organism Value: Zea mays
  misc_feature: MA Experiment 108528 PARAMETER Experiment Name: Zm_Imbibed_Seeds_P Parameter: Plant Line Value: 35A19
  misc_feature: MA Experiment 108528 PARAMETER Experiment Name: Zm_Imbibed_Seeds_P Parameter: Tissue Value: Aerial vs. Embryo
  misc_feature: MA Experiment ID: 108529 Result: Up-regulated in Transcription
  misc_feature: MA Experiment 108529 PARAMETER Experiment Name: Zm_Imbibed_Seeds_P Parameter: Age (day) Value: 5 vs. 2
  misc_feature: MA Experiment 108529 PARAMETER Experiment Name: Zm_Imbibed_Seeds_P Parameter: Organism Value: Zea mays
  misc_feature: MA Experiment 108529 PARAMETER Experiment Name: Zm_Imbibed_Seeds_P Parameter: Plant Line Value: 35A19
  misc_feature: MA Experiment 108529 PARAMETER Experiment Name: Zm_Imbibed_Seeds_P Parameter: Tissue Value: Roots vs. Embryo
  misc_feature: MA Experiment ID: 108530 Result: Down-regulated in Transcription
  misc_feature: MA Experiment 108530 PARAMETER Experiment Name: Zm_Imbibed_Seeds_P Parameter: Age (day) Value: 6 vs. 2
  misc_feature: MA Experiment 108530 PARAMETER Experiment Name: Zm_Imbibed_Seeds_P Parameter: Organism Value: Zea mays
  misc_feature: MA Experiment 108530 PARAMETER Experiment Name: Zm_Imbibed_Seeds_P Parameter: Plant Line Value: 35A19
  misc_feature: MA Experiment 108530 PARAMETER Experiment Name: Zm_Imbibed_Seeds_P Parameter: Tissue Value: Aerial vs. Embryo
  misc_feature: MA Experiment ID: 108535 Result: Down-regulated in Transcription
  misc_feature: MA Experiment 108535 PARAMETER Experiment Name: Zm_Meristem_P Parameter: Age (day) Value: 8
  misc_feature: MA Experiment 108535 PARAMETER Experiment Name: Zm_Meristem_P Parameter: Organism Value: Zea mays
  misc_feature: MA Experiment 108535 PARAMETER Experiment Name: Zm_Meristem_P Parameter: Plant Line Value: 35A19
  misc_feature: MA Experiment 108535 PARAMETER Experiment Name: Zm_Meristem_P Parameter: Tissue Value: Root Meristem vs. Above Root Meristem
  misc_feature: MA Experiment ID: 108543 Result: Down-regulated in Transcription
  misc_feature: MA Experiment ID: 108545 Result: Down-regulated in Transcription
  misc_feature: MA Experiment 108545 PARAMETER Experiment Name: Zm_Imbibed_Seeds_P Parameter: Age (day) Value: 3 vs. 2
  misc_feature: MA Experiment 108545 PARAMETER Experiment Name: Zm_Imbibed_Seeds_P Parameter: Organism Value: Zea mays
  misc_feature: MA Experiment 108545 PARAMETER Experiment Name: Zm_Imbibed_Seeds_P Parameter: Plant Line Value: 35A19
  misc_feature: MA Experiment 108545 PARAMETER Experiment Name: Zm_Imbibed_Seeds_P Parameter: Tissue Value: Aerial vs. Embryo
  misc_feature: MA Experiment ID: 108547 Result: Down-regulated in Transcription
  misc_feature: MA Experiment 108547 PARAMETER Experiment Name: Zm_Imbibed_Seeds_P Parameter: Age (day) Value: 4 vs. 2
  misc_feature: MA Experiment 108547 PARAMETER Experiment Name: Zm_Imbibed_Seeds_P Parameter: Organism Value: Zea mays
  misc_feature: MA Experiment 108547 PARAMETER Experiment Name: Zm_Imbibed_Seeds_P Parameter: Plant Line Value: 35A19
  misc_feature: MA Experiment 108547 PARAMETER Experiment Name: Zm_Imbibed_Seeds_P Parameter: Tissue Value: Aerial vs. Embryo
  misc_feature: MA Experiment ID: 108687 Result: Up-regulated in Transcription
  misc_feature: MA Experiment 108687 PARAMETER Experiment Name: Zm_Embryos-Flowers__P Parameter: Tissue Value: Embryo vs. Aerial+
  misc_feature: MA Experiment ID: 20000108 Result: Down-regulated in Transcription
  misc_feature: MA Experiment 20000108 PARAMETER Experiment Name: Zm_Root-Tips_P Parameter: Age (day) Value: 12
  misc_feature: MA Experiment 20000108 PARAMETER Experiment Name: Zm_Root-Tips_P Parameter: Organism Value: Zea mays
  misc_feature: MA Experiment 20000108 PARAMETER Experiment Name: Zm_Root-Tips_P Parameter: Tissue Value: Root tips vs. Root mid region    35
  misc_feature: MA Experiment 20000108 PARAMETER Experiment Name: Zm_Root-Tips_P Parameter: Tissue Value: Root tips vs. Root mid region   Sequence Listing-Misc Features (4)
  misc_feature: MA Experiment ID: 20000492 Result: Up-regulated in Transcription
  misc_feature: MA Experiment 20000492 PARAMETER Experiment Name: Zm_Hybrid_Seed_Dev_P Parameter: DAP Value: 12
  misc_feature: MA Experiment 20000492 PARAMETER Experiment Name: Zm_Hybrid_Seed_Dev_P Parameter: Organism Value: Zea mays
  misc_feature: MA Experiment 20000492 PARAMETER Experiment Name: Zm_Hybrid_Seed_Dev_P Parameter: Plant Line Value: 35A19
  misc_feature: MA Experiment 20000492 PARAMETER Experiment Name: Zm_Hybrid_Seed_Dev_P Parameter: Tissue Value: Fert Kernel vs. Unfert Floret
  misc_feature: MA Experiment ID: 20000535 Result: Up-regulated in Transcription
  misc_feature: MA Experiment 20000535 PARAMETER Experiment Name: Zm_Hybrid_Seed_Dev_P Parameter: DAP Value: 30 vs. 12
  misc_feature: MA Experiment 20000535 PARAMETER Experiment Name: Zm_Hybrid_Seed_Dev_P Parameter: Organism Value: Zea mays
  misc_feature: MA Experiment 20000535 PARAMETER Experiment Name: Zm_Hybrid_Seed_Dev_P Parameter: Plant Line Value: 35A19
  misc_feature: MA Experiment 20000535 PARAMETER Experiment Name: Zm_Hybrid_Seed_Dev_P Parameter: Tissue Value: Embryo vs. Unfert Floret
ggccctctagctagctccggctccgcccactctctatccagtagctagccacaggctctcatccgcctcttgttccttgtcttgttcatggatgcagagacactcaacatcttcccttcccagcccatgcatgtggagccgtcgccgaagggggagattagtttagtcctgtcaccggcgccggtgggatccaagcagcctaggtcaccggaccatcaccatcaccagcaggcggccatggaggagttggcggggagcaggaggcagcagcaggagcacctccacctgcagcaccaccaaccctttgctgccgctgctgagccagcagcacccgggatgatcaaagatgtcaagccactggccaagaaggatcacaggagaggcacatcgaccgctgaacgcgacccaaaaacgctgagaaggctggcccagaacagggaggctgcaaggaaaagcaggctaaggaagaaggcttacatccagcaactcgagtccagcaggatcaggctagctcagctcgaacaagaactgcacactgcaagagctcagggagttttcttccccaacagtggcatcctcgctgaccaaggtgtcgccggcaaaggcgtccccatcggcggcatcgacggcctcagctcagaggcggcgatgttcgacgtggagtacgggcggtggcaggaggagcactaccggctgatgtacgagcttcgggcggcgctgcagcagcacctgccggagggggagctgcagatgtacgtggagagctgcctggcgcaccacgacgagatggtgggcatcaaggagggcgccatcaagggcgacgtcttccacctcatctccggcgtctggcggagccccgccgagcgctgcttcctctggctcggcggcttccgcccctccgaagtcatcaagatgctgctgagccacgtagagcccctgaccgaacagcagatcgtgggcgtgtacgggctgcagcagtcggcgctggagacggaggaagcgctgagccagggcctggaggcgctctaccagtcgctgtctgacaccgtggtctccgacgcgctcagctgcccctcgaacgtctccaactacatgggtcagatggccgtcgccatgaacaagctctccacgctcgagggcttcgtcagacaagctgagaaccttcggcagcagacgctgcaccggctgcaccaggtcctgacgacgcggcagatggcgcggtcgctgctggccgtgtcggactacttccaccgcctccgcacgctgagctcgctctgggtcacacgccccagggcaccgcaggagcaataatagggccacagctggtgacggcggcgctgatgaatggtgatcgccggccgccgcatacaacggcgccacacgcgcatgtgtccattcatgcatatatgagtcgtgcatgggcgcatgcatggtgtgtcgttcgtcatcaagaacagagcttgcaggtagagccagttagggccggccgggggagagagagctagtgaggacgacaaaccaaccaaaggataatgttaatcttggcgacgattgtcgtgttgcttgctttgtagctatagctaggtgtagttgatcgttcgatcgcgatctatcgatcgatcggctgctgctgtagtcgatgcggtggagtgatgatgttgttctaagttaattatctctcatgatcaccgg

SEQ ID NO: 7495 - protein, 407 aa, Zea mays subsp. mays
  peptide (1)..(407): Ceres Seq. ID no. 12408765
  misc_feature (106)..(162): Pfam Name: bZIP transcription factor Pfam Description: bZIP transcription factor
  misc_feature (40)..(402): Homolog of NCBI NO: 30681632 NR Description: bZIP transcription factor family protein
  misc_feature (5)..(20): Homolog of NCBI NO: 30681632 NR Description: bZIP transcription factor family protein
  misc_feature (40)..(402): Homolog of NCBI NO: 14329655 NR Description: bZIP transcription factor [Arabidopsis thaliana]
  misc_feature (5)..(20): Homolog of NCBI NO: 14329655 NR Description: bZIP transcription factor [Arabidopsis thaliana]
  misc_feature (93)..(402): Homolog of NCBI NO: 9759540 NR Description: bZIP transcription factor-like protein
  misc_feature (101)..(402): Homolog of NCBI NO: 6288682 NR Description: bZIP transcription factor [Nicotiana tabacum]
  misc_feature (86)..(402): Homolog of NCBI NO: 15148926 NR Description: TGA-type basic leucine zipper protein TGA2.2
  misc_feature (101)..(402): Homolog of NCBI NO: 15148924 NR Description: TGA-type basic leucine zipper protein TGA2.1
  misc_feature (106)..(402): Homolog of NCBI NO: 422029 NR Description: transcription factor OBF3.2 - maize
  misc_feature (106)..(402): Homolog of NCBI NO: 422028 NR Description: transcription factor OBF3.1 - maize
MDAETLNIFPSQPMHVEPSPKGEISLVLSPAPVGSKQPRSPDHHHHQQAAMEELAGSRRQQQEHLHLQHHQPFAAAAEPAAPGMIKDVKPLAKKDHRRGTSTAERDPKTLRRLAQNREAARKSRLRKKAYIQQLESSRIRLAQLEQELHTARAQGVFFPNSGILADQGVAGKGVPIGGIDGLSSEAAMFDVEYGRWQEEHYRLMYELRAALQQHLPEGELQMYVESCLAHHDEMVGIKEGAIKGDVFHLISGVWRSPAERCFLWLGGFRPSEVIKMLLSHVEPLTEQQIVGVYGLQQSALETEEALSQGLEALYQSLSDTVVSDALSCPSNVSNYMGQMAVAMNKLSTLEGFVRQAENLRQQTLHRLHQVLTTRQMARSLLAVSDYFHRLRTLSSLWVTRPRAPQEQ

SEQ ID NO: 7496 - protein, 394 aa, Zea mays subsp. mays
  peptide (1)..(394): Ceres Seq. ID no. 12408766
  misc_feature (93)..(149): Pfam Name: bZIP transcription factor Pfam Description: bZIP transcription factor
  misc_feature (27)..(389): Homolog of NCBI NO: 30681632 NR Description: bZIP transcription factor family protein
  misc_feature (27)..(389): Homolog of NCBI NO: 14329655 NR Description: bZIP transcription factor [Arabidopsis thaliana]
  misc_feature (80)..(389): Homolog of NCBI NO: 9759540 NR Description: bZIP transcription factor-like protein
  misc_feature (88)..(389): Homolog of NCBI NO: 6288682 NR Description: bZIP transcription factor [Nicotiana tabacum]
  misc_feature (73)..(389): Homolog of NCBI NO: 15148926 NR Description: TGA-type basic leucine zipper protein TGA2.2
  misc_feature (88)..(389): Homolog of NCBI NO: 15148924 NR Description: TGA-type basic leucine zipper protein TGA2.1
  misc_feature (93)..(389): Homolog of NCBI NO: 422029 NR Description: transcription factor OBF3.2 - maize
  misc_feature (93)..(389): Homolog of NCBI NO: 422028 NR Description: transcription factor OBF3.1 - maize
  misc_feature (93)..(389): Homolog of NCBI NO: 12230709 NR Description: TGACG-sequence specific DNA-binding protein
  misc_feature (93)..(389): Homolog of NCBI NO: 17025920 NR Description: bZIP transcription factor [Oryza sativa]
MHVEPSPKGEISLVLSPAPVGSKQPRSPDHHHHQQAAMEELAGSRRQQQEHLHLQHHQPFAAAAEPAAPGMIKDVKPLAKKDHRRGTSTAERDPKTLRRLAQNREAARKSRLRKKAYIQQLESSRIRLAQLEQELHTARAQGVFFPNSGILADQGVAGKGVPIGGIDGLSSEAAMFDVEYGRWQEEHYRLMYELRAALQQHLPEGELQMYVESCLAHHDEMVGIKEGAIKGDVFHLISGVWRSPAERCFLWLGGFRPSEVIKMLLSHVEPLTEQQIVGVYGLQQSALETEEALSQGLEALYQSLSDTVVSDALSCPSNVSNYMGQMAVAMNKLSTLEGFVRQAENLRQQTLHRLHQVLTTRQMARSLLAVSDYFHRLRTLSSLWVTRPRAPQEQ

SEQ ID NO: 7497 - protein, 357 aa, Zea mays subsp. mays
  peptide (1)..(357): Ceres Seq. ID no. 12408767
  misc_feature (56)..(112): Pfam Name: bZIP transcription factor Pfam Description: bZIP transcription factor
  misc_feature (1)..(352): Homolog of NCBI NO: 30681632 NR Description: bZIP transcription factor family protein
  misc_feature (1)..(352): Homolog of NCBI NO: 14329655 NR Description: bZIP transcription factor [Arabidopsis thaliana]
  misc_feature (43)..(352): Homolog of NCBI NO: 9759540 NR Description: bZIP transcription factor-like protein
  misc_feature (51)..(352): Homolog of NCBI NO: 6288682 NR Description: bZIP transcription factor [Nicotiana tabacum]
  misc_feature (36)..(352): Homolog of NCBI NO: 15148926 NR Description: TGA-type basic leucine zipper protein TGA2.2
  misc_feature (51)..(352): Homolog of NCBI NO: 15148924 NR Description: TGA-type basic leucine zipper protein TGA2.1
  misc_feature (56)..(352): Homolog of NCBI NO: 422029 NR Description: transcription factor OBF3.2 - maize
  misc_feature (56)..(352): Homolog of NCBI NO: 422028 NR Description: transcription factor OBF3.1 - maize
  misc_feature (56)..(352): Homolog of NCBI NO: 12230709 NR Description: TGACG-sequence specific DNA-binding protein
  misc_feature (56)..(352): Homolog of NCBI NO: 17025920 NR Description: bZIP transcription factor [Oryza sativa]
MEELAGSRRQQQEHLHLQHHQPFAAAAEPAAPGMIKDVKPLAKKDHRRGTSTAERDPKTLRRLAQNREAARKSRLRKKAYIQQLESSRIRLAQLEQELHTARAQGVFFPNSGILADQGVAGKGVPIGGIDGLSSEAAMFDVEYGRWQEEHYRLMYELRAALQQHLPEGELQMYVESCLAHHDEMVGIKEGAIKGDVFHLISGVWRSPAERCFLWLGGFRPSEVIKMLLSHVEPLTEQQIVGVYGLQQSALETEEALSQGLEALYQSLSDTVVSDALSCPSNVSNYMGQMAVAMNKLSTLEGFVRQAENLRQQTLHRLHQVLTTRQMARSLLAVSDYFHRLRTLSSLWVTRPRAPQEQ

SEQ ID NO: 7498 - DNA, 1676 bp, Zea mays subsp. mays
  misc_feature (1)..(1676): Ceres Seq. ID no. 12386749
  misc_feature: MA Experiment ID: 108527 Result: Down-regulated in Transcription
  misc_feature: MA Experiment 108527 PARAMETER Experiment Name: Zm_5mM_NO_P Parameter: Age (day) Value: 8
  misc_feature: MA Experiment 108527 PARAMETER Experiment Name: Zm_5mM_NO_P Parameter: Organism Value: Zea mays
  misc_feature: MA Experiment 108527 PARAMETER Experiment Name: Zm_5mM_NO_P Parameter: Plant Line Value: 35A19
  misc_feature: MA Experiment 108527 PARAMETER Experiment Name: Zm_5mM_NO_P Parameter: Timepoint (hr) Value: 6
  misc_feature: MA Experiment 108527 PARAMETER Experiment Name: Zm_5mM_NO_P Parameter: Tissue Value: Aerial
  misc_feature: MA Experiment 108527 PARAMETER Experiment Name: Zm_5mM_NO_P Parameter: Treatment Value: 5mM NO vs. No Treatment
  misc_feature: MA Experiment ID: 108528 Result: Up-regulated in Transcription
  misc_feature: MA Experiment 108528 PARAMETER Experiment Name: Zm_Imbibed_Seeds_P Parameter: Age (day) Value: 5 vs. 2
  misc_feature: MA Experiment 108528 PARAMETER Experiment Name: Zm_Imbibed_Seeds_P Parameter: Organism Value: Zea mays
  misc_feature: MA Experiment 108528 PARAMETER Experiment Name: Zm_Imbibed_Seeds_P Parameter: Plant Line Value: 35A19
  misc_feature: MA Experiment 108528 PARAMETER Experiment Name: Zm_Imbibed_Seeds_P Parameter: Tissue Value: Aerial vs. Embryo
  misc_feature: MA Experiment ID: 108529 Result: Up-regulated in Transcription
  misc_feature: MA Experiment 108529 PARAMETER Experiment Name: Zm_Imbibed_Seeds_P Parameter: Age (day) Value: 5 vs. 2
  misc_feature: MA Experiment 108529 PARAMETER Experiment Name: Zm_Imbibed_Seeds_P Parameter: Organism Value: Zea mays
  misc_feature: MA Experiment 108529 PARAMETER Experiment Name: Zm_Imbibed_Seeds_P Parameter: Plant Line Value: 35A19
  misc_feature: MA Experiment 108529 PARAMETER Experiment Name: Zm_Imbibed_Seeds_P Parameter: Tissue Value: Roots vs. Embryo
  misc_feature: MA Experiment ID: 108530 Result: Up-regulated in Transcription
  misc_feature: MA Experiment 108530 PARAMETER Experiment Name: Zm_Imbibed_Seeds_P Parameter: Age (day) Value: 6 vs. 2
  misc_feature: MA Experiment 108530 PARAMETER Experiment Name: Zm_Imbibed_Seeds_P Parameter: Organism Value: Zea mays
  misc_feature: MA Experiment 108530 PARAMETER Experiment Name: Zm_Imbibed_Seeds_P Parameter: Plant Line Value: 35A19
  misc_feature: MA Experiment 108530 PARAMETER Experiment Name: Zm_Imbibed_Seeds_P Parameter: Tissue Value: Aerial vs. Embryo
  misc_feature: MA Experiment ID: 108535 Result: Down-regulated in Transcription
  misc_feature: MA Experiment 108535 PARAMETER Experiment Name: Zm_Meristem_P Parameter: Age (day) Value: 8
  misc_feature: MA Experiment 108535 PARAMETER Experiment Name: Zm_Meristem_P Parameter: Organism Value: Zea mays
  misc_feature: MA Experiment 108535 PARAMETER Experiment Name: Zm_Meristem_P Parameter: Plant Line Value: 35A19
  misc_feature: MA Experiment 108535 PARAMETER Experiment Name: Zm_Meristem_P Parameter: Tissue Value: Root Meristem vs. Above Root Meristem
  misc_feature: MA Experiment ID: 108543 Result: Up-regulated in Transcription
  misc_feature: MA Experiment ID: 108547 Result: Up-regulated in Transcription
  misc_feature: MA Experiment 108547 PARAMETER Experiment Name: Zm_Imbibed_Seeds_P Parameter: Age (day) Value: 4 vs. 2
  misc_feature: MA Experiment 108547 PARAMETER Experiment Name: Zm_Imbibed_Seeds_P Parameter: Organism Value: Zea mays
  misc_feature: MA Experiment 108547 PARAMETER Experiment Name: Zm_Imbibed_Seeds_P Parameter: Plant Line Value: 35A19
  misc_feature: MA Experiment 108547 PARAMETER Experiment Name: Zm_Imbibed_Seeds_P Parameter: Tissue Value: Aerial vs. Embryo
  misc_feature: MA Experiment ID: 108556 Result: Down-regulated in Transcription
  misc_feature: MA Experiment 108556 PARAMETER Experiment Name: Zm_Drought_P Parameter: Age (day) Value: 9
  misc_feature: MA Experiment 108556 PARAMETER Experiment Name: Zm_Drought_P Parameter: Organism Value: Zea mays
  misc_feature: MA Experiment 108556 PARAMETER Experiment Name: Zm_Drought_P Parameter: Plant Line Value: 35A19
  misc_feature: MA Experiment 108556 PARAMETER Experiment Name: Zm_Drought_P Parameter: Timepoint (hr) Value: 24
  misc_feature: MA Experiment 108556 PARAMETER Experiment Name: Zm_Drought_P Parameter: Tissue Value: Aerial
  misc_feature: MA Experiment 108556 PARAMETER Experiment Name: Zm_Drought_P Parameter: Treatment Value: Drought vs. No Drought
  misc_feature: MA Experiment ID: 108559 Result: Down-regulated in Transcription
  misc_feature: MA Experiment 108559 PARAMETER Experiment Name: Zm_5mM_NO_P Parameter: Age (day) Value: 8
  misc_feature: MA Experiment 108559 PARAMETER Experiment Name: Zm_5mM_NO_P Parameter: Organism Value: Zea mays
  misc_feature: MA Experiment 108559 PARAMETER Experiment Name: Zm_5mM_NO_P Parameter: Plant Line Value: 35A19
  misc_feature: MA Experiment 108559 PARAMETER Experiment Name: Zm_5mM_NO_P Parameter: Timepoint (hr) Value: 12
  misc_feature: MA Experiment 108559 PARAMETER Experiment Name: Zm_5mM_NO_P Parameter: Tissue Value: Aerial
  misc_feature: MA Experiment 108559 PARAMETER Experiment Name: Zm_5mM_NO_P Parameter: Treatment Value: 5mM NO vs. No Treatment
  misc_feature: MA Experiment ID: 108687 Result: Down-regulated in Transcription
  misc_feature: MA Experiment 108687 PARAMETER Experiment Name: Zm_Embryos-Flowers__P Parameter: Tissue Value: Embryo vs. Aerial+
  misc_feature: MA Experiment ID: 108688 Result: Down-regulated in Transcription
  misc_feature: MA Experiment 108688 PARAMETER Experiment Name: Zm_Embryos-Flowers__P Parameter: Tissue Value: Immature Flowers vs. Aerial+
  misc_feature: MA Experiment ID: 20000477 Result: Down-regulated in Transcription
  misc_feature: MA Experiment 20000477 PARAMETER Experiment Name: Zm_5mM_SA_P Parameter: Age (day) Value: 10
  misc_feature: MA Experiment 20000477 PARAMETER Experiment Name: Zm_5mM_SA_P Parameter: Organism Value: Zea mays
  misc_feature: MA Experiment 20000477 PARAMETER Experiment Name: Zm_5mM_SA_P Parameter: Plant Line Value: 35A19
  misc_feature: MA Experiment 20000477 PARAMETER Experiment Name: Zm_5mM_SA_P Parameter: Timepoint (hr) Value: 48
  misc_feature: MA Experiment 20000477 PARAMETER Experiment Name: Zm_5mM_SA_P Parameter: Tissue Value: Aerial
  misc_feature: MA Experiment 20000477 PARAMETER Experiment Name: Zm_5mM_SA_P Parameter: Treatment Value: 5mM SA vs. No Treatment
  misc_feature: MA Experiment ID: 20000478 Result: Down-regulated in Transcription
  misc_feature: MA Experiment 20000478 PARAMETER Experiment Name: Zm_5mM_SA_P Parameter: Age (day) Value: 11
  misc_feature: MA Experiment 20000478 PARAMETER Experiment Name: Zm_5mM_SA_P Parameter: Organism Value: Zea mays
  misc_feature: MA Experiment 20000478 PARAMETER Experiment Name: Zm_5mM_SA_P Parameter: Plant Line Value: 35A19
  misc_feature: MA Experiment 20000478 PARAMETER Experiment Name: Zm_5mM_SA_P Parameter: Timepoint (hr) Value: 72
  misc_feature: MA Experiment 20000478 PARAMETER Experiment Name: Zm_5mM_SA_P Parameter: Tissue Value: Aerial
  misc_feature: MA Experiment 20000478 PARAMETER Experiment Name: Zm_5mM_SA_P Parameter: Treatment Value: 5mM SA vs. No Treatment
  misc_feature: MA Experiment ID: 20000479 Result: Down-regulated in Transcription
  misc_feature: MA Experiment 20000479 PARAMETER Experiment Name: Zm_Drought_P Parameter: Age (day) Value: 10
  misc_feature: MA Experiment 20000479 PARAMETER Experiment Name: Zm_Drought_P Parameter: Organism Value: Zea mays
  misc_feature: MA Experiment 20000479 PARAMETER Experiment Name: Zm_Drought_P Parameter: Plant Line Value: 35A19
  misc_feature: MA Experiment 20000479 PARAMETER Experiment Name: Zm_Drought_P Parameter: Timepoint (hr) Value: 48
  misc_feature: MA Experiment 20000479 PARAMETER Experiment Name: Zm_Drought_P Parameter: Tissue Value: Aerial
  misc_feature: MA Experiment 20000479 PARAMETER Experiment Name: Zm_Drought_P Parameter: Treatment Value: Drought vs. No Drought
  misc_feature: MA Experiment ID: 20000480 Result: Down-regulated in Transcription
  misc_feature: MA Experiment 20000480 PARAMETER Experiment Name: Zm_Drought_P Parameter: Age (day) Value: 11
  misc_feature: MA Experiment 20000480 PARAMETER Experiment Name: Zm_Drought_P Parameter: Organism Value: Zea mays
  misc_feature: MA Experiment 20000480 PARAMETER Experiment Name: Zm_Drought_P Parameter: Plant Line Value: 35A19
  misc_feature: MA Experiment 20000480 PARAMETER Experiment Name: Zm_Drought_P Parameter: Timepoint (hr) Value: 72
  misc_feature: MA Experiment 20000480 PARAMETER Experiment Name: Zm_Drought_P Parameter: Tissue Value: Aerial
  misc_feature: MA Experiment 20000480 PARAMETER Experiment Name: Zm_Drought_P Parameter: Treatment Value: Drought vs. No Drought
  misc_feature: MA Experiment ID: 20000492 Result: Down-regulated in Transcription
  misc_feature: MA Experiment 20000492 PARAMETER Experiment Name: Zm_Hybrid_Seed_Dev_P Parameter: DAP Value: 12
  misc_feature: MA Experiment 20000492 PARAMETER Experiment Name: Zm_Hybrid_Seed_Dev_P Parameter: Organism Value: Zea mays
  misc_feature: MA Experiment 20000492 PARAMETER Experiment Name: Zm_Hybrid_Seed_Dev_P Parameter: Plant Line Value: 35A19
  misc_feature: MA Experiment 20000492 PARAMETER Experiment Name: Zm_Hybrid_Seed_Dev_P Parameter: Tissue Value: Fert Kernel vs. Unfert Floret
  misc_feature: MA Experiment ID: 20000535 Result: Down-regulated in Transcription
  misc_feature: MA Experiment 20000535 PARAMETER Experiment Name: Zm_Hybrid_Seed_Dev_P Parameter: DAP Value: 30 vs. 12
  misc_feature: MA Experiment 20000535 PARAMETER Experiment Name: Zm_Hybrid_Seed_Dev_P Parameter: Organism Value: Zea mays
  misc_feature: MA Experiment 20000535 PARAMETER Experiment Name: Zm_Hybrid_Seed_Dev_P Parameter: Plant Line Value: 35A19
  misc_feature: MA Experiment 20000535 PARAMETER Experiment Name: Zm_Hybrid_Seed_Dev_P Parameter: Tissue Value: Embryo vs. Unfert Floret
  misc_feature: MA Experiment ID: 20000626 Result: Down-regulated in Transcription
  misc_feature: MA Experiment 20000626 PARAMETER Experiment Name: Zm_Herbicide-Treatments_P Parameter: Timepoint (hr) Value: 12
  misc_feature: MA Experiment 20000626 PARAMETER Experiment Name: Zm_Herbicide-Treatments_P Parameter: Tissue Value: Aerial
  misc_feature: MA Experiment 20000626 PARAMETER Experiment Name: Zm_Herbicide-Treatments_P Parameter: Treatment Value: Roundup vs. No Treatment
  misc_feature: MA Experiment ID: 20001612 Result: Down-regulated in Transcription
  misc_feature: MA Experiment 20001612 PARAMETER Experiment Name: Zm_50ppm_KNO3_L-to-H_P Parameter: Age (day) Value: 19
  misc_feature: MA Experiment 20001612 PARAMETER Experiment Name: Zm_50ppm_KNO3_L-to-H_P Parameter: Organism Value: Zea mays
  misc_feature: MA Experiment 20001612 PARAMETER Experiment Name: Zm_50ppm_KNO3_L-to-H_P Parameter: Plant Line Value: 35A19
  misc_feature: MA Experiment 20001612 PARAMETER Experiment Name: Zm_50ppm_KNO3_L-to-H_P Parameter: Timepoint (hr) Value: 8
  misc_feature: MA Experiment 20001612 PARAMETER Experiment Name: Zm_50ppm_KNO3_L-to-H_P Parameter: Tissue Value: Roots
  misc_feature: MA Experiment 20001612 PARAMETER Experiment Name: Zm_50ppm_KNO3_L-to-H_P Parameter: Treatment Value: 50ppm KNO3 vs. 50ppm KCl
actcaagtcacaacaaacaccaccatcgtctctttgctcagcacaaaagcatcacactccctctctctcgcgcgctcacaagcacgtcgtcaaccatggttgtcgagatgaaggagaacggcgtagcggcgatggcggcgggcgagaaggcgccgcagctgggcgtgaagcgcggcgagccgacgctggtgccgccggcggaggcgacgccgacgggcgggcagtactacctgtccaacctggaccagaacatcgcggtgatcgtgcagacggtgtactgctacaagccctcctcgccgcccggcggcggcgaaggcaaggacgtggacgtggcagccgcgctccgcgacgcgctggcgcgcgtgctggtgcactaccacccgctggcggggcggctgggcgtcagcccggaggatgaagctcaccgtggagctgaccggcggagggcgccgtgttcgtggaggccgacgccgcctgcgacctcgccgccgtcggcgacctcaccaagcccgaccccgccgcgctcggccagctcgtctactccgtccccggcgccaaacacatcctcgagatgccccccatgaccgcgcaggtgacgaggttcaagtgtgggggcttcgcgctcggcctggccatgaaccactgcatgttcgacggcatcggcgccatggagttcgtcaactcgtgggcggagacggcgcgcggcgtcgccgagctcaccgtgccgccgttcctggaccgaagcgtcctgaaggcgcgcgacccgcccgtgcccaccttcccccaccacgagttcgccgagatccccgacgtctccgacacggcggcgctctacggcgcgcaggagctgctgtaccgctccttctgcttcgacccggaccggctggagcgcgtgcgcgggcttgcgctcgccgacggcgccctgggccgctgcaccaccttcgaggcgctgtcggggctggtgtggcgcgcgcgcaccaaggcgctggggctggcgcccgagcagcgcaccaagctgctgttcgccgtggacgggcggcgccggttcgcgccgccgctcccgcggggctacttcggcaacggcatcgtgctcaccaacgcccttgccacggccggcgagctgctgtccgcgcccgtgtcgcgcgcggcggggctggtgcaggacgccgtgcggatggtcaccgacgactacatgcgctcggcggtggactacttcgaggcgacgcgggcccggccgtcgctcgcgtccacgctgctcatcaccacctggtcgcgcctcgagttccacggcgccgacttcgggtggggcgagcccgtcatgtcgggcccggtcacgctgccggagaaggaagtcatcctgttcctggcgcacgggaaggagaggaagagcatcaacgtgctgctcggcctgccagccaccgcgatggacgccttccaagagctcatggacgagatatgattcattcgtcggtgatgacggacatggatgggttgctgctatacatacatttacgatgcagggtgcttatacattcttcaattgctcggtgttatagtacgaccgtgttaatactcgatctatgttgatgttgttaagtttagtggccatatgagaatttgctgtcgattgcaattgttctaatattaatggaaaatagtaaactttatttcctttc

SEQ ID NO: 7499 - protein, 390 aa, Zea mays subsp. mays
  peptide (1)..(390): Ceres Seq. ID no. 12386750
MKLTVELTGGGRRVRGGRRRLRPRRRRRPHQARPRRARPARLLRPRRQTHPRDAPHDRAGDEVQVWGLRARPGHEPLHVRRHRRHGVRQLVGGDGARRRRAHRAAVPGPKRPEGARPARAHLPPPRVRRDPRRLRHGGALRRAGAAVPLLLLRPGPAGARARACARRRRPGPLHHLRGAVGAGVARAHQGAGAGARAAHQAAVRRGRAAPVRAAAPAGLLRQRHRAHQRPCHGRRAAVRARVARGGAGAGRRADGHRRLHALGGGLLRGDAGPAVARVHAAHHHLVAPRVPRRRLRVGRARHVGPGHAAGEGSHPVPGAREGEEEHQRAARPASHRDGRLPRAHGRDMIHSSVMTDMDGLLLYIHLRCRVLIHSSIARCYSTTVLILDLC

SEQ ID NO: 7500 - protein, 295 aa, Zea mays subsp. mays
  peptide (1)..(295): Ceres Seq. ID no. 12386751
  misc_feature (1)..(290): Pfam Name: Transferase family Pfam Description: Transferase family
  misc_feature (1)..(290): Homolog of NCBI NO: 30693723 NR Description: transferase family [Arabidopsis thaliana]
  misc_feature (1)..(290): Homolog of NCBI NO: 30693725 NR Description: transferase family [Arabidopsis thaliana]
  misc_feature (1)..(295): Homolog of NCBI NO: 20161743 NR Description: N-hydroxycinnamoyl/benzoyltransferase-like
  misc_feature (1)..(293): Homolog of NCBI NO: 15242820 NR Description: acyltransferase-like protein; protein id: supported by cDNA: 157547., supported by cDNA: gi_14334863
  misc_feature (1)..(293): Homolog of NCBI NO: 21553692 NR Description: acyltransferase-like protein [Arabidopsis
  misc_feature (1)..(292): Homolog of NCBI NO: 34222064 NR Description: At3g48720 [Arabidopsis thaliana]
  misc_feature (1)..(292): Homolog of NCBI NO: 15229017 NR Description: putative protein; protein id: At3g48720.1
  misc_feature (1)..(292): Homolog of NCBI NO: 15218793 NR Description: hypothetical protein; protein id: At1g03390.1
  misc_feature (1)..(292): Homolog of NCBI NO: 15217644 NR Description: putative hypersensitivity-related protein; id: At1g27620.1 [Arabidopsis thaliana]
  misc_feature (1)..(292): Homolog of NCBI NO: 27475616 NR Description: hydroxycinnamoyl transferase [Nicotiana tabacum]
MPPMTAQVTRFKCGGFALGLAMNHCMFDGIGAMEFVNSWAETARGVAELTVPPFLDRSVLKARDPPVPTFPHHEFAEIPDVSDTAALYGAQELLYRSFCFDPDRLERVRGLALADGALGRCTTFEALSGLVWRARTKALGLAPEQRTKLLFAVDGRRRFAPPLPRGYFGNGIVLTNALATAGELLSAPVSRAAGLVQDAVRMVTDDYMRSAVDYFEATRARPSLASTLLITTWSRLEFHGADFGWGEPVMSGPVTLPEKEVILFLAHGKERKSINVLLGLPATAMDAFQELMDEI

SEQ ID NO: 7501 - protein, 292 aa, Zea mays subsp. mays
  peptide (1)..(292): Ceres Seq. ID no. 12386752
  misc_feature (1)..(287): Pfam Name: Transferase family Pfam Description: Transferase family
  misc_feature (1)..(287): Homolog of NCBI NO: 30693723 NR Description: transferase family [Arabidopsis thaliana]
  misc_feature (1)..(287): Homolog of NCBI NO: 30693725 NR Description: transferase family [Arabidopsis thaliana]
  misc_feature (1)..(292): Homolog of NCBI NO: 20161743 NR Description: N-hydroxycinnamoyl/benzoyltransferase-like
  misc_feature (1)..(290): Homolog of NCBI NO: 15242820 NR Description: acyltransferase-like protein; protein id: supported by cDNA: 157547., supported by cDNA: gi_14334863
  misc_feature (1)..(290): Homolog of NCBI NO: 21553692 NR Description: acyltransferase-like protein [Arabidopsis
  misc_feature (1)..(289): Homolog of NCBI NO: 34222064 NR Description: At3g48720 [Arabidopsis thaliana]
  misc_feature (1)..(289): Homolog of NCBI NO: 15229017 NR Description: putative protein; protein id: At3g48720.1
  misc_feature (1)..(289): Homolog of NCBI NO: 15218793 NR Description: hypothetical protein; protein id: At1g03390.1
  misc_feature (1)..(289): Homolog of NCBI NO: 15217644 NR Description: putative hypersensitivity-related protein; id: At1g27620.1 [Arabidopsis thaliana]
  misc_feature (1)..(289): Homolog of NCBI NO: 27475616 NR Description: hydroxycinnamoyl transferase [Nicotiana tabacum]
MTAQVTRFKCGGFALGLAMNHCMFDGIGAMEFVNSWAETARGVAELTVPPFLDRSVLKARDPPVPTFPHHEFAEIPDVSDTAALYGAQELLYRSFCFDPDRLERVRGLALADGALGRCTTFEALSGLVWRARTKALGLAPEQRTKLLFAVDGRRRFAPPLPRGYFGNGIVLTNALATAGELLSAPVSRAAGLVQDAVRMVTDDYMRSAVDYFEATRARPSLASTLLITTWSRLEFHGADFGWGEPVMSGPVTLPEKEVILFLAHGKERKSINVLLGLPATAMDAFQELMDEI

SEQ ID NO: 7502 - DNA, 1385 bp, Zea mays subsp. mays
  misc_feature (1)..(1385): Ceres Seq. ID no. 12391341
  misc_feature: MA Experiment ID: 108544 Result: Up-regulated in Transcription
acgccatcaacagtaccattcagatcggaatcccagttagctctctgtgccctacctgtcagtgacacagaaatccagtcggcggggctgccgcctgccgcatcctcccctcgcccaccgtcgacgacttgatcccctcccaccgttgaggccgcctcctcacggcagcgagccagcgactcctctcttcttcgtctcctacaagtagccagacaccactccgactttgccggcaacccgtcgacagcgacgaggcgcagcataaggtatacgggcacggcggccatggcgaccagctccaaacccgccgcgcccgtggaccccatggtcgtgctcgcccacgagttccccgaggtgtcattcgactacgacgagagggatgtagcgttgtacgcgctcggggttggtgcctgcggcgatgacgccgtcgacgagaaggagcttcacttcgtgtaccacagggatgggcagccacacattaagacccttcctacttttgtttctttatttcccaacaagaacagcaatgggcttggatttgttgatgtgcctggccttaactttgatgcaagccttctactgcatggtcaacaatacatagagatctataggccaatcccttcgtatgccagtgttgtaaacagggttaaagtagctggtttgcatgacaaggggaaagcaactattcttgagctcgaaactaccacaagcctcaaagagtcaggggaaattttatgcatgaacaggagtactatctacttgcgtggtgctggagggttttcagactcttcacggccatactcatatgctacctatcctgctaatcaagtttctcgcatttctattccaaattcggcaccttctgcagtatgcgacgaccagacaaagcaatcccaggcattgttatacaggctatctggggattacaatcctttgcattcagacccagatattgcacagcttgctgggttcacccgtccaatcctgcacggcctctgcaccctaggattcgctgctcgcgccgtcataaaatctttctgcaacggcgaaccgactgcggtgaagagcatcttcggccgtttccttctgcacgtctaccccggggaaacgttgtccactgagatgtggcttgacggccagaaggtgcactaccaaacgaaggccaaggagcggaatcgcgctgtcctctctggatatgtgttgctccagcacatcccctcgtcattgtaagtaaaagttttgtttcttaaaattggtgcccgctgaaagcatttggcttgtctgtgataaattgagcacgaggtgggctgccactgtaatgatagccatgtatgggtctgcacataacacattcgtactgtattgataagaagcacgtaccactc

SEQ ID NO: 7503 - protein, 314 aa, Zea mays subsp. mays
  peptide (1)..(314): Ceres Seq. ID no. 12391342
  misc_feature (179)..(304): Pfam Name: MaoC like domain Pfam Description: MaoC like domain
  misc_feature (1)..(314): Homolog of NCBI NO: 22330656 NR Description: hypothetical protein; protein id: At1g76150.1, by cDNA: gi_17979530, supported by cDNA: gi_20147244 [Arabidopsis >gi|17979531|gb|AAL50100.1| At1g76150/T23E18_38 [Arabidopsis
  misc_feature (1)..(205): Homolog of NCBI NO: 6573727 NR Description: T23E18.9 [Arabidopsis thaliana]
  misc_feature (1)..(305): Homolog of NCBI NO: 4504505 NR Description: hydroxysteroid (17-beta) dehydrogenase 4 [Homo
  misc_feature (8)..(313): Homolog of NCBI NO: 499340 NR Description: 17beta-estradiol dehydrogenase [Sus scrofa]
  misc_feature (8)..(314): Homolog of NCBI NO: 13491722 NR Description: 17-beta-hydroxysteroid dehydrogenase type 4
  misc_feature (8)..(314): Homolog of NCBI NO: 24461283 NR Description: 17-beta-hydroxysteroid dehydrogenase type 4
  misc_feature (17)..(314): Homolog of NCBI NO: 3005897 NR Description: mutifunctional protein2 [Cavia porcellus]
  misc_feature (16)..(313): Homolog of NCBI NO: 13242303 NR Description: peroxisomal multifunctional enzyme type II norvegicus] >gi|1592545|gb|AAB09724.1| peroxisomal
  misc_feature (16)..(313): Homolog of NCBI NO: 1620451 NR Description: multifunctional protein 2 [Rattus norvegicus]
  misc_feature (16)..(313): Homolog of NCBI NO: 2492741 NR Description: Estradiol 17 beta-dehydrogenase 4 (17-beta-HSD 4)
MATSSKPAAPVDPMVVLAHEFPEVSFDYDERDVALYALGVGACGDDAVDEKELHFVYHRDGQPHIKTLPTFVSLFPNKNSNGLGFVDVPGLNFDASLLLHGQQYIEIYRPIPSYASVVNRVKVAGLHDKGKATILELETTTSLKESGEILCMNRSTIYLRGAGGFSDSSRPYSYATYPANQVSRISIPNSAPSAVCDDQTKQSQALLYRLSGDYNPLHSDPDIAQLAGFTRPILHGLCTLGFAARAVIKSFCNGEPTAVKSIFGRFLLHVYPGETLSTEMWLDGQKVHYQTKAKERNRAVLSGYVLLQHIPSSL

SEQ ID NO: 7504 - protein, 301 aa, Zea mays subsp. mays
  peptide (1)..(301): Ceres Seq. ID no. 12391343
  misc_feature (166)..(291): Pfam Name: MaoC like domain Pfam Description: MaoC like domain
  misc_feature (1)..(301): Homolog of NCBI NO: 22330656 NR Description: hypothetical protein; protein id: At1g76150.1, by cDNA: gi_17979530, supported by cDNA: gi_20147244 [Arabidopsis >gi|17979531|gb|AAL50100.1| At1g76150/T23E18_38 [Arabidopsis
  misc_feature (1)..(192): Homolog of NCBI NO: 6573727 NR Description: T23E18.9 [Arabidopsis thaliana]
  misc_feature (1)..(292): Homolog of NCBI NO: 4504505 NR Description: hydroxysteroid (17-beta) dehydrogenase 4 [Homo
  misc_feature (1)..(300): Homolog of NCBI NO: 499340 NR Description: 17beta-estradiol dehydrogenase [Sus scrofa]
  misc_feature (1)..(301): Homolog of NCBI NO: 13491722 NR Description: 17-beta-hydroxysteroid dehydrogenase type 4
  misc_feature (1)..(301): Homolog of NCBI NO: 24461283 NR Description: 17-beta-hydroxysteroid dehydrogenase type 4
  misc_feature (4)..(301): Homolog of NCBI NO: 3005897 NR Description: mutifunctional protein2 [Cavia porcellus]
  misc_feature (3)..(300): Homolog of NCBI NO: 13242303 NR Description: peroxisomal multifunctional enzyme type II norvegicus] >gi|1592545|gb|AAB09724.1| peroxisomal
  misc_feature (3)..(300): Homolog of NCBI NO: 1620451 NR Description: multifunctional protein 2 [Rattus norvegicus]
  misc_feature (3)..(300): Homolog of NCBI NO: 7514017 NR Description: multifunctional beta-oxidation protein 2,
MVVLAHEFPEVSFDYDERDVALYALGVGACGDDAVDEKELHFVYHRDGQPHIKTLPTFVSLFPNKNSNGLGFVDVPGLNFDASLLLHGQQYIEIYRPIPSYASVVNRVKVAGLHDKGKATILELETTTSLKESGEILCMNRSTIYLRGAGGFSDSSRPYSYATYPANQVSRISIPNSAPSAVCDDQTKQSQALLYRLSGDYNPLHSDPDIAQLAGFTRPILHGLCTLGFAARAVIKSFCNGEPTAVKSIFGRFLLHVYPGETLSTEMWLDGQKVHYQTKAKERNRAVLSGYVLLQHIPSSL

SEQ ID NO: 7505 - protein, 163 aa, Zea mays subsp. mays
  peptide (1)..(163): Ceres Seq. ID no. 12391344
  misc_feature (28)..(153): Pfam Name: MaoC like domain Pfam Description: MaoC like domain
  misc_feature (1)..(163): Homolog of NCBI NO: 22330656 NR Description: hypothetical protein; protein id: At1g76150.1, by cDNA: gi_17979530, supported by cDNA: gi_20147244 [Arabidopsis >gi|17979531|gb|AAL50100.1| At1g76150/T23E18_38 [Arabidopsis
  misc_feature (1)..(54): Homolog of NCBI NO: 6573727 NR Description: T23E18.9 [Arabidopsis thaliana]
  misc_feature (1)..(154): Homolog of NCBI NO: 4504505 NR Description: hydroxysteroid (17-beta) dehydrogenase 4 [Homo
  misc_feature (1)..(162): Homolog of NCBI NO: 499340 NR Description: 17beta-estradiol dehydrogenase [Sus scrofa]
  misc_feature (1)..(163): Homolog of NCBI NO: 13491722 NR Description: 17-beta-hydroxysteroid dehydrogenase type 4
  misc_feature (1)..(163): Homolog of NCBI NO: 24461283 NR Description: 17-beta-hydroxysteroid dehydrogenase type 4
  misc_feature (1)..(163): Homolog of NCBI NO: 3005897 NR Description: mutifunctional protein2 [Cavia porcellus]
  misc_feature (1)..(162): Homolog of NCBI NO: 13242303 NR Description: peroxisomal multifunctional enzyme type II norvegicus] >gi|1592545|gb|AAB09724.1| peroxisomal
  misc_feature (1)..(162): Homolog of NCBI NO: 1620451 NR Description: multifunctional protein 2 [Rattus norvegicus]
  misc_feature (1)..(162): Homolog of NCBI NO: 7514017 NR Description: multifunctional beta-oxidation protein 2,
MNRSTIYLRGAGGFSDSSRPYSYATYPANQVSRISIPNSAPSAVCDDQTKQSQALLYRLSGDYNPLHSDPDIAQLAGFTRPILHGLCTLGFAARAVIKSFCNGEPTAVKSIFGRFLLHVYPGETLSTEMWLDGQKVHYQTKAKERNRAVLSGYVLLQHIPSSL

SEQ ID NO: 7506 - DNA, 1262 bp, Zea mays subsp. mays
  misc_feature (1)..(1262): Ceres Seq. ID no. 12413536
  misc_feature: MA Experiment ID: 108522 Result: Down-regulated in Transcription
  misc_feature: MA Experiment 108522 PARAMETER Experiment Name: Zm_42deg_Heat_P Parameter: Age (day) Value: 8
  misc_feature: MA Experiment 108522 PARAMETER Experiment Name: Zm_42deg_Heat_P Parameter: Organism Value: Zea mays
  misc_feature: MA Experiment 108522 PARAMETER Experiment Name: Zm_42deg_Heat_P Parameter: Plant Line Value: 35A19
  misc_feature: MA Experiment 108522 PARAMETER Experiment Name: Zm_42deg_Heat_P Parameter: Temperature (deg C) Value: 42 vs. 22
  misc_feature: MA Experiment 108522 PARAMETER Experiment Name: Zm_42deg_Heat_P Parameter: Timepoint (hr) Value: 1
  misc_feature: MA Experiment 108522 PARAMETER Experiment Name: Zm_42deg_Heat_P Parameter: Tissue Value: Aerial
  misc_feature: MA Experiment ID: 108528 Result: Down-regulated in Transcription
  misc_feature: MA Experiment 108528 PARAMETER Experiment Name: Zm_Imbibed_Seeds_P Parameter: Age (day) Value: 5 vs. 2
  misc_feature: MA Experiment 108528 PARAMETER Experiment Name: Zm_Imbibed_Seeds_P Parameter: Organism Value: Zea mays
  misc_feature: MA Experiment 108528 PARAMETER Experiment Name: Zm_Imbibed_Seeds_P Parameter: Plant Line Value: 35A19
  misc_feature: MA Experiment 108528 PARAMETER Experiment Name: Zm_Imbibed_Seeds_P Parameter: Tissue Value: Aerial vs. Embryo
  misc_feature: MA Experiment ID: 108544 Result: Down-regulated in Transcription
  misc_feature: MA Experiment ID: 108545 Result: Down-regulated in Transcription
  misc_feature: MA Experiment 108545 PARAMETER Experiment Name: Zm_Imbibed_Seeds_P Parameter: Age (day) Value: 3 vs. 2
  misc_feature: MA Experiment 108545 PARAMETER Experiment Name: Zm_Imbibed_Seeds_P Parameter: Organism Value: Zea mays
  misc_feature: MA Experiment 108545 PARAMETER Experiment Name: Zm_Imbibed_Seeds_P Parameter: Plant Line Value: 35A19
  misc_feature: MA Experiment 108545 PARAMETER Experiment Name: Zm_Imbibed_Seeds_P Parameter: Tissue Value: Aerial vs. Embryo
  misc_feature: MA Experiment ID: 20000535 Result: Up-regulated in Transcription
  misc_feature: MA Experiment 20000535 PARAMETER Experiment Name: Zm_Hybrid_Seed_Dev_P Parameter: DAP Value: 30 vs. 12
  misc_feature: MA Experiment 20000535 PARAMETER Experiment Name: Zm_Hybrid_Seed_Dev_P Parameter: Organism Value: Zea mays
  misc_feature: MA Experiment 20000535 PARAMETER Experiment Name: Zm_Hybrid_Seed_Dev_P Parameter: Plant Line Value: 35A19
  misc_feature: MA Experiment 20000535 PARAMETER Experiment Name: Zm_Hybrid_Seed_Dev_P Parameter: Tissue Value: Embryo vs. Unfert Floret
gcagactgcagtgcacagggaccgtaccggggagggccggcggcagccatggcgcgcaaggacacagtgccgcttgtcactgcttccggcttcgtggtggcgtcgctgctgctcctgctctgcgccactcgctgcgaagcgagggtcatggcggcgagcaggagcaggagcaggagcaccagcccgctgctcaacgtgctgttcaagctcaacttcatccgcacggtggagccaccgcgccgacttcccactccgaccgccgacgccaccgtcagcctcgccgcgggcgacaccaactcgccgttctgcgtcaacccaccagacgcgccgtcgtccacgacgcctccgtccacgtcatccacgtcatccacgacgcctccgtccacgtcgtccacgccttcgttgccgggccaggcccaggcgccgccgctgccgccgatcacccccgtgccgccgtccttcgagcccagcccgccggagaacggcgccccgggtggaggccagggaggaggagatcaaggccagggaggaggaggtcaaggccagggaggcccaccggcatccacgacaccgaactcgccgccgcaggcaggtccgggagcgccgtttgggtcggtgccgccgagcccccatcgtcatggtgccgagcccgccaggattcggccctggtcccggctccggctcaggcggtggctcgggatccggcgacggcggcggcccgttccagccgccgatcgtgtacccacctccgctggcgccgccgatgctgccgggcgccgggcagacgctgtggtgcgtggccaagcccacggtgccggaccccatcatccaggaggccatggactacgcgtgcggctccggcgccgagtgcgactccatcctgcccagcggcgcgtgctaccaccccaacaccgtgctcgcgcacgcctccttcgcgttcaacagctactggcagcagaacaaggcgaccggcggcaccgccaccattatcaccagagacccgagctacgagaagtgcaaatttgaccttctgtgacgagggagggtacgtagatatgcaggagaacagactgcagataccaaattttttccccaagcttcagttggagttaacattcattttgcttctaggccacaccgatgcacattttgtaactagctcttcttcactagtatggttttgaattttgtaagcctgatactgcgcaaaaggggaaactaaaggtgattccttgacatatttgatatacaagctcttgctc

SEQ ID NO: 7507 - protein, 393 aa, Zea mays subsp. mays
  peptide (1)..(393): Ceres Seq. ID no. 12413537
  misc_feature (272)..(329): Pfam Name: Atrophin-1 family Pfam Description: Atrophin-1 family
  misc_feature (267)..(336): Homolog of NCBI NO: 188864 NR Description: mucin
  misc_feature (268)..(342): Homolog of NCBI NO: 188864 NR Description: mucin
  misc_feature (267)..(333): Homolog of NCBI NO: 188864 NR Description: mucin
  misc_feature (267)..(336): Homolog of NCBI NO: 188864 NR Description: mucin
  misc_feature (267)..(331): Homolog of NCBI NO: 188864 NR Description: mucin
  misc_feature (267)..(336): Homolog of NCBI NO: 188864 NR Description: mucin
  misc_feature (267)..(336): Homolog of NCBI NO: 188864 NR Description: mucin
  misc_feature (269)..(342): Homolog of NCBI NO: 188864 NR Description: mucin
  misc_feature (269)..(336): Homolog of NCBI NO: 188864 NR Description: mucin
  misc_feature (269)..(342): Homolog of NCBI NO: 188864 NR Description: mucin
RLQCTGTVPGRAGGSHGAQGHSAACHCFRLRGGVAAAPALRHSLRSEGHGGEQEQEQEHQPAAQRAVQAQLHPHGGATAPTSHSDRRRHRQPRRGRHQLAVLRQPTRRAVVHDASVHVIHVIHDASVHVVHAFVAGPGPGAAAAADHPRAAVLRAQPAGERRPGWRPGRRRSRPGRRRSRPGRPTGIHDTELAAAGRSGSAVWVGAAEPPSSWCRARQDSALVPAPAQAVARDPATAAARSSRRSCTHLRWRRRCCRAPGRRCGAWPSPRCRTPSSRRPWTTRAAPAPSATPSCPAARATTPTPCSRTPPSRSTATGSRTRRPAAPPPLSPETRATRSANLTFCDEGGYVDMQENRLQIPNFFPKLQLELTFILLLGHTDAHFVTSSSSLVWF

SEQ ID NO: 7508 - protein, 344 aa, Zea mays subsp. mays
  peptide (1)..(344): Ceres Seq. ID no. 12413538
  misc_feature (210)..(335): Homolog of NCBI NO: 15219387 NR Description: hypothetical protein; protein id: At1g79480.1
  misc_feature (219)..(335): Homolog of NCBI NO: 15218919 NR Description: beta-1,3 glucanase, putative; protein id:
  misc_feature (215)..(343): Homolog of NCBI NO: 15240743 NR Description: glycosyl hydrolase family 17; protein id: [Arabidopsis thaliana] >gi|9757867|dbj|BAB08454.1|
  misc_feature (210)..(335): Homolog of NCBI NO: 37533178 NR Description: hypothetical protein [Oryza sativa (japonica group)] >gi|15217313|gb|AAK92657.1| Putative protein with
  misc_feature (264)..(344): Homolog of NCBI NO: 34909796 NR Description: P0403C05.4 [Oryza sativa (japonica
  misc_feature (258)..(341): Homolog of NCBI NO: 34912962 NR Description: beta-1,3 glucanase-like protein [Oryza sativa
  misc_feature (264)..(341): Homolog of NCBI NO: 34393393 NR Description: putative glycosyl hydrolase [Oryza sativa
  misc_feature (264)..(341): Homolog of NCBI NO: 22775658 NR Description: contains ESTs
  misc_feature (255)..(341): Homolog of NCBI NO: 21592859 NR Description: unknown [Arabidopsis thaliana]
  misc_feature (243)..(341): Homolog of NCBI NO: 15241485 NR Description: glycosyl hydrolase family 17; protein id: supported by cDNA: 33347. [Arabidopsis thaliana]
QTAVHRDRTGEGRRQPWRARTQCRLSLLPASWWRRCCSCSAPLAAKRGSWRRAGAGAGAPARCSTCCSSSTSSARWSHRADFPLRPPTPPSASPRATPTRRSASTHQTRRRPRRLRPRHPRHPRRLRPRRPRLRCRARPRRRRCRRSPPCRRPSSPARRRTAPRVEAREEEIKAREEEVKAREAHRHPRHRTRRRRQVRERRLGRCRRAPIVMVPSPPGFGPGPGSGSGGGSGSGDGGGPFQPPIVYPPPLAPPMLPGAGQTLWCVAKPTVPDPIIQEAMDYACGSGAECDSILPSGACYHPNTVLAHASFAFNSYWQQNKATGGTATIITRDPSYEKCKFDLL

SEQ ID NO: 7509 - protein, 341 aa, Zea mays subsp. mays
  peptide (1)..(341): Ceres Seq. ID no. 12413539
  misc_feature (83)..(216): Pfam Name: Glycoprotein GG/GX Pfam Description: Glycoprotein GG/GX
  misc_feature (101)..(222): Homolog of NCBI NO: 15219387 NR Description: hypothetical protein; protein id: At1g79480.1
  misc_feature (78)..(210): Homolog of NCBI NO: 15219387 NR Description: hypothetical protein; protein id: At1g79480.1
  misc_feature (82)..(187): Homolog of NCBI NO: 15218919 NR Description: beta-1,3 glucanase, putative; protein id:
  misc_feature (73)..(209): Homolog of NCBI NO: 188864 NR Description: mucin
  misc_feature (75)..(159): Homolog of NCBI NO: 188864 NR Description: mucin
  misc_feature (106)..(214): Homolog of NCBI NO: 7510074 NR Description: hypothetical protein Y50E8A.g - Caenorhabditis
  misc_feature (75)..(159): Homolog of NCBI NO: 188864 NR Description: mucin
  misc_feature (73)..(159): Homolog of NCBI NO: 186396 NR Description: mucin
  misc_feature (106)..(214): Homolog of NCBI NO: 7510074 NR Description: hypothetical protein Y50E8A.g - Caenorhabditis
  misc_feature (106)..(214): Homolog of NCBI NO: 7510074 NR Description: hypothetical protein Y50E8A.g - Caenorhabditis
ADCSAQGPYRGGPAAAMARKDTVPLVTASGFVVASLLLLLCATRCEARVMAASRSRSRSTSPLLNVLFKLNFIRTVEPPRRLPTPTADATVSLAAGDTNSPFCVNPPDAPSSTTPPSTSSTSSTTPPSTSSTPSLPGQAQAPPLPPITPVPPSFEPSPPENGAPGGGQGGGDQGQGGGGQGQGGPPASTTPNSPPQAGPGAPFGSVPPSPHRHGAEPARIRPWSRLRLRRWLGIRRRRRPVPAADRVPTSAGAADAAGRRADAVVRGQAHGAGPHHPGGHGLRVRLRRRVRLHPAQRRVLPPQHRARARLLRVQQLLAAEQGDRRHRHHYHQRPELREVQI

SEQ ID NO: 7510 - protein, 325 aa, Zea mays subsp. mays
  peptide (1)..(325): Ceres Seq. ID no. 12413540
  misc_feature (67)..(200): Pfam Name: Glycoprotein GG/GX Pfam Description: Glycoprotein GG/GX
  misc_feature (85)..(206): Homolog of NCBI NO: 15219387 NR Description: hypothetical protein; protein id: At1g79480.1
  misc_feature (62)..(194): Homolog of NCBI NO: 15219387 NR Description: hypothetical protein; protein id: At1g79480.1
  misc_feature (66)..(171): Homolog of NCBI NO: 15218919 NR Description: beta-1,3 glucanase, putative; protein id:
  misc_feature (57)..(193): Homolog of NCBI NO: 188864 NR Description: mucin
  misc_feature (59)..(143): Homolog of NCBI NO: 188864 NR Description: mucin
  misc_feature (90)..(198): Homolog of NCBI NO: 7510074 NR Description: hypothetical protein Y50E8A.g - Caenorhabditis
  misc_feature (59)..(143): Homolog of NCBI NO: 188864 NR Description: mucin
  misc_feature (57)..(143): Homolog of NCBI NO: 186396 NR Description: mucin
  misc_feature (90)..(198): Homolog of NCBI NO: 7510074 NR Description: hypothetical protein Y50E8A.g - Caenorhabditis
  misc_feature (90)..(198): Homolog of NCBI NO: 7510074 NR Description: hypothetical protein Y50E8A.g - Caenorhabditis
MARKDTVPLVTASGFVVASLLLLLCATRCEARVMAASRSRSRSTSPLLNVLFKLNFIRTVEPPRRLPTPTADATVSLAAGDTNSPFCVNPPDAPSSTTPPSTSSTSSTTPPSTSSTPSLPGQAQAPPLPPITPVPPSFEPSPPENGAPGGGQGGGDQGQGGGGQGQGGPPASTTPNSPPQAGPGAPFGSVPPSPHRHGAEPARIRPWSRLRLRRWLGIRRRRRPVPAADRVPTSAGAADAAGRRADAVVRGQAHGAGPHHPGGHGLRVRLRRRVRLHPAQRRVLPPQHRARARLLRVQQLLAAEQGDRRHRHHYHQRPELREVQI

SEQ ID NO: 7511 - DNA, 1621 bp, Zea mays subsp. mays
  misc_feature (1)..(1621): Ceres Seq. ID no. 12388645
  misc_feature: MA Experiment ID: 108528 Result: Up-regulated in Transcription
  misc_feature: MA Experiment 108528 PARAMETER Experiment Name: Zm_Imbibed_Seeds_P Parameter: Age (day) Value: 5 vs. 2
  misc_feature: MA Experiment 108528 PARAMETER Experiment Name: Zm_Imbibed_Seeds_P Parameter: Organism Value: Zea mays
  misc_feature: MA Experiment 108528 PARAMETER Experiment Name: Zm_Imbibed_Seeds_P Parameter: Plant Line Value: 35A19
  misc_feature: MA Experiment 108528 PARAMETER Experiment Name: Zm_Imbibed_Seeds_P Parameter: Tissue Value: Aerial vs. Embryo
  misc_feature: MA Experiment ID: 108530 Result: Up-regulated in Transcription
  misc_feature: MA Experiment 108530 PARAMETER Experiment Name: Zm_Imbibed_Seeds_P Parameter: Age (day) Value: 6 vs. 2
  misc_feature: MA Experiment 108530 PARAMETER Experiment Name: Zm_Imbibed_Seeds_P Parameter: Organism Value: Zea mays
  misc_feature: MA Experiment 108530 PARAMETER Experiment Name: Zm_Imbibed_Seeds_P Parameter: Plant Line Value: 35A19
  misc_feature: MA Experiment 108530 PARAMETER Experiment Name: Zm_Imbibed_Seeds_P Parameter: Tissue Value: Aerial vs. Embryo
  misc_feature: MA Experiment ID: 20000535 Result: Up-regulated in Transcription
  misc_feature: MA Experiment 20000535 PARAMETER Experiment Name: Zm_Hybrid_Seed_Dev_P Parameter: DAP Value: 30 vs. 12
  misc_feature: MA Experiment 20000535 PARAMETER Experiment Name: Zm_Hybrid_Seed_Dev_P Parameter: Organism Value: Zea mays
  misc_feature: MA Experiment 20000535 PARAMETER Experiment Name: Zm_Hybrid_Seed_Dev_P Parameter: Plant Line Value: 35A19
  misc_feature: MA Experiment 20000535 PARAMETER Experiment Name: Zm_Hybrid_Seed_Dev_P Parameter: Tissue Value: Embryo vs. Unfert Floret
  misc_feature: MA Experiment ID: 20000626 Result: Down-regulated in Transcription
  misc_feature: MA Experiment 20000626 PARAMETER Experiment Name: Zm_Herbicide-Treatments_P Parameter: Timepoint (hr) Value: 12
  misc_feature: MA Experiment 20000626 PARAMETER Experiment Name: Zm_Herbicide-Treatments_P Parameter: Tissue Value: Aerial
  misc_feature: MA Experiment 20000626 PARAMETER Experiment Name: Zm_Herbicide-Treatments_P Parameter: Treatment Value: Roundup vs. No Treatment
  misc_feature: MA Experiment ID: 20000630 Result: Down-regulated in Transcription
  misc_feature: MA Experiment 20000630 PARAMETER Experiment Name: Zm_Herbicide-Treatments_P Parameter: Timepoint (hr) Value: 4
  misc_feature: MA Experiment 20000630 PARAMETER Experiment Name: Zm_Herbicide-Treatments_P Parameter: Tissue Value: Aerial
  misc_feature: MA Experiment 20000630 PARAMETER Experiment Name: Zm_Herbicide-Treatments_P Parameter: Treatment Value: Roundup vs. No Treatment
acaaattgtgtgtgccttggcgtgtcgtggaggccccgggcacgcacgccgcacagtggcatcagctctcagtgcgcgcacgtcaccacaaattgtgtgccttgtcgtggaggccccgggcacgtacgccgcacagggcacacctgctccctccggcctgctctgctcactgctttgattccgcttcggcgcttcgccgcctccggttttctctccgcgcctccagtctccagggacgcaccacctctcccaagtcccaatctcccatggcggcgctgggcacggcgatcacccccgcagcagctaccacggcgccgtgctgctataatcggcatccgcggagccacatcacggcgcgccgtaaccgggttgcctccgcgaggaggcttgacctgtgcgccagctcctcacctgccgtcaccgctcccgacataccagacgaggcgctggtggaacccttggtggcgccggcgccggagacgaagctcaggaagctggcgtgtccaatctgctactaccccctggcgagctcgagcgatcagttggatgatgctaccagtctcgaatgtccaacgtgcaagaaatgctaccccaacaagcaagattactgggatcttacagtgtcagttggttcgacagagtactccgagtccatgccagtggcaacagagttgtttaggactccactggtatcttttctttacgaaagaggatggcgccaaaatttcatatggggtggtttcccaggcctagaaagagagtttgaaatggcaaaaacttatttgaagccaacaattggagggactattgttgatgcaagttgtggaagtggcctgttctcaagattatttattaagagtgggctatattctcttgttgtggcactggatttctcagagaatatgttgaagcagtgcaaccaatacatcaagcaggaaaacatttcagatgagagattagtattggtgagggctgacatatctagactcccttttgtgagtggttcaattgacgctctgcatgcaggtgctgcaattcattgttggccatccccagcttgtgctgttgcagatatcagtagagtccttcgcccagggggaatttttgttgcttcgacattcgtggcagatgttattccaccagctattccagtattgaagatcgtacgcccgtacattagccaaataactggcaacaataccttcttatctgaagtggagcttgaagatctttgcaaagcatgtgggctggttgatttcaaatttgtcagaagtggattctatataatgttttctgccactaaagcatgctaactaagtagcagcaatcgtccagtcgtttatgtcaagactcctcggttttatactgcaaatggtttccttctgtgcattgtgcggttgtgccatttgctctaaaggttgccaactttcctcaagggggtgtggtgtaaatagtgaacacatatattttacttctacttgaccgacctcattatagcatgaaaatatcatattttttgtgtacagcttcatagatctttgcaattatgtaatttaaggcttgtttggaacagctctaccaacctaaaaactgaatctggatatagaatttagttagatcc

SEQ ID NO: 7512 - protein, 436 aa, Zea mays subsp. mays
  peptide (1)..(436): Ceres Seq. ID no. 12388646
  misc_feature (268)..(422): Pfam Name: ubiE/COQ5 methyltransferase family Pfam Description: ubiE/COQ5 methyltransferase family
  misc_feature (105)..(434): Homolog of NCBI NO: 18411840 NR Description: expressed protein; protein id: At1g78140.1, by cDNA: 30065. [Arabidopsis thaliana] unknown [Arabidopsis thaliana] >gi|28393453|gb|AAO42148.1|
  misc_feature (105)..(284): Homolog of NCBI NO: 25406543 NR Description: hypothetical protein T11I11.8 [imported] -
  misc_feature (318)..(434): Homolog of NCBI NO: 25406543 NR Description: hypothetical protein T11I11.8 [imported] -
  misc_feature (159)..(434): Homolog of NCBI NO: 30688506 NR Description: expressed protein [Arabidopsis thaliana]
  misc_feature (159)..(356): Homolog of NCBI NO: 7487623 NR Description: hypothetical protein At2g41040 [imported] - thaliana >gi|3402713|gb|AAD12007.1| hypothetical protein
  misc_feature (268)..(422): Homolog of NCBI NO: 15896660 NR Description: S-adenosylmethionine-dependent methyltransferase
  misc_feature (266)..(376): Homolog of NCBI NO: 20093135 NR Description: menaquinone biosynthesis methyltransferase
  misc_feature (264)..(373): Homolog of NCBI NO: 23048342 NR Description: hypothetical protein [Methanosarcina barkeri]
  misc_feature (229)..(383): Homolog of NCBI NO: 7443714 NR Description: probable sterol 24-C-methyltransferase (EC - fission yeast (Schizosaccharomyces pombe) (fragment)
  misc_feature (245)..(375): Homolog of NCBI NO: 29827478 NR Description: C5-O-methyltransferase [Streptomyces avermitilis
KLCVPWRVVEAPGTHAAQWHQLSVRARHHKLCALSWRPRARTPHRAHLLPPACSAHCFDSASALRRLRFSLRASSLQGRTTSPKSQSPMAALGTAITPAAATTAPCCYNRHPRSHITARRNRVASARRLDLCASSSPAVTAPDIPDEALVEPLVAPAPETKLRKLACPICYYPLASSSDQLDDATSLECPTCKKCYPNKQDYWDLTVSVGSTEYSESMPVATELFRTPLVSFLYERGWRQNFIWGGFPGLEREFEMAKTYLKPTIGGTIVDASCGSGLFSRLFIKSGLYSLVVALDFSENMLKQCNQYIKQENISDERLVLVRADISRLPFVSGSIDALHAGAAIHCWPSPACAVADISRVLRPGGIFVASTFVADVIPPAIPVLKIVRPYISQITGNNTFLSEVELEDLCKACGLVDFKFVRSGFYIMFSATKAC

SEQ ID NO: 7513 - protein, 348 aa, Zea mays subsp. mays
  peptide (1)..(348): Ceres Seq. ID no. 12388647
  misc_feature (180)..(334): Pfam Name: ubiE/COQ5 methyltransferase family Pfam Description: ubiE/COQ5 methyltransferase family
  misc_feature (17)..(196): Homolog of NCBI NO: 25406543 NR Description: hypothetical protein T11I11.8 [imported] -
  misc_feature (230)..(346): Homolog of NCBI NO: 25406543 NR Description: hypothetical protein T11I11.8 [imported] -
  misc_feature (71)..(346): Homolog of NCBI NO: 30688506 NR Description: expressed protein [Arabidopsis thaliana]
  misc_feature (71)..(268): Homolog of NCBI NO: 7487623 NR Description: hypothetical protein At2g41040 [imported] - thaliana >gi|3402713|gb|AAD12007.1| hypothetical protein
  misc_feature (180)..(334): Homolog of NCBI NO: 15896660 NR Description: S-adenosylmethionine-dependent methyltransferase
  misc_feature (17)..(346): Homolog of NCBI NO: 18411840 NR Description: expressed protein; protein id: At1g78140.1, by cDNA: 30065. [Arabidopsis thaliana] unknown [Arabidopsis thaliana] >gi|28393453|gb|AAO42148.1|
  misc_feature (178)..(288): Homolog of NCBI NO: 20093135 NR Description: menaquinone biosynthesis methyltransferase
  misc_feature (176)..(285): Homolog of NCBI NO: 23048342 NR Description: hypothetical protein [Methanosarcina barkeri]
  misc_feature (141)..(295): Homolog of NCBI NO: 7443714 NR Description: probable sterol 24-C-methyltransferase (EC - fission yeast (Schizosaccharomyces pombe) (fragment)
  misc_feature (157)..(287): Homolog of NCBI NO: 29827478 NR Description: C5-O-methyltransferase [Streptomyces avermitilis
MAALGTAITPAAATTAPCCYNRHPRSHITARRNRVASARRLDLCASSSPAVTAPDIPDEALVEPLVAPAPETKLRKLACPICYYPLASSSDQLDDATSLECPTCKKCYPNKQDYWDLTVSVGSTEYSESMPVATELFRTPLVSFLYERGWRQNFIWGGFPGLEREFEMAKTYLKPTIGGTIVDASCGSGLFSRLFIKSGLYSLVVALDFSENMLKQCNQYIKQENISDERLVLVRADISRLPFVSGSIDALHAGAAIHCWPSPACAVADISRVLRPGGIFVASTFVADVIPPAIPVLKIVRPYISQITGNNTFLSEVELEDLCKACGLVDFKFVRSGFYIMFSATKAC

SEQ ID NO: 7514 - protein, 250 aa, Zea mays subsp. mays
  peptide (1)..(250): Ceres Seq. ID no. 12388648
TNCVCLGVSWRPRARTPHSGISSQCAHVTTNCVPCRGGPGHVRRTGHTCSLRPALLTALIPLRRFAASGFLSAPPVSRDAPPLPSPNLPWRRWARRSPPQQLPRRRAAIIGIRGATSRRAVTGLPPRGGLTCAPAPHLPSPLPTYQTRRWWNPWWRRRRRRSSGSWRVQSATTPWRARAISWMMLPVSNVQRARNATPTSKITGILQCQLVRQSTPSPCQWQQSCLGLHWYLFFTKEDGAKISYGVVSQA

SEQ ID NO: 7515 - DNA, 1434 bp, Zea mays subsp. mays
  misc_feature (1)..(1434): Ceres Seq. ID no. 12412606
  misc_feature: MA Experiment ID: 108527 Result: Up-regulated in Transcription
  misc_feature: MA Experiment 108527 PARAMETER Experiment Name: Zm_5mM_NO_P Parameter: Age (day) Value: 8
  misc_feature: MA Experiment 108527 PARAMETER Experiment Name: Zm_5mM_NO_P Parameter: Organism Value: Zea mays
  misc_feature: MA Experiment 108527 PARAMETER Experiment Name: Zm_5mM_NO_P Parameter: Plant Line Value: 35A19
  misc_feature: MA Experiment 108527 PARAMETER Experiment Name: Zm_5mM_NO_P Parameter: Timepoint (hr) Value: 6
  misc_feature: MA Experiment 108527 PARAMETER Experiment Name: Zm_5mM_NO_P Parameter: Tissue Value: Aerial
  misc_feature: MA Experiment 108527 PARAMETER Experiment Name: Zm_5mM_NO_P Parameter: Treatment Value: 5mM NO vs. No Treatment
  misc_feature: MA Experiment ID: 108535 Result: Down-regulated in Transcription
  misc_feature: MA Experiment 108535 PARAMETER Experiment Name: Zm_Meristem_P Parameter: Age (day) Value: 8
  misc_feature: MA Experiment 108535 PARAMETER Experiment Name: Zm_Meristem_P Parameter: Organism Value: Zea mays
  misc_feature: MA Experiment 108535 PARAMETER Experiment Name: Zm_Meristem_P Parameter: Plant Line Value: 35A19
  misc_feature: MA Experiment 108535 PARAMETER Experiment Name: Zm_Meristem_P Parameter: Tissue Value: Root Meristem vs. Above Root Meristem
  misc_feature: MA Experiment ID: 108688 Result: Down-regulated in Transcription
  misc_feature: MA Experiment 108688 PARAMETER Experiment Name: Zm_Embryos-Flowers__P Parameter: Tissue Value: Immature Flowers vs. Aerial+
  misc_feature: MA Experiment ID: 20000534 Result: Up-regulated in Transcription
  misc_feature: MA Experiment 20000534 PARAMETER Experiment Name: Zm_Hybrid_Pollen_P Parameter: Age (day) Value: 8
  misc_feature: MA Experiment 20000534 PARAMETER Experiment Name: Zm_Hybrid_Pollen_P Parameter: Organism Value: Zea mays
  misc_feature: MA Experiment 20000534 PARAMETER Experiment Name: Zm_Hybrid_Pollen_P Parameter: Plant Line Value: 35A19
  misc_feature: MA Experiment 20000534 PARAMETER Experiment Name: Zm_Hybrid_Pollen_P Parameter: Tissue Value: Pollen vs. Aerial
  misc_feature: MA Experiment ID: 20000626 Result: Down-regulated in Transcription
  misc_feature: MA Experiment 20000626 PARAMETER Experiment Name: Zm_Herbicide-Treatments_P Parameter: Timepoint (hr) Value: 12
  misc_feature: MA Experiment 20000626 PARAMETER Experiment Name: Zm_Herbicide-Treatments_P Parameter: Tissue Value: Aerial
  misc_feature: MA Experiment 20000626 PARAMETER Experiment Name: Zm_Herbicide-Treatments_P Parameter: Treatment Value: Roundup vs. No Treatment
  misc_feature: MA Experiment ID: 20000629 Result: Down-regulated in Transcription
  misc_feature: MA Experiment 20000629 PARAMETER Experiment Name: Zm_Herbicide-Treatments_P Parameter: Timepoint (hr) Value: 12
  misc_feature: MA Experiment 20000629 PARAMETER Experiment Name: Zm_Herbicide-Treatments_P Parameter: Tissue Value: Aerial
  misc_feature: MA Experiment 20000629 PARAMETER Experiment Name: Zm_Herbicide-Treatments_P Parameter: Treatment Value: Trimec vs. No Treatment
gtgggcgttgtgtgcgcggccgcagtgtgcggatcaagctgcatgtgtggaaggcagcgctgagttagtgcccagcgtcagcagctataaaagcacttgtactcatcgattatcaacagggaatagagaaaggcagtgtcggagcgctgcaggtgtttgggcgccgaactctttgtgtttagctactgttcattcgtcttcctcctctcaccaatctgtgtcctgtgcttgtgagcgttttagagttccaacaattggtatcagaggcagtttatgcccaagatcttacgctactacctcgagtccgagtccatggcgatggttccgcacggcgccggggggagttcggtctccatgtcatacccggtgctgtcgccggcgagctacacggcgtgggcaatcaaggtggagtcgatcctcgacgcgcaaggtctctgggaggccgtgtctccaccagataatggcgaggtgaacgcggtgaagaacaagacggcgcgggcacagcttctccaagctctgcccgatgacatcttgatgcaggtctccatcaagaaaacggcagcggaggtgtgggcgagcctcaagactcgtttcgtcggtgcggatcgggtcaagacggcacgcctcgccacgctcaagggggagttcgacaagctgtacatggaggacgaggaggcattggacgactacgcaggcaaaatcagcggtatggcagcgcgttacgccgggcttggcgcaacgctcgacgacgctgccatggtgaagaagctcctcgacaccgttccagatcggctcttccccgtcgtcgcgggcatcgagcagttctgcgacgtcgagacgatgccgttcgaggaggcgctcggacgtctcaaggcgttcgatgagcgttctcggcggcgtactcatgccggcggtgaacggcgcgacgatcagctccttctcacggaggccgagtggaaagctcgaaaaaagaagaagtcgacgatcggcaaatgcttcaactgtggcaatcgcggccatttcgcccgggactgccccaagaagaaggaggaggaggcgctgctcgccaacgccaacgaggagccggcgctgttctgagcagcggcgctgggtttagggggagtttgttgggaataaacccagctgcgtgtgcgtgcacacagcgggtggcgtgagtgcgtcgtgttgtctagtgtgtgcgtctgtgtccgagtcgtgcggcggacggagcaattcgtgccgagtacgtgttcttgccgcgtacgttgcgtggtggtagttgcatgcagtcgtggtgatctgttggaggccagccgcagtgtacgcgttcgtgggcgttgtgtgcgcggccgcagtgtgcggatcaagctgcatgtgtggaaggcagcgctgagttagtgcccagcgtcagcagctataaaagcacttgtaccc

SEQ ID NO: 7516 - protein, 274 aa, Zea mays subsp. mays
  peptide (1)..(274): Ceres Seq. ID no. 12412607
  misc_feature (116)..(168): Pfam Name: Retrotransposon gag protein Pfam Description: Retrotransposon gag protein
  misc_feature (1)..(273): Homolog of NCBI NO: 34907386 NR Description: P0471B04.27 [Oryza sativa (japonica
  misc_feature (14)..(234): Homolog of NCBI NO: 34910624 NR Description: putative copia-type polyprotein [Oryza sativa
  misc_feature (16)..(234): Homolog of NCBI NO: 30017513 NR Description: putative gag-pol polyprotein [Oryza sativa
  misc_feature (14)..(234): Homolog of NCBI NO: 37534104 NR Description: putative retroelement [Oryza sativa (japonica group)] >gi|13940610|gb|AAK50412.1| Putative retroelement [Oryza >gi|31431935|gb|AAP53641.1| putative retroelement [Oryza sativa
  misc_feature (24)..(235): Homolog of NCBI NO: 34902098 NR Description: hypothetical protein [Oryza sativa (japonica group)] >gi|29893613|gb|AAP06867.1| hypothetical protein [Oryza
  misc_feature (213)..(273): Homolog of NCBI NO: 34902098 NR Description: hypothetical protein [Oryza sativa (japonica group)] >gi|29893613|gb|AAP06867.1| hypothetical protein [Oryza
  misc_feature (90)..(234): Homolog of NCBI NO: 29150404 NR Description: gag-pol polyprotein [Oryza sativa (japonica
  misc_feature (11)..(273): Homolog of NCBI NO: 37532690 NR Description: putative retroelement [Oryza sativa (japonica group)] >gi|19881713|gb|AAM01114.1| Putative retroelement [Oryza
  misc_feature (27)..(273): Homolog of NCBI NO: 37535062 NR Description: putative lectin receptor kinase [Oryza sativa
  misc_feature (22)..(227): Homolog of NCBI NO: 15230839 NR Description: hypothetical protein; protein id: At3g25450.1
MPKILRYYLESESMAMVPHGAGGSSVSMSYPVLSPASYTAWAIKVESILDAQGLWEAVSPPDNGEVNAVKNKTARAQLLQALPDDILMQVSIKKTAAEVWASLKTRFVGADRVKTARLATLKGEFDKLYMEDEEALDDYAGKISGMAARYAGLGATLDDAAMVKKLLDTVPDRLFPVVAGIEQFCDVETMPFEEALGRLKAFDERSRRRTHAGGERRDDQLLLTEAEWKARKKKKSTIGKCFNCGNRGHFARDCPKKKEEEALLANANEEPALF

SEQ ID NO: 7517 - protein, 261 aa, Zea mays subsp. mays
  peptide (1)..(261): Ceres Seq. ID no. 12412608
  misc_feature (103)..(155): Pfam Name: Retrotransposon gag protein Pfam Description: Retrotransposon gag protein
  misc_feature (1)..(260): Homolog of NCBI NO: 34907386 NR Description: P0471B04.27 [Oryza sativa (japonica
  misc_feature (1)..(221): Homolog of NCBI NO: 34910624 NR Description: putative copia-type polyprotein [Oryza sativa
  misc_feature (3)..(221): Homolog of NCBI NO: 30017513 NR Description: putative gag-pol polyprotein [Oryza sativa
  misc_feature (1)..(221): Homolog of NCBI NO: 37534104 NR Description: putative retroelement [Oryza sativa (japonica group)] >gi|13940610|gb|AAK50412.1| Putative retroelement [Oryza >gi|31431935|gb|AAP53641.1| putative retroelement [Oryza sativa
  misc_feature (11)..(222): Homolog of NCBI NO: 34902098 NR Description: hypothetical protein [Oryza sativa (japonica group)] >gi|29893613|gb|AAP06867.1| hypothetical protein [Oryza
  misc_feature (200)..(260): Homolog of NCBI NO: 34902098 NR Description: hypothetical protein [Oryza sativa (japonica group)] >gi|29893613|gb|AAP06867.1| hypothetical protein [Oryza
  misc_feature (77)..(221): Homolog of NCBI NO: 29150404 NR Description: gag-pol polyprotein [Oryza sativa (japonica
  misc_feature (1)..(260): Homolog of NCBI NO: 37532690 NR Description: putative retroelement [Oryza sativa (japonica group)] >gi|19881713|gb|AAM01114.1| Putative retroelement [Oryza
  misc_feature (14)..(260): Homolog of NCBI NO: 37535062 NR Description: putative lectin receptor kinase [Oryza sativa
  misc_feature (9)..(214): Homolog of NCBI NO: 15230839 NR Description: hypothetical protein; protein id: At3g25450.1
MAMVPHGAGGSSVSMSYPVLSPASYTAWAIKVESILDAQGLWEAVSPPDNGEVNAVKNKTARAQLLQALPDDILMQVSIKKTAAEVWASLKTRFVGADRVKTARLATLKGEFDKLYMEDEEALDDYAGKISGMAARYAGLGATLDDAAMVKKLLDTVPDRLFPVVAGIEQFCDVETMPFEEALGRLKAFDERSRRRTHAGGERRDDQLLLTEAEWKARKKKKSTIGKCFNCGNRGHFARDCPKKKEEEALLANANEEPALF

SEQ ID NO: 7518 - protein, 259 aa, Zea mays subsp. mays
  peptide (1)..(259): Ceres Seq. ID no. 12412609
  misc_feature (101)..(153): Pfam Name: Retrotransposon gag protein Pfam Description: Retrotransposon gag protein
  misc_feature (1)..(258): Homolog of NCBI NO: 34907386 NR Description: P0471B04.27 [Oryza sativa (japonica
  misc_feature (1)..(219): Homolog of NCBI NO: 34910624 NR Description: putative copia-type polyprotein [Oryza sativa
  misc_feature (1)..(219): Homolog of NCBI NO: 30017513 NR Description: putative gag-pol polyprotein [Oryza sativa
  misc_feature (1)..(219): Homolog of NCBI NO: 37534104 NR Description: putative retroelement [Oryza sativa (japonica group)] >gi|13940610|gb|AAK50412.1| Putative retroelement [Oryza >gi|31431935|gb|AAP53641.1| putative retroelement [Oryza sativa
  misc_feature (9)..(220): Homolog of NCBI NO: 34902098 NR Description: hypothetical protein [Oryza sativa (japonica group)] >gi|29893613|gb|AAP06867.1| hypothetical protein [Oryza
  misc_feature (198)..(258): Homolog of NCBI NO: 34902098 NR Description: hypothetical protein [Oryza sativa (japonica group)] >gi|29893613|gb|AAP06867.1| hypothetical protein [Oryza
  misc_feature (75)..(219): Homolog of NCBI NO: 29150404 NR Description: gag-pol polyprotein [Oryza sativa (japonica
  misc_feature (1)..(258): Homolog of NCBI NO: 37532690 NR Description: putative retroelement [Oryza sativa (japonica group)] >gi|19881713|gb|AAM01114.1| Putative retroelement [Oryza
  misc_feature (12)..(258): Homolog of NCBI NO: 37535062 NR Description: putative lectin receptor kinase [Oryza sativa
  misc_feature (7)..(212): Homolog of NCBI NO: 15230839 NR Description: hypothetical protein; protein id: At3g25450.1
MVPHGAGGSSVSMSYPVLSPASYTAWAIKVESILDAQGLWEAVSPPDNGEVNAVKNKTARAQLLQALPDDILMQVSIKKTAAEVWASLKTRFVGADRVKTARLATLKGEFDKLYMEDEEALDDYAGKISGMAARYAGLGATLDDAAMVKKLLDTVPDRLFPVVAGIEQFCDVETMPFEEALGRLKAFDERSRRRTHAGGERRDDQLLLTEAEWKARKKKKSTIGKCFNCGNRGHFARDCPKKKEEEALLANANEEPALF

SEQ ID NO: 7519 - DNA, 1504 bp, Zea mays subsp. mays
  misc_feature (1)..(1504): Ceres Seq. ID no. 12357893
  misc_feature: MA Experiment ID: 108528 Result: Down-regulated in Transcription
  misc_feature: MA Experiment 108528 PARAMETER Experiment Name: Zm_Imbibed_Seeds_P Parameter: Age (day) Value: 5 vs. 2
  misc_feature: MA Experiment 108528 PARAMETER Experiment Name: Zm_Imbibed_Seeds_P Parameter: Organism Value: Zea mays
  misc_feature: MA Experiment 108528 PARAMETER Experiment Name: Zm_Imbibed_Seeds_P Parameter: Plant Line Value: 35A19
  misc_feature: MA Experiment 108528 PARAMETER Experiment Name: Zm_Imbibed_Seeds_P Parameter: Tissue Value: Aerial vs. Embryo
  misc_feature: MA Experiment ID: 108535 Result: Up-regulated in Transcription
  misc_feature: MA Experiment 108535 PARAMETER Experiment Name: Zm_Meristem_P Parameter: Age (day) Value: 8
  misc_feature: MA Experiment 108535 PARAMETER Experiment Name: Zm_Meristem_P Parameter: Organism Value: Zea mays
  misc_feature: MA Experiment 108535 PARAMETER Experiment Name: Zm_Meristem_P Parameter: Plant Line Value: 35A19
  misc_feature: MA Experiment 108535 PARAMETER Experiment Name: Zm_Meristem_P Parameter: Tissue Value: Root Meristem vs. Above Root Meristem
  misc_feature: MA Experiment ID: 20000487 Result: Up-regulated in Transcription
  misc_feature: MA Experiment 20000487 PARAMETER Experiment Name: Zm_50mM_NH4NO3_L_to_H_P Parameter: Organism Value: Zea mays
  misc_feature: MA Experiment 20000487 PARAMETER Experiment Name: Zm_50mM_NH4NO3_L_to_H_P Parameter: Timepoint (hr) Value: 4
  misc_feature: MA Experiment 20000487 PARAMETER Experiment Name: Zm_50mM_NH4NO3_L_to_H_P Parameter: Tissue Value: Leaves
  misc_feature: MA Experiment 20000487 PARAMETER Experiment Name: Zm_50mM_NH4NO3_L_to_H_P Parameter: Treatment Value: 50mM NH4NO3 vs. 100mM Mannitol
atcaggcctacttggcgcgcgcgcgtctctctctgtctagcggccgagtttaacagttaaaccctagctcaccgtcgtgctcgcctccccgcgcctgctcccttcaggcactgacagttcgccgccgcggcggcgctttcgagcccacgcggaagcgcacctagtgccatggcgaagaagcggaagcacaccgacgcccaggcagagacggccggcgcagagaagccagacgactccgcaccggcgcgcccggagcgcacgctcttcggcttcaaggatccggcccccgacgccgtgcccgcctctgcggcctccagggccgcggtggcgccgtttaggaacagggagaaggtactcatcacctgctcccgccgcatcacgtacaggtatcgtcatctgatgcaggacgtgctatcgatgctcccgcacgcgaagaaggacagcaaggtcgagtcgaagcagagcaaggggaacgctctcaacgagatgctcgagctcaggagctgctccagttgtctcttcttcgagtgccgaaaacagaaggatctttacctttggatggtgaagtctcctggaggaccatcagtgaaatttctagttaatgctgttcacaccatggaggagttgaagcttacgggtaaccatctgaaagggtcacggccacttcttacattttctacaaattttgatgagcaacctcattggaagcttgtgaaggaaattataactcatatatttgctactcctaaagatcaccgtaaagcaaaacctttccatgaccatgtatttgtcttctccattgtggatggccatgtttggttccgaaactaccagatttctgttccccacaatgagattgataaagttgataaaggtggtatggataaaatgacacttattgaggttggccccaggttctgtttgaatccaatcaaaatatttggtggtagttttggtggtcctacatggtatgagaacccatactacatttcccccaatcagatccgtgcactagagaagaggcagaaggcaggcaaatatgccaagaaggtgaaggccaaggtgaggaggaagatgcacgagatggagaacacgctggagcctgatgagtttgctgagctctggaaaggggagtaggctttgatcgaccctgtcaatgtcgtgaagcacccgcaactcctgtcagcaagcgcagattttgtttacctgtgtggcagtgtctatgttgtggaagttctgtatgacaaggcctacgtttattttacataaaatcggattttagtgataacttatgcccatatgacattctctcttgtttgcttctagtggatgtggtgccaagtgttatatcacttatgtgattggtagctgagaatcatggggaagcgcgatcacagttcaaacctcaagatatcaatgtgatagccatagccgtgttccatatgtatactatgtacttcatttcagcaatggttttgtaaggaaaatagatcaagcttcattt

SEQ ID NO: 7520 - protein, 322 aa, Zea mays subsp. mays
  peptide (1)..(322): Ceres Seq. ID no. 12357894
  misc_feature (1)..(322): Homolog of NCBI NO: 18400776 NR Description: expressed protein; protein id: At3g15460.1, by cDNA: 2356., supported by cDNA: gi_16648688 [Arabidopsis
  misc_feature (1)..(322): Homolog of NCBI NO: 16648689 NR Description: AT3g15460/MJK13_12 [Arabidopsis thaliana]
  misc_feature (1)..(322): Homolog of NCBI NO: 18404250 NR Description: expressed protein; protein id: At1g52930.1, by cDNA: gi_13878054, supported by cDNA: gi_17104646 [Arabidopsis
  misc_feature (1)..(319): Homolog of NCBI NO: 30580352 NR Description: Ribosome biogenesis protein Brix
  misc_feature (3)..(319): Homolog of NCBI NO: 19311012 NR Description: BRIX [Homo sapiens]
  misc_feature (46)..(313): Homolog of NCBI NO: 6324496 NR Description: Essential nucleolar protein required for of the 60S ribosomal subunit; Brx1p [Saccharomyces cerevisiae]
  misc_feature (56)..(308): Homolog of NCBI NO: 27370947 NR Description: Similar to BRIX [Xenopus laevis]
  misc_feature (56)..(308): Homolog of NCBI NO: 30580353 NR Description: Ribosome biogenesis protein Brix (Bx24)
  misc_feature (57)..(239): Homolog of NCBI NO: 32414967 NR Description: hypothetical protein [Neurospora crassa] conserved hypothetical protein [Neurospora crassa]
  misc_feature (241)..(307): Homolog of NCBI NO: 32414967 NR Description: hypothetical protein [Neurospora crassa] conserved hypothetical protein [Neurospora crassa]
MAKKRKHTDAQAETAGAEKPDDSAPARPERTLFGFKDPAPDAVPASAASRAAVAPFRNREKVLITCSRRITYRYRHLMQDVLSMLPHAKKDSKVESKQSKGNALNEMLELRSCSSCLFFECRKQKDLYLWMVKSPGGPSVKFLVNAVHTMEELKLTGNHLKGSRPLLTFSTNFDEQPHWKLVKEIITHIFATPKDHRKAKPFHDHVFVFSIVDGHVWFRNYQISVPHNEIDKVDKGGMDKMTLIEVGPRFCLNPIKIFGGSFGGPTWYENPYYISPNQIRALEKRQKAGKYAKKVKAKVRRKMHEMENTLEPDEFAELWKGE

SEQ ID NO: 7521 - protein, 245 aa, Zea mays subsp. mays
  peptide (1)..(245): Ceres Seq. ID no. 12357895
  misc_feature (1)..(245): Homolog of NCBI NO: 18400776 NR Description: expressed protein; protein id: At3g15460.1, by cDNA: 2356., supported by cDNA: gi_16648688 [Arabidopsis
  misc_feature (1)..(245): Homolog of NCBI NO: 16648689 NR Description: AT3g15460/MJK13_12 [Arabidopsis thaliana]
  misc_feature (1)..(245): Homolog of NCBI NO: 18404250 NR Description: expressed protein; protein id: At1g52930.1, by cDNA: gi_13878054, supported by cDNA: gi_17104646 [Arabidopsis
  misc_feature (1)..(242): Homolog of NCBI NO: 30580352 NR Description: Ribosome biogenesis protein Brix
  misc_feature (1)..(242): Homolog of NCBI NO: 19311012 NR Description: BRIX [Homo sapiens]
  misc_feature (1)..(236): Homolog of NCBI NO: 6324496 NR Description: Essential nucleolar protein required for of the 60S ribosomal subunit; Brx1p [Saccharomyces cerevisiae]
  misc_feature (1)..(231): Homolog of NCBI NO: 27370947 NR Description: Similar to BRIX [Xenopus laevis]
  misc_feature (1)..(231): Homolog of NCBI NO: 30580353 NR Description: Ribosome biogenesis protein Brix (Bx24)
  misc_feature (1)..(162): Homolog of NCBI NO: 32414967 NR Description: hypothetical protein [Neurospora crassa] conserved hypothetical protein [Neurospora crassa]
  misc_feature (164)..(230): Homolog of NCBI NO: 32414967 NR Description: hypothetical protein [Neurospora crassa] conserved hypothetical protein [Neurospora crassa]
MQDVLSMLPHAKKDSKVESKQSKGNALNEMLELRSCSSCLFFECRKQKDLYLWMVKSPGGPSVKFLVNAVHTMEELKLTGNHLKGSRPLLTFSTNFDEQPHWKLVKEIITHIFATPKDHRKAKPFHDHVFVFSIVDGHVWFRNYQISVPHNEIDKVDKGGMDKMTLIEVGPRFCLNPIKIFGGSFGGPTWYENPYYISPNQIRALEKRQKAGKYAKKVKAKVRRKMHEMENTLEPDEFAELWKGE

SEQ ID NO: 7522 - protein, 239 aa, Zea mays subsp. mays
  peptide (1)..(239): Ceres Seq. ID no. 12357896
  misc_feature (1)..(239): Homolog of NCBI NO: 18400776 NR Description: expressed protein; protein id: At3g15460.1, by cDNA: 2356., supported by cDNA: gi_16648688 [Arabidopsis
  misc_feature (1)..(239): Homolog of NCBI NO: 16648689 NR Description: AT3g15460/MJK13_12 [Arabidopsis thaliana]
  misc_feature (1)..(239): Homolog of NCBI NO: 18404250 NR Description: expressed protein; protein id: At1g52930.1, by cDNA: gi_13878054, supported by cDNA: gi_17104646 [Arabidopsis
  misc_feature (1)..(236): Homolog of NCBI NO: 30580352 NR Description: Ribosome biogenesis protein Brix
  misc_feature (1)..(236): Homolog of NCBI NO: 19311012 NR Description: BRIX [Homo sapiens]
  misc_feature (1)..(230): Homolog of NCBI NO: 6324496 NR Description: Essential nucleolar protein required for of the 60S ribosomal subunit; Brx1p [Saccharomyces cerevisiae]
  misc_feature (1)..(225): Homolog of NCBI NO: 27370947 NR Description: Similar to BRIX [Xenopus laevis]
  misc_feature (1)..(225): Homolog of NCBI NO: 30580353 NR Description: Ribosome biogenesis protein Brix (Bx24)
  misc_feature (1)..(156): Homolog of NCBI NO: 32414967 NR Description: hypothetical protein [Neurospora crassa] conserved hypothetical protein [Neurospora crassa]
  misc_feature (158)..(224): Homolog of NCBI NO: 32414967 NR Description: hypothetical protein [Neurospora crassa] conserved hypothetical protein [Neurospora crassa]
MLPHAKKDSKVESKQSKGNALNEMLELRSCSSCLFFECRKQKDLYLWMVKSPGGPSVKFLVNAVHTMEELKLTGNHLKGSRPLLTFSTNFDEQPHWKLVKEIITHIFATPKDHRKAKPFHDHVFVFSIVDGHVWFRNYQISVPHNEIDKVDKGGMDKMTLIEVGPRFCLNPIKIFGGSFGGPTWYENPYYISPNQIRALEKRQKAGKYAKKVKAKVRRKMHEMENTLEPDEFAELWKGE

SEQ ID NO: 7523 - DNA, 2155 bp, Zea mays subsp. mays
  misc_feature (1)..(2155): Ceres Seq. ID no. 12408748
  misc_feature: MA Experiment ID: 108522 Result: Down-regulated in Transcription
  misc_feature: MA Experiment 108522 PARAMETER Experiment Name: Zm_42deg_Heat_P Parameter: Age (day) Value: 8
  misc_feature: MA Experiment 108522 PARAMETER Experiment Name: Zm_42deg_Heat_P Parameter: Organism Value: Zea mays
  misc_feature: MA Experiment 108522 PARAMETER Experiment Name: Zm_42deg_Heat_P Parameter: Plant Line Value: 35A19
  misc_feature: MA Experiment 108522 PARAMETER Experiment Name: Zm_42deg_Heat_P Parameter: Temperature (deg C) Value: 42 vs. 22
  misc_feature: MA Experiment 108522 PARAMETER Experiment Name: Zm_42deg_Heat_P Parameter: Timepoint (hr) Value: 1
  misc_feature: MA Experiment 108522 PARAMETER Experiment Name: Zm_42deg_Heat_P Parameter: Tissue Value: Aerial
  misc_feature: MA Experiment ID: 20000492 Result: Down-regulated in Transcription
  misc_feature: MA Experiment 20000492 PARAMETER Experiment Name: Zm_Hybrid_Seed_Dev_P Parameter: DAP Value: 12
  misc_feature: MA Experiment 20000492 PARAMETER Experiment Name: Zm_Hybrid_Seed_Dev_P Parameter: Organism Value: Zea mays
  misc_feature: MA Experiment 20000492 PARAMETER Experiment Name: Zm_Hybrid_Seed_Dev_P Parameter: Plant Line Value: 35A19
  misc_feature: MA Experiment 20000492 PARAMETER Experiment Name: Zm_Hybrid_Seed_Dev_P Parameter: Tissue Value: Fert Kernel vs. Unfert Floret
acccctgcttgctgcagcttcaagcactaccgaatcagggcgagtgggagcagaggagggaatcccatgtctccgcccctcgctggagcagatcgttgtcgagccgacgtggagctgctgcggtagaaagctagcggagcctgcgagctagcctgatccgtccgcagtccgatcgggatcgatgggtggggaggcgccggagccgcggcggctgacccgggcgctgagcatcggcggcggtgacggcggctgggttcccgaggagatgctgcaactcgtgatggggttcgtcgaggacccgcgcgaccgggaggccgcgtcgctggtgtgtcaccggtggcaccgcgtcgacgcgctctcgcggaagcacgtgacggtgcccttctgctacgccgtttccccggcacgcctgctcgcgcggttcccgcggctcgagtcgctcgcggtgaaggggaagcccccgcgcggccatgtacgggctcatacccgacgactggggcgcctacgcccgcccgtggatcaccgagctcgccgcgccgctcgagtgcctcaaggcgctccacctccgacgcatggtcgtcacagacgacgacctcgccgagctcgtccgtgccagggggcacatgctgcaggagctgaagctcgataagtgcaccggcttctccactcatggactccgcctcgttgccccgctcctgcagatcactgaggactttatttttggaagaatgtcaaattgatgataagggcagtgaatggatccacgatctcgcagtctgctgtcctgttctgacaacattgaatttccacatgactgagcttgaagtgatgccagctgacctaaagcttcttgcaaagagctgcaagtcactgatttcattgaagattagtgactgcgatctttcagatttgatagagttcttccaatttgccacagcactggaagaatttgctggagggacattcaatgagcaaggggaactcagcaagtatgtgaatgttaaatttccatcaagactatgctccttgggacttacttacatgggaacaaatgaaatgcccattatgttccctttttctgcaatactaaagaagctggatttgcaatacactttcctcaccactgaggaccattgccagctcattgcaaaatgcccgaacttactagttctcgcggtgaggaatgtgattggagatagaggattaggagttgttgcggatacgtgcaagaagctccaaaggctcagaatagagcgaggagatgatgaaggaggtgtgcaagaagagcagggaggggtctctcaagtgggcttgacggctatagccgtaggttgccgtgagctggaatatatagctgcctatgtgtctgatataaccaatggggccttggaatctatcgggacattctgcaaaaaactatacgacttccggcttgttctacttgatagagaagagaggataacagacttgccactggacaatggtgtccgagctttgttgaggggctgcaccaagcttcggaggtttgctctgtacttgagaccaggagggctctcagatgcaggtctcggctacattggacagtgcagcggaaacatccagtacatgcttctcggtaatgttggggaaactgatgatggattgatcagcttcgcattgggttgcgtaaacctgcgaaagcttgaactcaggagttgctgcttcagcgagcgagcactggcccttgcaatactacatatgccttccctgaggtacgtatgggttcagggctacaaagcgtctcaaaccggccgagacctcatgctcatggcaaggcccttctggaacatagagtttacacctcccaatcctaagaacggaggttggctgatggaagatggggagccttgtgtagatagtcacgctcagatacttgcataccactccctcgccggtaagaggctggactgcccacaatccgtggttcctttgtatcctgcgtgagtgtaaatagactaagctggtgtctttccttagcctcctggtcaacaagaatggtgttgataactcgatatatgcggttattgtatggatctagatggctagctgctacgtactgtaataagctactagtagctgagagatgtcctggaataagcccttgctatttttgcct

SEQ ID NO: 7524 - protein, 437 aa, Zea mays subsp. mays
  peptide (1)..(437): Ceres Seq. ID no. 12408749
  misc_feature (8)..(437): Homolog of NCBI NO: 34908378 NR Description: P0529E05.15 [Oryza sativa (japonica
  misc_feature (6)..(436): Homolog of NCBI NO: 40218003 NR Description: coronatine-insensitive 1 [Lycopersicon esculentum]
  misc_feature (4)..(437): Homolog of NCBI NO: 34902000 NR Description: unknown protein [Oryza sativa (japonica
  misc_feature (5)..(431): Homolog of NCBI NO: 18405209 NR Description: coronatine-insensitive 1 (COI1), AtFBL2; protein At2g39940.1, supported by cDNA: gi_15010647, supported by cDNA:
  misc_feature (4)..(431): Homolog of NCBI NO: 18391439 NR Description: transport inhibitor response 1 (TIR1), putative; id: At1g12820.1, supported by cDNA: gi_20466150 [Arabidopsis
  misc_feature (4)..(431): Homolog of NCBI NO: 18405102 NR Description: transport inhibitor response 1 (TIR1), putative; id: At3g26810.1, supported by cDNA: gi_17064983 [Arabidopsis
  misc_feature (4)..(431): Homolog of NCBI NO: 21740736 NR Description: OSJNBa0072K14.1 [Oryza sativa (japonica
  misc_feature (4)..(431): Homolog of NCBI NO: 18412177 NR Description: F-box protein GRR1-like protein 1, AtFBL18; id: At4g03190.1, supported by cDNA: gi_12658969, supported by gi_15027884 [Arabidopsis thaliana] >gi|25352265|pir||E85040
  misc_feature (4)..(431): Homolog of NCBI NO: 12658970 NR Description: GRR1-like protein 1 [Arabidopsis thaliana]
  misc_feature (4)..(431): Homolog of NCBI NO: 15027885 NR Description: putative F-box protein GRR1 protein 1, AtFBL18
MDSASLPRSCRSLRTLFLEECQIDDKGSEWIHDLAVCCPVLTTLNFHMTELEVMPADLKLLAKSCKSLISLKISDCDLSDLIEFFQFATALEEFAGGTFNEQGELSKYVNVKFPSRLCSLGLTYMGTNEMPIMFPFSAILKKLDLQYTFLTTEDHCQLIAKCPNLLVLAVRNVIGDRGLGVVADTCKKLQRLRIERGDDEGGVQEEQGGVSQVGLTAIAVGCRELEYIAAYVSDITNGALESIGTFCKKLYDFRLVLLDREERITDLPLDNGVRALLRGCTKLRRFALYLRPGGLSDAGLGYIGQCSGNIQYMLLGNVGETDDGLISFALGCVNLRKLELRSCCFSERALALAILHMPSLRYVWVQGYKASQTGRDLMLMARPFWNIEFTPPNPKNGGWLMEDGEPCVDSHAQILAYHSLAGKRLDCPQSVVPLYPA

SEQ ID NO: 7525 - protein, 390 aa, Zea mays subsp. mays
  peptide (1)..(390): Ceres Seq. ID no. 12408750
  misc_feature (1)..(390): Homolog of NCBI NO: 34908378 NR Description: P0529E05.15 [Oryza sativa (japonica
  misc_feature (1)..(389): Homolog of NCBI NO: 40218003 NR Description: coronatine-insensitive 1 [Lycopersicon esculentum]
  misc_feature (1)..(390): Homolog of NCBI NO: 34902000 NR Description: unknown protein [Oryza sativa (japonica
  misc_feature (1)..(384): Homolog of NCBI NO: 18405209 NR Description: coronatine-insensitive 1 (COI1), AtFBL2; protein At2g39940.1, supported by cDNA: gi_15010647, supported by cDNA:
  misc_feature (1)..(384): Homolog of NCBI NO: 18391439 NR Description: transport inhibitor response 1 (TIR1), putative; id: At1g12820.1, supported by cDNA: gi_20466150 [Arabidopsis
  misc_feature (1)..(384): Homolog of NCBI NO: 18405102 NR Description: transport inhibitor response 1 (TIR1), putative; id: At3g26810.1, supported by cDNA: gi_17064983 [Arabidopsis
  misc_feature (1)..(384): Homolog of NCBI NO: 21740736 NR Description: OSJNBa0072K14.1 [Oryza sativa (japonica
  misc_feature (1)..(384): Homolog of NCBI NO: 18412177 NR Description: F-box protein GRR1-like protein 1, AtFBL18; id: At4g03190.1, supported by cDNA: gi_12658969, supported by gi_15027884 [Arabidopsis thaliana] >gi|25352265|pir||E85040
  misc_feature (1)..(384): Homolog of NCBI NO: 12658970 NR Description: GRR1-like protein 1 [Arabidopsis thaliana]
  misc_feature (1)..(384): Homolog of NCBI NO: 15027885 NR Description: putative F-box protein GRR1 protein 1, AtFBL18
MTELEVMPADLKLLAKSCKSLISLKISDCDLSDLIEFFQFATALEEFAGGTFNEQGELSKYVNVKFPSRLCSLGLTYMGTNEMPIMFPFSAILKKLDLQYTFLTTEDHCQLIAKCPNLLVLAVRNVIGDRGLGVVADTCKKLQRLRIERGDDEGGVQEEQGGVSQVGLTAIAVGCRELEYIAAYVSDITNGALESIGTFCKKLYDFRLVLLDREERITDLPLDNGVRALLRGCTKLRRFALYLRPGGLSDAGLGYIGQCSGNIQYMLLGNVGETDDGLISFALGCVNLRKLELRSCCFSERALALAILHMPSLRYVWVQGYKASQTGRDLMLMARPFWNIEFTPPNPKNGGWLMEDGEPCVDSHAQILAYHSLAGKRLDCPQSVVPLYPA

SEQ ID NO: 7526 - protein, 384 aa, Zea mays subsp. mays
  peptide (1)..(384): Ceres Seq. ID no. 12408751
  misc_feature (1)..(384): Homolog of NCBI NO: 34908378 NR Description: P0529E05.15 [Oryza sativa (japonica
  misc_feature (1)..(383): Homolog of NCBI NO: 40218003 NR Description: coronatine-insensitive 1 [Lycopersicon esculentum]
  misc_feature (1)..(384): Homolog of NCBI NO: 34902000 NR Description: unknown protein [Oryza sativa (japonica
  misc_feature (1)..(378): Homolog of NCBI NO: 18405209 NR Description: coronatine-insensitive 1 (COI1), AtFBL2; protein At2g39940.1, supported by cDNA: gi_15010647, supported by cDNA:
  misc_feature (1)..(378): Homolog of NCBI NO: 18391439 NR Description: transport inhibitor response 1 (TIR1), putative; id: At1g12820.1, supported by cDNA: gi_20466150 [Arabidopsis
  misc_feature (1)..(378): Homolog of NCBI NO: 18405102 NR Description: transport inhibitor response 1 (TIR1), putative; id: At3g26810.1, supported by cDNA: gi_17064983 [Arabidopsis
  misc_feature (1)..(378): Homolog of NCBI NO: 21740736 NR Description: OSJNBa0072K14.1 [Oryza sativa (japonica
  misc_feature (1)..(378): Homolog of NCBI NO: 18412177 NR Description: F-box protein GRR1-like protein 1, AtFBL18; id: At4g03190.1, supported by cDNA: gi_12658969, supported by gi_15027884 [Arabidopsis thaliana] >gi|25352265|pir||E85040
  misc_feature (1)..(378): Homolog of NCBI NO: 12658970 NR Description: GRR1-like protein 1 [Arabidopsis thaliana]
  misc_feature (1)..(378): Homolog of NCBI NO: 15027885 NR Description: putative F-box protein GRR1 protein 1, AtFBL18
MPADLKLLAKSCKSLISLKISDCDLSDLIEFFQFATALEEFAGGTFNEQGELSKYVNVKFPSRLCSLGLTYMGTNEMPIMFPFSAILKKLDLQYTFLTTEDHCQLIAKCPNLLVLAVRNVIGDRGLGVVADTCKKLQRLRIERGDDEGGVQEEQGGVSQVGLTAIAVGCRELEYIAAYVSDITNGALESIGTFCKKLYDFRLVLLDREERITDLPLDNGVRALLRGCTKLRRFALYLRPGGLSDAGLGYIGQCSGNIQYMLLGNVGETDDGLISFALGCVNLRKLELRSCCFSERALALAILHMPSLRYVWVQGYKASQTGRDLMLMARPFWNIEFTPPNPKNGGWLMEDGEPCVDSHAQILAYHSLAGKRLDCPQSVVPLYPA

SEQ ID NO: 7527 - DNA, 1808 bp, Zea mays subsp. mays
  misc_feature (1)..(1808): Ceres Seq. ID no. 12408744
  misc_feature: MA Experiment ID: 108523 Result: Up-regulated in Transcription
  misc_feature: MA Experiment 108523 PARAMETER Experiment Name: Zm_42deg_Heat_P Parameter: Age (day) Value: 8
  misc_feature: MA Experiment 108523 PARAMETER Experiment Name: Zm_42deg_Heat_P Parameter: Organism Value: Zea mays
  misc_feature: MA Experiment 108523 PARAMETER Experiment Name: Zm_42deg_Heat_P Parameter: Plant Line Value: 35A19
  misc_feature: MA Experiment 108523 PARAMETER Experiment Name: Zm_42deg_Heat_P Parameter: Temperature (deg C) Value: 42 vs. 22
  misc_feature: MA Experiment 108523 PARAMETER Experiment Name: Zm_42deg_Heat_P Parameter: Timepoint (hr) Value: 6
  misc_feature: MA Experiment 108523 PARAMETER Experiment Name: Zm_42deg_Heat_P Parameter: Tissue Value: Aerial
aattccaggagccgcctccttctagagggagagagggagggaccacagccgcggccgcaccggcgcacaccacctacaccgcccgaattcccgatcgataccggagctggacgtggcctagggtttccgagccaggccggcgctatggtgggctgctctaggggctccctccccacctggatgaccgccgccgccgcgcgggtcgacctctcgggcggcgtaacgccttcgcaccagggcccatcctcttcgtccccctcctcgggtcccgctccggccgcgggggcggaccaggagctcgggatgtacgagcgcgcgttctccgctgccggcgccgccttcgtctcagctatcatcgtcaaccctctagatgtcgccaagactagattgcaggcgcaggcggcaggggtgctgtaccaccagcctgcccagatggcggcgctcggccccgatgcgatcctgtctgaattccgatgctctccttcgtgcacacgtggtcttgtattaggaagtgagccagtttgtcctcctgactgcttccagtacaaggggacacttgatgtattcttgaaagtggttagacaggaggggttcgttagactatggagaggaacaaatgcaggcttagcattagctgtacccactgttgggatatacttgccttgttatgatatattccgcaactggattgaggatttcacaagaagtaatgctcctggcttgacaccatatgccccgctagtagcaggatctgttgcacgctcgttagcatgtattgcttgttctccaattgagctcgcaaggacgcgtatgcaggcatataaagagtttcgtcctggcgtaaagcctcctggaatgtggaaaaccttggttggtgttctctcaccacttccaagttcgagtcagaatgtacaaaattaccgtgttctgtggactggggtgggtgcacaacttgctcgagatgttcctttctctgctatatgctggtcaactcttgagcctatgcgaagaaaactacttggttttgttggagaagaaggcaatgcaggtagtgtattgggagtgaattttgctgctggttttgtagcaggcagtcttgctgctggtgctacatgccctctggatgttgcaaaaacaaggagacaaatagagaaggatactgagaaggcaatgaggatgactacaaggcaaacattagctgagatatggaggtctggaggcatgaaaggtctgttcgccggcgttggcccacgtgttgcacgcgctggtccatcggttggtattgtcatttccttctacgaggttgtcaagtacgctcttcatcaaaggcacacctcatgacctagttttgttgataagatggaagccctcccattttgtgaaggcatggtaggctagttactctgacagggctaggtgtaagttggaagatcagagtgcccaacagtcaagacacgacaggctttttcatggacagtgtccatttcagtcaaggataacaataccagttttgccatggagcaggctccagtttcgcccgtgtcaggttttggatcatcgtctaagcttatgtcttggctggatctgaagctgctccggtaaacttggtgtagtccctgtaattgaaggaaaggagagtgtagtagcgtagatactgatcaataattttgcacacccttgaaactacagaagaaattttgcacatcctagtctttgtctcgatgacttaaaaaaagttttggtcttcttgttgacttgttactgtaaaaaccaacgggtatatgtttacttggcagaatcattaattc

SEQ ID NO: 7528 - protein, 446 aa, Zea mays subsp. mays
  peptide (1)..(446): Ceres Seq. ID no. 12408745
  misc_feature (74)..(446): Homolog of NCBI NO: 18417093 NR Description: putative protein; protein id: At4g27940.1, by cDNA: 147875., supported by cDNA: gi_16226566 [Arabidopsis >gi|16226567|gb|AAL16202.1|AF428433_1 AT4g27940/T13J8_50
  misc_feature (97)..(444): Homolog of NCBI NO: 30690323 NR Description: mitochondrial carrier protein family [Arabidopsis
  misc_feature (97)..(444): Homolog of NCBI NO: 19310377 NR Description: At2g46320/F11C10.1 [Arabidopsis thaliana]
  misc_feature (97)..(444): Homolog of NCBI NO: 25408981 NR Description: hypothetical protein At2g46320 [imported] - thaliana >gi|20197376|gb|AAM15049.1| hypothetical protein
  misc_feature (170)..(444): Homolog of NCBI NO: 34904154 NR Description: P0417G05.20 [Oryza sativa (japonica
  misc_feature (195)..(444): Homolog of NCBI NO: 30690327 NR Description: mitochondrial carrier protein family [Arabidopsis
  misc_feature (96)..(384): Homolog of NCBI NO: 7486963 NR Description: hypothetical protein T13J8.50 - Arabidopsis >gi|4455353|emb|CAB36763.1| putative protein [Arabidopsis >gi|7269648|emb|CAB79596.1| putative protein [Arabidopsis
  misc_feature (89)..(444): Homolog of NCBI NO: 32766523 NR Description: Unknown (protein for MGC:63736) [Danio rerio]
  misc_feature (246)..(443): Homolog of NCBI NO: 20070705 NR Description: mitochondrial carrier family protein [Homo
  misc_feature (49)..(446): Homolog of NCBI NO: 40253478 NR Description: putative mitochondrial carrier protein [Oryza
NSRSRLLLEGEREGPQPRPHRRTPPTPPEFPIDTGAGRGLGFPSQAGAMVGCSRGSLPTWMTAAAARVDLSGGVTPSHQGPSSSSPSSGPAPAAGADQELGMYERAFSAAGAAFVSAIIVNPLDVAKTRLQAQAAGVLYHQPAQMAALGPDAILSEFRCSPSCTRGLVLGSEPVCPPDCFQYKGTLDVFLKVVRQEGFVRLWRGTNAGLALAVPTVGIYLPCYDIFRNWIEDFTRSNAPGLTPYAPLVAGSVARSLACIACSPIELARTRMQAYKEFRPGVKPPGMWKTLVGVLSPLPSSSQNVQNYRVLWTGVGAQLARDVPFSAICWSTLEPMRRKLLGFVGEEGNAGSVLGVNFAAGFVAGSLAAGATCPLDVAKTRRQIEKDTEKAMRMTTRQTLAEIWRSGGMKGLFAGVGPRVARAGPSVGIVISFYEVVKYALHQRHTS

SEQ ID NO: 7529 - protein, 398 aa, Zea mays subsp. mays
  peptide (1)..(398): Ceres Seq. ID no. 12408746
  misc_feature (1)..(398): Homolog of NCBI NO: 40253478 NR Description: putative mitochondrial carrier protein [Oryza
  misc_feature (26)..(398): Homolog of NCBI NO: 18417093 NR Description: putative protein; protein id: At4g27940.1, by cDNA: 147875., supported by cDNA: gi_16226566 [Arabidopsis >gi|16226567|gb|AAL16202.1|AF428433_1 AT4g27940/T13J8_50
  misc_feature (49)..(396): Homolog of NCBI NO: 30690323 NR Description: mitochondrial carrier protein family [Arabidopsis
  misc_feature (49)..(396): Homolog of NCBI NO: 19310377 NR Description: At2g46320/F11C10.1 [Arabidopsis thaliana]
  misc_feature (49)..(396): Homolog of NCBI NO: 25408981 NR Description: hypothetical protein At2g46320 [imported] - thaliana >gi|20197376|gb|AAM15049.1| hypothetical protein
  misc_feature (122)..(396): Homolog of NCBI NO: 34904154 NR Description: P0417G05.20 [Oryza sativa (japonica
  misc_feature (147)..(396): Homolog of NCBI NO: 30690327 NR Description: mitochondrial carrier protein family [Arabidopsis
  misc_feature (48)..(336): Homolog of NCBI NO: 7486963 NR Description: hypothetical protein T13J8.50 - Arabidopsis >gi|4455353|emb|CAB36763.1| putative protein [Arabidopsis >gi|7269648|emb|CAB79596.1| putative protein [Arabidopsis
  misc_feature (41)..(396): Homolog of NCBI NO: 32766523 NR Description: Unknown (protein for MGC:63736) [Danio rerio]
  misc_feature (198)..(395): Homolog of NCBI NO: 20070705 NR Description: mitochondrial carrier family protein [Homo
MVGCSRGSLPTWMTAAAARVDLSGGVTPSHQGPSSSSPSSGPAPAAGADQELGMYERAFSAAGAAFVSAIIVNPLDVAKTRLQAQAAGVLYHQPAQMAALGPDAILSEFRCSPSCTRGLVLGSEPVCPPDCFQYKGTLDVFLKVVRQEGFVRLWRGTNAGLALAVPTVGIYLPCYDIFRNWIEDFTRSNAPGLTPYAPLVAGSVARSLACIACSPIELARTRMQAYKEFRPGVKPPGMWKTLVGVLSPLPSSSQNVQNYRVLWTGVGAQLARDVPFSAICWSTLEPMRRKLLGFVGEEGNAGSVLGVNFAAGFVAGSLAAGATCPLDVAKTRRQIEKDTEKAMRMTTRQTLAEIWRSGGMKGLFAGVGPRVARAGPSVGIVISFYEVVKYALHQRHTS

SEQ ID NO: 7530 - protein, 386 aa, Zea mays subsp. mays
  peptide (1)..(386): Ceres Seq. ID no. 12408747
  misc_feature (1)..(386): Homolog of NCBI NO: 40253478 NR Description: putative mitochondrial carrier protein [Oryza
  misc_feature (14)..(386): Homolog of NCBI NO: 18417093 NR Description: putative protein; protein id: At4g27940.1, by cDNA: 147875., supported by cDNA: gi_16226566 [Arabidopsis >gi|16226567|gb|AAL16202.1|AF428433_1 AT4g27940/T13J8_50
  misc_feature (37)..(384): Homolog of NCBI NO: 30690323 NR Description: mitochondrial carrier protein family [Arabidopsis
  misc_feature (37)..(384): Homolog of NCBI NO: 19310377 NR Description: At2g46320/F11C10.1 [Arabidopsis thaliana]
  misc_feature (37)..(384): Homolog of NCBI NO: 25408981 NR Description: hypothetical protein At2g46320 [imported] - thaliana >gi|20197376|gb|AAM15049.1| hypothetical protein
  misc_feature (110)..(384): Homolog of NCBI NO: 34904154 NR Description: P0417G05.20 [Oryza sativa (japonica
  misc_feature (135)..(384): Homolog of NCBI NO: 30690327 NR Description: mitochondrial carrier protein family [Arabidopsis
  misc_feature (36)..(324): Homolog of NCBI NO: 7486963 NR Description: hypothetical protein T13J8.50 - Arabidopsis >gi|4455353|emb|CAB36763.1| putative protein [Arabidopsis >gi|7269648|emb|CAB79596.1| putative protein [Arabidopsis
  misc_feature (29)..(384): Homolog of NCBI NO: 32766523 NR Description: Unknown (protein for MGC:63736) [Danio rerio]
  misc_feature (186)..(383): Homolog of NCBI NO: 20070705 NR Description: mitochondrial carrier family protein [Homo
MTAAAARVDLSGGVTPSHQGPSSSSPSSGPAPAAGADQELGMYERAFSAAGAAFVSAIIVNPLDVAKTRLQAQAAGVLYHQPAQMAALGPDAILSEFRCSPSCTRGLVLGSEPVCPPDCFQYKGTLDVFLKVVRQEGFVRLWRGTNAGLALAVPTVGIYLPCYDIFRNWIEDFTRSNAPGLTPYAPLVAGSVARSLACIACSPIELARTRMQAYKEFRPGVKPPGMWKTLVGVLSPLPSSSQNVQNYRVLWTGVGAQLARDVPFSAICWSTLEPMRRKLLGFVGEEGNAGSVLGVNFAAGFVAGSLAAGATCPLDVAKTRRQIEKDTEKAMRMTTRQTLAEIWRSGGMKGLFAGVGPRVARAGPSVGIVISFYEVVKYALHQRHTS

SEQ ID NO: 7531 - DNA, 1815 bp, Zea mays subsp. mays
  misc_feature (1)..(1815): Ceres Seq. ID no. 12408731
  misc_feature: MA Experiment ID: 108535 Result: Down-regulated in Transcription
  misc_feature: MA Experiment 108535 PARAMETER Experiment Name: Zm_Meristem_P Parameter: Age (day) Value: 8
  misc_feature: MA Experiment 108535 PARAMETER Experiment Name: Zm_Meristem_P Parameter: Organism Value: Zea mays
  misc_feature: MA Experiment 108535 PARAMETER Experiment Name: Zm_Meristem_P Parameter: Plant Line Value: 35A19
  misc_feature: MA Experiment 108535 PARAMETER Experiment Name: Zm_Meristem_P Parameter: Tissue Value: Root Meristem vs. Above Root Meristem
ctgttcattcagatctgctccgtgctgtgcttcttctgctgctgccttgcagcgaccagcgagaagaaatccattcgctaggccggcccacccacccacgatagcggttgtggtcactcatgcgtcgtcgccggagtccaatctcgccgctcggagtttcttgacttttctggtcggagtttccatttcctcctggaggagattatttctttctcctctttcaccccgagaatctcgtctcgggtcgcgctggtttgattcctcctcgcctgagtccaccgctttcgcttccagtggagaagcttgtccgtgaagcagcgctcgtctcctgcttaaaatttcttccttctgccttggtttctttgctcgcgcccgccgatttgcttgctgcccagtccacactcctccgttcgtgtctcgcggctttccgcactcgttttcccggtctcggatttcgttaccaatgggcaacgcgttcgcgtgcatgccgcgcaaggagcagcgaggcgcggccgcggtgtcgcgcagcaagcggatggggagcgcgcggtcggcgcgcggcgggcccaagctgacgcccgcggaggaggagctcctccaccgccaggctctggccatggccatccaccagcacctcgacgccggcggctccatgtcccgccgcatcgacgccggggcctccctgtcccggcgcatggccccgggctccaccagctcccgccgccgcggcgacctgccggactccgtcacgaatgccaagcccgccccaattgttctggagaatttggaaacaaagaaaattgtccttgttcatggagaagggttcggtgcttggtgttggtacaagaccatctcacacttggaggaagctggtctagatcctgttgccttagatctcacaggctctggcatagaccatactgatacaaacagcatagctacgttagcagattactccaagccattgattgattacctcgacagacttcctgaagatgagaaggtcattttggtcggccatagttgcggaggtgcgagtgtctcgtatgcactggagcagtacccccgaaagatctcaaaggcggtgtttcttactgctacaatggtaaaggatggccagaggccctttgacgtgttctcggaggaactccggtcggcggatgttttcttgcaagagtcacagtttctagtctatggaaatgggaaggacaagcctcctactgggctgatgttcgataagcagcagatcaaggggctgtatttcaaccaaactccttccaaggatatggcactagcagcggtgtccatgaggcctatccctctagccccaatcatggagaagctctccctcaccccggagaactacggctccgtccgtcgctacttcatccaggcactcgacgaccacatgctgtcgccggacgcccaggagaagctggtccgcgagaaccctcccgacggcatcttcaagatcaagggcggcgaccactgccccttcttctcgaagccgcagtccctcaacaagatcctgctggagatcgcacagatccaagctcctgcggcgctgctcaaggcgagctcccccgaggagaccgtcgccgccatggtgacagggccagccaagtcatgactgcatgtatgtagtgtacacgaaaagagaaatgagtaagcacataggttgcaaaagggagggggaggaggtctggggattaactgaagccaagctgtgtcggataataatgtagggagttcaaagtgtttctttctttcttctgtgatcagatcagatcatatagagaatgagaggtggtcagc

SEQ ID NO: 7532 - protein, 388 aa, Zea mays subsp. mays
  peptide (1)..(388): Ceres Seq. ID no. 12408732
  misc_feature (1)..(362): Homolog of NCBI NO: 21595837 NR Description: polyneuridine aldehyde esterase, putative
  misc_feature (1)..(362): Homolog of NCBI NO: 15218463 NR Description: polyneuridine aldehyde esterase, putative; id: At1g33990.1, supported by cDNA: 8327., supported by cDNA: [Arabidopsis thaliana] >gi|10092445|gb|AAG12848.1|AC079286_5
  misc_feature (1)..(362): Homolog of NCBI NO: 30681236 NR Description: hydrolase family [Arabidopsis thaliana] Unknown protein [Arabidopsis thaliana]
  misc_feature (111)..(362): Homolog of NCBI NO: 25518661 NR Description: hypothetical protein F12G12.19 - Arabidopsis >gi|10086476|gb|AAG12536.1|AC015446_17 Unknown protein
  misc_feature (111)..(362): Homolog of NCBI NO: 7485010 NR Description: host response protein homolog T5L19.30 - thaliana >gi|4538993|emb|CAB39614.1| putative host response [Arabidopsis thaliana] >gi|7267686|emb|CAB78113.1| putative host
  misc_feature (41)..(366): Homolog of NCBI NO: 15230077 NR Description: alpha/beta hydrolase, putative; protein id: [Arabidopsis thaliana] >gi|10092202|gb|AAG12619.1|AC074284_5
  misc_feature (82)..(362): Homolog of NCBI NO: 15222699 NR Description: hypothetical protein; protein id: At1g26360.1
  misc_feature (105)..(362): Homolog of NCBI NO: 15222256 NR Description: polyneuridine aldehyde esterase, putative; id: At1g69240.1 [Arabidopsis thaliana]
  misc_feature (105)..(362): Homolog of NCBI NO: 25404802 NR Description: probable alpha/beta hydrolase F23O10.18 - Arabidopsis thaliana >gi|12325081|gb|AAG52490.1|AC018364_8
  misc_feature (148)..(344): Homolog of NCBI NO: 25518436 NR Description: hypothetical protein T1K7.26 - Arabidopsis >gi|9797761|gb|AAF98579.1|AC013427_22 Contains similarity to protein from Oryza sativa gb|Z34271 and contains an alpha/beta
MGNAFACMPRKEQRGAAAVSRSKRMGSARSARGGPKLTPAEEELLHRQALAMAIHQHLDAGGSMSRRIDAGASLSRRMAPGSTSSRRRGDLPDSVTNAKPAPIVLENLETKKIVLVHGEGFGAWCWYKTISHLEEAGLDPVALDLTGSGIDHTDTNSIATLADYSKPLIDYLDRLPEDEKVILVGHSCGGASVSYALEQYPRKISKAVFLTATMVKDGQRPFDVFSEELRSADVFLQESQFLVYGNGKDKPPTGLMFDKQQIKGLYFNQTPSKDMALAAVSMRPIPLAPIMEKLSLTPENYGSVRRYFIQALDDHMLSPDAQEKLVRENPPDGIFKIKGGDHCPFFSKPQSLNKILLEIAQIQAPAALLKASSPEETVAAMVTGPAKS

SEQ ID NO: 7533 - protein, 381 aa, Zea mays subsp. mays
  peptide (1)..(381): Ceres Seq. ID no. 12408733
  misc_feature (1)..(355): Homolog of NCBI NO: 21595837 NR Description: polyneuridine aldehyde esterase, putative
  misc_feature (1)..(355): Homolog of NCBI NO: 15218463 NR Description: polyneuridine aldehyde esterase, putative; id: At1g33990.1, supported by cDNA: 8327., supported by cDNA: [Arabidopsis thaliana] >gi|10092445|gb|AAG12848.1|AC079286_5
  misc_feature (1)..(355): Homolog of NCBI NO: 30681236 NR Description: hydrolase family [Arabidopsis thaliana] Unknown protein [Arabidopsis thaliana]
  misc_feature (104)..(355): Homolog of NCBI NO: 25518661 NR Description: hypothetical protein F12G12.19 - Arabidopsis >gi|10086476|gb|AAG12536.1|AC015446_17 Unknown protein
  misc_feature (104)..(355): Homolog of NCBI NO: 7485010 NR Description: host response protein homolog T5L19.30 - thaliana >gi|4538993|emb|CAB39614.1| putative host response [Arabidopsis thaliana] >gi|7267686|emb|CAB78113.1| putative host
  misc_feature (34)..(359): Homolog of NCBI NO: 15230077 NR Description: alpha/beta hydrolase, putative; protein id: [Arabidopsis thaliana] >gi|10092202|gb|AAG12619.1|AC074284_5
  misc_feature (75)..(355): Homolog of NCBI NO: 15222699 NR Description: hypothetical protein; protein id: At1g26360.1
  misc_feature (98)..(355): Homolog of NCBI NO: 15222256 NR Description: polyneuridine aldehyde esterase, putative; id: At1g69240.1 [Arabidopsis thaliana]
  misc_feature (98)..(355): Homolog of NCBI NO: 25404802 NR Description: probable alpha/beta hydrolase F23O10.18 - Arabidopsis thaliana >gi|12325081|gb|AAG52490.1|AC018364_8
  misc_feature (141)..(337): Homolog of NCBI NO: 25518436 NR Description: hypothetical protein T1K7.26 - Arabidopsis >gi|9797761|gb|AAF98579.1|AC013427_22 Contains similarity to protein from Oryza sativa gb|Z34271 and contains an alpha/beta
MPRKEQRGAAAVSRSKRMGSARSARGGPKLTPAEEELLHRQALAMAIHQHLDAGGSMSRRIDAGASLSRRMAPGSTSSRRRGDLPDSVTNAKPAPIVLENLETKKIVLVHGEGFGAWCWYKTISHLEEAGLDPVALDLTGSGIDHTDTNSIATLADYSKPLIDYLDRLPEDEKVILVGHSCGGASVSYALEQYPRKISKAVFLTATMVKDGQRPFDVFSEELRSADVFLQESQFLVYGNGKDKPPTGLMFDKQQIKGLYFNQTPSKDMALAAVSMRPIPLAPIMEKLSLTPENYGSVRRYFIQALDDHMLSPDAQEKLVRENPPDGIFKIKGGDHCPFFSKPQSLNKILLEIAQIQAPAALLKASSPEETVAAMVTGPAKS

SEQ ID NO: 7534 - protein, 364 aa, Zea mays subsp. mays
  peptide (1)..(364): Ceres Seq. ID no. 12408734
  misc_feature (1)..(338): Homolog of NCBI NO: 21595837 NR Description: polyneuridine aldehyde esterase, putative
  misc_feature (1)..(338): Homolog of NCBI NO: 15218463 NR Description: polyneuridine aldehyde esterase, putative; id: At1g33990.1, supported by cDNA: 8327., supported by cDNA: [Arabidopsis thaliana] >gi|10092445|gb|AAG12848.1|AC079286_5
  misc_feature (1)..(338): Homolog of NCBI NO: 30681236 NR Description: hydrolase family [Arabidopsis thaliana] Unknown protein [Arabidopsis thaliana]
  misc_feature (87)..(338): Homolog of NCBI NO: 25518661 NR Description: hypothetical protein F12G12.19 - Arabidopsis >gi|10086476|gb|AAG12536.1|AC015446_17 Unknown protein
  misc_feature (87)..(338): Homolog of NCBI NO: 7485010 NR Description: host response protein homolog T5L19.30 - thaliana >gi|4538993|emb|CAB39614.1| putative host response [Arabidopsis thaliana] >gi|7267686|emb|CAB78113.1| putative host
  misc_feature (17)..(342): Homolog of NCBI NO: 15230077 NR Description: alpha/beta hydrolase, putative; protein id: [Arabidopsis thaliana] >gi|10092202|gb|AAG12619.1|AC074284_5
  misc_feature (58)..(338): Homolog of NCBI NO: 15222699 NR Description: hypothetical protein; protein id: At1g26360.1
  misc_feature (81)..(338): Homolog of NCBI NO: 15222256 NR Description: polyneuridine aldehyde esterase, putative; id: At1g69240.1 [Arabidopsis thaliana]
  misc_feature (81)..(338): Homolog of NCBI NO: 25404802 NR Description: probable alpha/beta hydrolase F23O10.18 - Arabidopsis thaliana >gi|12325081|gb|AAG52490.1|AC018364_8
  misc_feature (124)..(320): Homolog of NCBI NO: 25518436 NR Description: hypothetical protein T1K7.26 - Arabidopsis >gi|9797761|gb|AAF98579.1|AC013427_22 Contains similarity to protein from Oryza sativa gb|Z34271 and contains an alpha/beta
MGSARSARGGPKLTPAEEELLHRQALAMAIHQHLDAGGSMSRRIDAGASLSRRMAPGSTSSRRRGDLPDSVTNAKPAPIVLENLETKKIVLVHGEGFGAWCWYKTISHLEEAGLDPVALDLTGSGIDHTDTNSIATLADYSKPLIDYLDRLPEDEKVILVGHSCGGASVSYALEQYPRKISKAVFLTATMVKDGQRPFDVFSEELRSADVFLQESQFLVYGNGKDKPPTGLMFDKQQIKGLYFNQTPSKDMALAAVSMRPIPLAPIMEKLSLTPENYGSVRRYFIQALDDHMLSPDAQEKLVRENPPDGIFKIKGGDHCPFFSKPQSLNKILLEIAQIQAPAALLKASSPEETVAAMVTGPAKS

SEQ ID NO: 7535 - DNA, 1678 bp, Zea mays subsp. mays
  misc_feature (1)..(1678): Ceres Seq. ID no. 12367431
  misc_feature: MA Experiment ID: 20000534 Result: Down-regulated in Transcription
  misc_feature: MA Experiment 20000534 PARAMETER Experiment Name: Zm_Hybrid_Pollen_P Parameter: Age (day) Value: 8
  misc_feature: MA Experiment 20000534 PARAMETER Experiment Name: Zm_Hybrid_Pollen_P Parameter: Organism Value: Zea mays
  misc_feature: MA Experiment 20000534 PARAMETER Experiment Name: Zm_Hybrid_Pollen_P Parameter: Plant Line Value: 35A19
  misc_feature: MA Experiment 20000534 PARAMETER Experiment Name: Zm_Hybrid_Pollen_P Parameter: Tissue Value: Pollen vs. Aerial
accggacccgttctgggttttacccctccgccactgccttgttctttcctgctccgctccccacgcgtacgcgcactcgtggcgacgactgggtgatcgccgccgccgccaccacgcaccaccaggccttcaccggcgacaaacaccatcaacagacacaagtgcttcggtcattatagtgccagtaccattctgccagcgagttcctttgccacaaaaagataacactcggatatctcatggcaaaacctgggattttaggccgcagcagtgcacagagatcaaatgagggcatgcgaatcatattctcagcagttattggtgttatgctagggtacttgtttggcatttccttccctacagttaatataacaaagcttcacttcccttccagcattatctcctatatcgaggacagaaactctggcatcacaacccaaacattattgaatcatgcatggacgtctgcagctactcataagaagaacaattcagcttctaactctgatgaaattcctaagatttatgttccaacaaaccctaaaggtgctgaaaggcttccaccgggcattgtagtgtctgaaacagacctttatctccggagattgtggggtgaacctagtgaggatcttactaccaaaccaagataccttgttacatttacagtgggatactctcaaaaggcaaacattgatgcagcggtgaaaaaattttcagataacttcacaattatgttgttccattatgatggccggacaactgagtgggatgaatttgagtggtcaaaaagggctgtccatgtgagtgtcacaaagcagaccaaatggtggtatgccaaacgatttctacatcctgacattgttgcccgctacgactacatatttatctgggatgaagatcttggtgtcgaacattttaatgcagaggcgtacattaagcttgttaggaagcatgggcttgagatctctcagcctggtttggagcccgataaaggtttgacatggcaaatgactaaacgaagaggtgatcaggaagtccacaaagtaactgaggagagacctggctggtgtagcgaccctcacctgccaccatgtgcagcgtttgttgaaattatggcaactgtattctcaagggatgcatggcgctgtgtatggcatatgattcagaacgacttggtccatggatggggccttgattttgctcttaggaaatgtgtggagccagcccatgagaaaattggagtggttgattcccagtggattgttcatcaagtcatcccttcgcttggtaaccagggcaaggcagagaatggaaaagcaccatgggaaggggttagagcacgctgtcgtaaagaatgggggatgttccaaacaaggttgactgatgctgagaaagcatattacttggagcacgggatcacaccaccaaaatcgacggtagcttagctgcacgcaccgacagtagcttagctgcactgcatgcctgcatacaggcacctcgcgagtcacgccaaggtttctgttttgtgaacctagcgccttcctgtccgataagcaactgactctgtagagatgcagcaccacagccagatttgtacagaatcgatgtacgtttttactcttcttaatcttctttacttgttttcaaccgtagcgacgagagtagctcttgtgtaagt

SEQ ID NO: 7536 - protein, 401 aa, Zea mays subsp. mays
  peptide (1)..(401): Ceres Seq. ID no. 12367432
  misc_feature (94)..(393): Pfam Name: Protein of unknown function (DUF707) Pfam Description: Protein of unknown function (DUF707)
  misc_feature (1)..(396): Homolog of NCBI NO: 34906848 NR Description: P0470A12.1 [Oryza sativa (japonica
  misc_feature (1)..(400): Homolog of NCBI NO: 14719314 NR Description: putative protein [Oryza sativa]
  misc_feature (45)..(399): Homolog of NCBI NO: 34905994 NR Description: P0518C01.8 [Oryza sativa (japonica
  misc_feature (5)..(388): Homolog of NCBI NO: 18408876 NR Description: F12A21.2; protein id: At1g67850.1, supported by gi_14326581 [Arabidopsis thaliana] At1g67850/F12A21_2 [Arabidopsis thaliana]
  misc_feature (5)..(393): Homolog of NCBI NO: 18390845 NR Description: storage protein, putative; protein id: supported by cDNA: gi_15810566, supported by cDNA: gi_20259568 thaliana] >gi|15810567|gb|AAL07171.1| putative storage protein
  misc_feature (13)..(388): Homolog of NCBI NO: 22331371 NR Description: unknown protein; protein id: At3g27470.1, by cDNA: gi_19698930 [Arabidopsis thaliana] unknown protein [Arabidopsis thaliana]
  misc_feature (94)..(393): Homolog of NCBI NO: 25407018 NR Description: protein T6D22.12 [imported] - Arabidopsis >gi|8778842|gb|AAF79841.1|AC026875_21 T6D22.12 [Arabidopsis
  misc_feature (6)..(48): Homolog of NCBI NO: 25407018 NR Description: protein T6D22.12 [imported] - Arabidopsis >gi|8778842|gb|AAF79841.1|AC026875_21 T6D22.12 [Arabidopsis
  misc_feature (10)..(390): Homolog of NCBI NO: 22329525 NR Description: unknown protein; protein id: At1g13000.1, by cDNA: gi_18175818, supported by cDNA: gi_20465546 [Arabidopsis >gi|18175819|gb|AAL59933.1| unknown protein [Arabidopsis
  misc_feature (92)..(292): Homolog of NCBI NO: 7939519 NR Description: gb|AAD31054.1~gene_id:K1G2.18~strong similarity
MAKPGILGRSSAQRSNEGMRIIFSAVIGVMLGYLFGISFPTVNITKLHFPSSIISYIEDRNSGITTQTLLNHAWTSAATHKKNNSASNSDEIPKIYVPTNPKGAERLPPGIVVSETDLYLRRLWGEPSEDLTTKPRYLVTFTVGYSQKANIDAAVKKFSDNFTIMLFHYDGRTTEWDEFEWSKRAVHVSVTKQTKWWYAKRFLHPDIVARYDYIFIWDEDLGVEHFNAEAYIKLVRKHGLEISQPGLEPDKGLTWQMTKRRGDQEVHKVTEERPGWCSDPHLPPCAAFVEIMATVFSRDAWRCVWHMIQNDLVHGWGLDFALRKCVEPAHEKIGVVDSQWIVHQVIPSLGNQGKAENGKAPWEGVRARCRKEWGMFQTRLTDAEKAYYLEHGITPPKSTVA

SEQ ID NO: 7537 - protein, 383 aa, Zea mays subsp. mays
  peptide (1)..(383): Ceres Seq. ID no. 12367433
  misc_feature (76)..(375): Pfam Name: Protein of unknown function (DUF707) Pfam Description: Protein of unknown function (DUF707)
  misc_feature (1)..(378): Homolog of NCBI NO: 34906848 NR Description: P0470A12.1 [Oryza sativa (japonica
  misc_feature (1)..(382): Homolog of NCBI NO: 14719314 NR Description: putative protein [Oryza sativa]
  misc_feature (27)..(381): Homolog of NCBI NO: 34905994 NR Description: P0518C01.8 [Oryza sativa (japonica
  misc_feature (1)..(370): Homolog of NCBI NO: 18408876 NR Description: F12A21.2; protein id: At1g67850.1, supported by gi_14326581 [Arabidopsis thaliana] At1g67850/F12A21_2 [Arabidopsis thaliana]
  misc_feature (1)..(375): Homolog of NCBI NO: 18390845 NR Description: storage protein, putative; protein id: supported by cDNA: gi_15810566, supported by cDNA: gi_20259568 thaliana] >gi|15810567|gb|AAL07171.1| putative storage protein
  misc_feature (1)..(370): Homolog of NCBI NO: 22331371 NR Description: unknown protein; protein id: At3g27470.1, by cDNA: gi_19698930 [Arabidopsis thaliana] unknown protein [Arabidopsis thaliana]
  misc_feature (76)..(375): Homolog of NCBI NO: 25407018 NR Description: protein T6D22.12 [imported] - Arabidopsis >gi|8778842|gb|AAF79841.1|AC026875_21 T6D22.12 [Arabidopsis
  misc_feature (1)..(30): Homolog of NCBI NO: 25407018 NR Description: protein T6D22.12 [imported] - Arabidopsis >gi|8778842|gb|AAF79841.1|AC026875_21 T6D22.12 [Arabidopsis
  misc_feature (1)..(372): Homolog of NCBI NO: 22329525 NR Description: unknown protein; protein id: At1g13000.1, by cDNA: gi_18175818, supported by cDNA: gi_20465546 [Arabidopsis >gi|18175819|gb|AAL59933.1| unknown protein [Arabidopsis
  misc_feature (74)..(274): Homolog of NCBI NO: 7939519 NR Description: gb|AAD31054.1~gene_id:K1G2.18~strong similarity
MRIIFSAVIGVMLGYLFGISFPTVNITKLHFPSSIISYIEDRNSGITTQTLLNHAWTSAATHKKNNSASNSDEIPKIYVPTNPKGAERLPPGIVVSETDLYLRRLWGEPSEDLTTKPRYLVTFTVGYSQKANIDAAVKKFSDNFTIMLFHYDGRTTEWDEFEWSKRAVHVSVTKQTKWWYAKRFLHPDIVARYDYIFIWDEDLGVEHFNAEAYIKLVRKHGLEISQPGLEPDKGLTWQMTKRRGDQEVHKVTEERPGWCSDPHLPPCAAFVEIMATVFSRDAWRCVWHMIQNDLVHGWGLDFALRKCVEPAHEKIGVVDSQWIVHQVIPSLGNQGKAENGKAPWEGVRARCRKEWGMFQTRLTDAEKAYYLEHGITPPKSTVA

SEQ ID NO: 7538 - protein, 372 aa, Zea mays subsp. mays
  peptide (1)..(372): Ceres Seq. ID no. 12367434
  misc_feature (65)..(364): Pfam Name: Protein of unknown function (DUF707) Pfam Description: Protein of unknown function (DUF707)
  misc_feature (1)..(19): Homolog of NCBI NO: 25407018 NR Description: protein T6D22.12 [imported] - Arabidopsis >gi|8778842|gb|AAF79841.1|AC026875_21 T6D22.12 [Arabidopsis
  misc_feature (1)..(361): Homolog of NCBI NO: 22329525 NR Description: unknown protein; protein id: At1g13000.1, by cDNA: gi_18175818, supported by cDNA: gi_20465546 [Arabidopsis >gi|18175819|gb|AAL59933.1| unknown protein [Arabidopsis
  misc_feature (1)..(371): Homolog of NCBI NO: 14719314 NR Description: putative protein [Oryza sativa]
  misc_feature (1)..(359): Homolog of NCBI NO: 18408876 NR Description: F12A21.2; protein id: At1g67850.1, supported by gi_14326581 [Arabidopsis thaliana] At1g67850/F12A21_2 [Arabidopsis thaliana]
  misc_feature (1)..(359): Homolog of NCBI NO: 22331371 NR Description: unknown protein; protein id: At3g27470.1, by cDNA: gi_19698930 [Arabidopsis thaliana] unknown protein [Arabidopsis thaliana]
  misc_feature (65)..(364): Homolog of NCBI NO: 25407018 NR Description: protein T6D22.12 [imported] - Arabidopsis >gi|8778842|gb|AAF79841.1|AC026875_21 T6D22.12 [Arabidopsis
  misc_feature (1)..(364): Homolog of NCBI NO: 18390845 NR Description: storage protein, putative; protein id: supported by cDNA: gi_15810566, supported by cDNA: gi_20259568 thaliana] >gi|15810567|gb|AAL07171.1| putative storage protein
  misc_feature (16)..(370): Homolog of NCBI NO: 34905994 NR Description: P0518C01.8 [Oryza sativa (japonica
  misc_feature (1)..(367): Homolog of NCBI NO: 34906848 NR Description: P0470A12.1 [Oryza sativa (japonica
  misc_feature (63)..(263): Homolog of NCBI NO: 7939519 NR Description: gb|AAD31054.1~gene_id:K1G2.18~strong similarity
MLGYLFGISFPTVNITKLHFPSSIISYIEDRNSGITTQTLLNHAWTSAATHKKNNSASNSDEIPKIYVPTNPKGAERLPPGIVVSETDLYLRRLWGEPSEDLTTKPRYLVTFTVGYSQKANIDAAVKKFSDNFTIMLFHYDGRTTEWDEFEWSKRAVHVSVTKQTKWWYAKRFLHPDIVARYDYIFIWDEDLGVEHFNAEAYIKLVRKHGLEISQPGLEPDKGLTWQMTKRRGDQEVHKVTEERPGWCSDPHLPPCAAFVEIMATVFSRDAWRCVWHMIQNDLVHGWGLDFALRKCVEPAHEKIGVVDSQWIVHQVIPSLGNQGKAENGKAPWEGVRARCRKEWGMFQTRLTDAEKAYYLEHGITPPKSTVA

SEQ ID NO: 7539 - DNA, 1597 bp, Zea mays subsp. mays
  misc_feature (1)..(1597): Ceres Seq. ID no. 12412195
  misc_feature: MA Experiment ID: 108522 Result: Down-regulated in Transcription
  misc_feature: MA Experiment 108522 PARAMETER Experiment Name: Zm_42deg_Heat_P Parameter: Age (day) Value: 8
  misc_feature: MA Experiment 108522 PARAMETER Experiment Name: Zm_42deg_Heat_P Parameter: Organism Value: Zea mays
  misc_feature: MA Experiment 108522 PARAMETER Experiment Name: Zm_42deg_Heat_P Parameter: Plant Line Value: 35A19
  misc_feature: MA Experiment 108522 PARAMETER Experiment Name: Zm_42deg_Heat_P Parameter: Temperature (deg C) Value: 42 vs. 22
  misc_feature: MA Experiment 108522 PARAMETER Experiment Name: Zm_42deg_Heat_P Parameter: Timepoint (hr) Value: 1
  misc_feature: MA Experiment 108522 PARAMETER Experiment Name: Zm_42deg_Heat_P Parameter: Tissue Value: Aerial
  misc_feature: MA Experiment ID: 108527 Result: Up-regulated in Transcription
  misc_feature: MA Experiment 108527 PARAMETER Experiment Name: Zm_5mM_NO_P Parameter: Age (day) Value: 8
  misc_feature: MA Experiment 108527 PARAMETER Experiment Name: Zm_5mM_NO_P Parameter: Organism Value: Zea mays
  misc_feature: MA Experiment 108527 PARAMETER Experiment Name: Zm_5mM_NO_P Parameter: Plant Line Value: 35A19
  misc_feature: MA Experiment 108527 PARAMETER Experiment Name: Zm_5mM_NO_P Parameter: Timepoint (hr) Value: 6
  misc_feature: MA Experiment 108527 PARAMETER Experiment Name: Zm_5mM_NO_P Parameter: Tissue Value: Aerial
  misc_feature: MA Experiment 108527 PARAMETER Experiment Name: Zm_5mM_NO_P Parameter: Treatment Value: 5mM NO vs. No Treatment
  misc_feature: MA Experiment ID: 108529 Result: Down-regulated in Transcription
  misc_feature: MA Experiment 108529 PARAMETER Experiment Name: Zm_Imbibed_Seeds_P Parameter: Age (day) Value: 5 vs. 2
  misc_feature: MA Experiment 108529 PARAMETER Experiment Name: Zm_Imbibed_Seeds_P Parameter: Organism Value: Zea mays
  misc_feature: MA Experiment 108529 PARAMETER Experiment Name: Zm_Imbibed_Seeds_P Parameter: Plant Line Value: 35A19
  misc_feature: MA Experiment 108529 PARAMETER Experiment Name: Zm_Imbibed_Seeds_P Parameter: Tissue Value: Roots vs. Embryo
  misc_feature: MA Experiment ID: 108534 Result: Up-regulated in Transcription
  misc_feature: MA Experiment 108534 PARAMETER Experiment Name: Zm_4deg_Cold_P Parameter: Age (hr) Value: 8
  misc_feature: MA Experiment 108534 PARAMETER Experiment Name: Zm_4deg_Cold_P Parameter: Organism Value: Zea mays
  misc_feature: MA Experiment 108534 PARAMETER Experiment Name: Zm_4deg_Cold_P Parameter: Plant Line Value: 35A19
  misc_feature: MA Experiment 108534 PARAMETER Experiment Name: Zm_4deg_Cold_P Parameter: Temperature (deg C) Value: 4 vs. 22
  misc_feature: MA Experiment 108534 PARAMETER Experiment Name: Zm_4deg_Cold_P Parameter: Timepoint (hr) Value: 6
  misc_feature: MA Experiment 108534 PARAMETER Experiment Name: Zm_4deg_Cold_P Parameter: Tissue Value: Aerial
  misc_feature: MA Experiment ID: 108543 Result: Up-regulated in Transcription
  misc_feature: MA Experiment ID: 108544 Result: Down-regulated in Transcription
  misc_feature: MA Experiment ID: 108546 Result: Down-regulated in Transcription
  misc_feature: MA Experiment 108546 PARAMETER Experiment Name: Zm_Imbibed_Seeds_P Parameter: Age (day) Value: 3 vs. 2
  misc_feature: MA Experiment 108546 PARAMETER Experiment Name: Zm_Imbibed_Seeds_P Parameter: Organism Value: Zea mays
  misc_feature: MA Experiment 108546 PARAMETER Experiment Name: Zm_Imbibed_Seeds_P Parameter: Plant Line Value: 35A19
  misc_feature: MA Experiment 108546 PARAMETER Experiment Name: Zm_Imbibed_Seeds_P Parameter: Tissue Value: Roots vs. Embryo
  misc_feature: MA Experiment ID: 108559 Result: Up-regulated in Transcription
  misc_feature: MA Experiment 108559 PARAMETER Experiment Name: Zm_5mM_NO_P Parameter: Age (day) Value: 8
  misc_feature: MA Experiment 108559 PARAMETER Experiment Name: Zm_5mM_NO_P Parameter: Organism Value: Zea mays
  misc_feature: MA Experiment 108559 PARAMETER Experiment Name: Zm_5mM_NO_P Parameter: Plant Line Value: 35A19
  misc_feature: MA Experiment 108559 PARAMETER Experiment Name: Zm_5mM_NO_P Parameter: Timepoint (hr) Value: 12
  misc_feature: MA Experiment 108559 PARAMETER Experiment Name: Zm_5mM_NO_P Parameter: Tissue Value: Aerial
  misc_feature: MA Experiment 108559 PARAMETER Experiment Name: Zm_5mM_NO_P Parameter: Treatment Value: 5mM NO vs. No Treatment
  misc_feature: MA Experiment ID: 108687 Result: Down-regulated in Transcription
  misc_feature: MA Experiment 108687 PARAMETER Experiment Name: Zm_Embryos-Flowers__P Parameter: Tissue Value: Embryo vs. Aerial+
  misc_feature: MA Experiment ID: 20000477 Result: Up-regulated in Transcription
  misc_feature: MA Experiment 20000477 PARAMETER Experiment Name: Zm_5mM_SA_P Parameter: Age (day) Value: 10
  misc_feature: MA Experiment 20000477 PARAMETER Experiment Name: Zm_5mM_SA_P Parameter: Organism Value: Zea mays
  misc_feature: MA Experiment 20000477 PARAMETER Experiment Name: Zm_5mM_SA_P Parameter: Plant Line Value: 35A19
  misc_feature: MA Experiment 20000477 PARAMETER Experiment Name: Zm_5mM_SA_P Parameter: Timepoint (hr) Value: 48
  misc_feature: MA Experiment 20000477 PARAMETER Experiment Name: Zm_5mM_SA_P Parameter: Tissue Value: Aerial
  misc_feature: MA Experiment 20000477 PARAMETER Experiment Name: Zm_5mM_SA_P Parameter: Treatment Value: 5mM SA vs. No Treatment
  misc_feature: MA Experiment ID: 20000478 Result: Up-regulated in Transcription
  misc_feature: MA Experiment 20000478 PARAMETER Experiment Name: Zm_5mM_SA_P Parameter: Age (day) Value: 11
  misc_feature: MA Experiment 20000478 PARAMETER Experiment Name: Zm_5mM_SA_P Parameter: Organism Value: Zea mays
  misc_feature: MA Experiment 20000478 PARAMETER Experiment Name: Zm_5mM_SA_P Parameter: Plant Line Value: 35A19
  misc_feature: MA Experiment 20000478 PARAMETER Experiment Name: Zm_5mM_SA_P Parameter: Timepoint (hr) Value: 72
  misc_feature: MA Experiment 20000478 PARAMETER Experiment Name: Zm_5mM_SA_P Parameter: Tissue Value: Aerial
  misc_feature: MA Experiment 20000478 PARAMETER Experiment Name: Zm_5mM_SA_P Parameter: Treatment Value: 5mM SA vs. No Treatment
  misc_feature: MA Experiment ID: 20000488 Result: Down-regulated in Transcription
  misc_feature: MA Experiment 20000488 PARAMETER Experiment Name: Zm_50mM_NH4NO3_L_to_H_P Parameter: Organism Value: Zea mays
  misc_feature: MA Experiment 20000488 PARAMETER Experiment Name: Zm_50mM_NH4NO3_L_to_H_P Parameter: Timepoint (hr) Value: 8
  misc_feature: MA Experiment 20000488 PARAMETER Experiment Name: Zm_50mM_NH4NO3_L_to_H_P Parameter: Tissue Value: Leaves
  misc_feature: MA Experiment 20000488 PARAMETER Experiment Name: Zm_50mM_NH4NO3_L_to_H_P Parameter: Treatment Value: 50mM NH4NO3 vs. 100mM Mannitol
  misc_feature: MA Experiment ID: 20000532 Result: Up-regulated in Transcription
  misc_feature: MA Experiment 20000532 PARAMETER Experiment Name: Zm_0.001percent_MeJA_P Parameter: Age (day) Value: 10
  misc_feature: MA Experiment 20000532 PARAMETER Experiment Name: Zm_0.001percent_MeJA_P Parameter: Organism Value: Zea mays
  misc_feature: MA Experiment 20000532 PARAMETER Experiment Name: Zm_0.001percent_MeJA_P Parameter: Plant Line Value: 35A19
  misc_feature: MA Experiment 20000532 PARAMETER Experiment Name: Zm_0.001percent_MeJA_P Parameter: Timepoint (hr) Value: 48
  misc_feature: MA Experiment 20000532 PARAMETER Experiment Name: Zm_0.001percent_MeJA_P Parameter: Tissue Value: Aerial
  misc_feature: MA Experiment 20000532 PARAMETER Experiment Name: Zm_0.001percent_MeJA_P Parameter: Treatment Value: 0.001percent MeJA vs. No Treatment
  misc_feature: MA Experiment ID: 20000533 Result: Up-regulated in Transcription
  misc_feature: MA Experiment 20000533 PARAMETER Experiment Name: Zm_0.001percent_MeJA_P Parameter: Age (day) Value: 11
  misc_feature: MA Experiment 20000533 PARAMETER Experiment Name: Zm_0.001percent_MeJA_P Parameter: Organism Value: Zea mays
  misc_feature: MA Experiment 20000533 PARAMETER Experiment Name: Zm_0.001percent_MeJA_P Parameter: Plant Line Value: 35A19
  misc_feature: MA Experiment 20000533 PARAMETER Experiment Name: Zm_0.001percent_MeJA_P Parameter: Timepoint (hr) Value: 72
  misc_feature: MA Experiment 20000533 PARAMETER Experiment Name: Zm_0.001percent_MeJA_P Parameter: Tissue Value: Aerial
  misc_feature: MA Experiment 20000533 PARAMETER Experiment Name: Zm_0.001percent_MeJA_P Parameter: Treatment Value: 0.001percent MeJA vs. No Treatment
  misc_feature: MA Experiment ID: 20000535 Result: Down-regulated in Transcription
  misc_feature: MA Experiment 20000535 PARAMETER Experiment Name: Zm_Hybrid_Seed_Dev_P Parameter: DAP Value: 30 vs. 12
  misc_feature: MA Experiment 20000535 PARAMETER Experiment Name: Zm_Hybrid_Seed_Dev_P Parameter: Organism Value: Zea mays
  misc_feature: MA Experiment 20000535 PARAMETER Experiment Name: Zm_Hybrid_Seed_Dev_P Parameter: Plant Line Value: 35A19
  misc_feature: MA Experiment 20000535 PARAMETER Experiment Name: Zm_Hybrid_Seed_Dev_P Parameter: Tissue Value: Embryo vs. Unfert Floret
  misc_feature: MA Experiment ID: 20000626 Result: Up-regulated in Transcription
  misc_feature: MA Experiment 20000626 PARAMETER Experiment Name: Zm_Herbicide-Treatments_P Parameter: Timepoint (hr) Value: 12
  misc_feature: MA Experiment 20000626 PARAMETER Experiment Name: Zm_Herbicide-Treatments_P Parameter: Tissue Value: Aerial
  misc_feature: MA Experiment 20000626 PARAMETER Experiment Name: Zm_Herbicide-Treatments_P Parameter: Treatment Value: Roundup vs. No Treatment
  misc_feature: MA Experiment ID: 20000632 Result: Down-regulated in Transcription
  misc_feature: MA Experiment 20000632 PARAMETER Experiment Name: Zm_Herbicide-Treatments_P Parameter: Timepoint (hr) Value: 4
  misc_feature: MA Experiment 20000632 PARAMETER Experiment Name: Zm_Herbicide-Treatments_P Parameter: Tissue Value: Aerial
  misc_feature: MA Experiment 20000632 PARAMETER Experiment Name: Zm_Herbicide-Treatments_P Parameter: Treatment Value: Glean vs. No Treatment
  misc_feature: MA Experiment ID: 20001610 Result: Down-regulated in Transcription
  misc_feature: MA Experiment 20001610 PARAMETER Experiment Name: Zm_50ppm_KNO3_L-to-H_P Parameter: Age (day) Value: 19
  misc_feature: MA Experiment 20001610 PARAMETER Experiment Name: Zm_50ppm_KNO3_L-to-H_P Parameter: Organism Value: Zea mays
  misc_feature: MA Experiment 20001610 PARAMETER Experiment Name: Zm_50ppm_KNO3_L-to-H_P Parameter: Plant Line Value: 35A19
  misc_feature: MA Experiment 20001610 PARAMETER Experiment Name: Zm_50ppm_KNO3_L-to-H_P Parameter: Timepoint (hr) Value: 2
  misc_feature: MA Experiment 20001610 PARAMETER Experiment Name: Zm_50ppm_KNO3_L-to-H_P Parameter: Tissue Value: Roots
  misc_feature: MA Experiment 20001610 PARAMETER Experiment Name: Zm_50ppm_KNO3_L-to-H_P Parameter: Treatment Value: 50ppm KNO3 vs. 50ppm KCl
  misc_feature: MA Experiment ID: 20001613 Result: Down-regulated in Transcription
  misc_feature: MA Experiment 20001613 PARAMETER Experiment Name: Zm_50ppm_KNO3_L-to-H_P Parameter: Age (day) Value: 20
  misc_feature: MA Experiment 20001613 PARAMETER Experiment Name: Zm_50ppm_KNO3_L-to-H_P Parameter: Organism Value: Zea mays
  misc_feature: MA Experiment 20001613 PARAMETER Experiment Name: Zm_50ppm_KNO3_L-to-H_P Parameter: Plant Line Value: 35A19
  misc_feature: MA Experiment 20001613 PARAMETER Experiment Name: Zm_50ppm_KNO3_L-to-H_P Parameter: Timepoint (hr) Value: 24
  misc_feature: MA Experiment 20001613 PARAMETER Experiment Name: Zm_50ppm_KNO3_L-to-H_P Parameter: Tissue Value: Roots
  misc_feature: MA Experiment 20001613 PARAMETER Experiment Name: Zm_50ppm_KNO3_L-to-H_P Parameter: Treatment Value: 50ppm KNO3 vs. 50ppm KCl
  misc_feature: MA Experiment ID: 20001614 Result: Down-regulated in Transcription
  misc_feature: MA Experiment 20001614 PARAMETER Experiment Name: Zm_50ppm_KNO3_L-to-H_P Parameter: Age (day) Value: 21
  misc_feature: MA Experiment 20001614 PARAMETER Experiment Name: Zm_50ppm_KNO3_L-to-H_P Parameter: Organism Value: Zea mays
  misc_feature: MA Experiment 20001614 PARAMETER Experiment Name: Zm_50ppm_KNO3_L-to-H_P Parameter: Plant Line Value: 35A19
  misc_feature: MA Experiment 20001614 PARAMETER Experiment Name: Zm_50ppm_KNO3_L-to-H_P Parameter: Timepoint (hr) Value: 48
  misc_feature: MA Experiment 20001614 PARAMETER Experiment Name: Zm_50ppm_KNO3_L-to-H_P Parameter: Tissue Value: Roots
  misc_feature: MA Experiment 20001614 PARAMETER Experiment Name: Zm_50ppm_KNO3_L-to-H_P Parameter: Treatment Value: 50ppm KNO3 vs. 50ppm KCl
gatgcaaacagcaccattcggtcgctccagcttttgtgcacgtccactgtgtccctcctcgctacccccgctttttgtgcgcggtggcaacgtgcgacagccgagaggcagaatgacgaagcaagtggtggtggtggacacagctctggtggcgccgagcgaggagacgccgcggcagccgctgtggctgtccaaccttgacctggccgtgccgaggacgcacacgccgctggtctactactacccggcgccgggcacgggctccttcgcgccggaccggctgagggccgcattgggcgccgctctggtgccattctacccacttgccgggcgcctcggcgttggcccggacggccggctgcagatcgagtgcaacagcaagggcgcgctcttcgtcgtcgccaacgcagacctcaccggcgcggacgtcttcgacgactacgagccgtcgtcggagatcaggaacacttttgtgccgttaggggagtccggcgaggcgaacaacagccccatatccatgttccaggtgacttttctcaagtgcggcggcgtggtgctaggaaccgccatccaccacgcggccatggacggcgtgggcgcgttccagtttatgcagacgtggtccggggtggcacgcggcctggacgtggcggaggcgtgcgggccgcagccgttccacgaccggacgctcctgcacgcgcggcgcccgccgtgcccgacatccgaccacttcgtctactccccggcgttcctcagcggccgcccccggccctacgtcacccgcatctactccgtctcgccgaagctcctcgccgacgtcaagtcgcgctgcgcgccaggcgtgtccacctactgcgccgtcaccgcgcacctctggcgctgcgtgtgcgtcgcgcgcgggctagcgccgggcgcggacacccgcctcagcctgccggccaacgtccgccaccgcctgcgccccccgctcccgcgcaccttcttcggcaacgccgtcgtgcgcgaccacgtcaccgcccccgtcagcaccgtcctcggcgcccctctcgggtccgtggcggagaccatcaagaaggcggtggaccgcgtggacgacgccttcgcgcggtcggtgctggactacctggagctgcagaatgcaggcggcaagcagctgagcggccaggctcaggcccaggcgcccagggagcagctcgtaccggcgacggacctgtgggcggtgagctggctggggatggccatgtacgacgccgacttcggctcaggcgcgccgcggttcgtcgcgccggcgcagatgttcggcatcggcacggcgtatatgacgccgcgcggtccggacagggacgacggcatcgccgtgctcatctctctggagcccgagtacctgtcgtgctttgagaaggtcttcttctataacgagtgatgtctcaggtctggagttcaaggatgtgaacgtgtgaatctccgttcgagtagtaagctatttttcctttccctttttttttgtacgtctgagcggtcccaccgagtattctaggtattccttgaaatacttattgttttggtcaaataaataaatatctgccttgcgttattg

SEQ ID NO: 7540 - protein, 473 aa, Zea mays subsp. mays
  peptide (1)..(473): Ceres Seq. ID no. 12412196
  misc_feature (41)..(472): Pfam Name: Transferase family Pfam Description: Transferase family
  misc_feature (41)..(468): Homolog of NCBI NO: 40253398 NR Description: putative hydroxyanthranilate
  misc_feature (42)..(470): Homolog of NCBI NO: 38345030 NR Description: OSJNBa0029H02.14 [Oryza sativa (japonica
  misc_feature (41)..(472): Homolog of NCBI NO: 6469032 NR Description: N-hydroxycinnamoyl/benzoyltransferase [Ipomoea
  misc_feature (37)..(470): Homolog of NCBI NO: 40644899 NR Description: hydroxycinnamoyl CoA quinate transferase
  misc_feature (41)..(470): Homolog of NCBI NO: 15239747 NR Description: anthranilate N-benzoyltransferase; protein id: supported by cDNA: 114130. [Arabidopsis thaliana]
  misc_feature (41)..(470): Homolog of NCBI NO: 21536883 NR Description: anthranilate N-benzoyltransferase [Arabidopsis
  misc_feature (37)..(470): Homolog of NCBI NO: 40644084 NR Description: hydroxycinnamoyl CoA quinate transferase
  misc_feature (41)..(472): Homolog of NCBI NO: 27475616 NR Description: hydroxycinnamoyl transferase [Nicotiana tabacum]
  misc_feature (42)..(470): Homolog of NCBI NO: 7484689 NR Description: anthranilate N-benzoyltransferase (EC 2.3.1.144)
  misc_feature (42)..(470): Homolog of NCBI NO: 7484692 NR Description: anthranilate N-benzoyltransferase (EC 2.3.1.144)
MQTAPFGRSSFCARPLCPSSLPPLFVRGGNVRQPRGRMTKQVVVVDTALVAPSEETPRQPLWLSNLDLAVPRTHTPLVYYYPAPGTGSFAPDRLRAALGAALVPFYPLAGRLGVGPDGRLQIECNSKGALFVVANADLTGADVFDDYEPSSEIRNTFVPLGESGEANNSPISMFQVTFLKCGGVVLGTAIHHAAMDGVGAFQFMQTWSGVARGLDVAEACGPQPFHDRTLLHARRPPCPTSDHFVYSPAFLSGRPRPYVTRIYSVSPKLLADVKSRCAPGVSTYCAVTAHLWRCVCVARGLAPGADTRLSLPANVRHRLRPPLPRTFFGNAVVRDHVTAPVSTVLGAPLGSVAETIKKAVDRVDDAFARSVLDYLELQNAGGKQLSGQAQAQAPREQLVPATDLWAVSWLGMAMYDADFGSGAPRFVAPAQMFGIGTAYMTPRGPDRDDGIAVLISLEPEYLSCFEKVFFYNE

SEQ ID NO: 7541 - protein, 436 aa, Zea mays subsp. mays
  peptide (1)..(436): Ceres Seq. ID no. 12412197
  misc_feature (4)..(435): Pfam Name: Transferase family Pfam Description: Transferase family
  misc_feature (4)..(431): Homolog of NCBI NO: 40253398 NR Description: putative hydroxyanthranilate
  misc_feature (5)..(433): Homolog of NCBI NO: 38345030 NR Description: OSJNBa0029H02.14 [Oryza sativa (japonica
  misc_feature (4)..(435): Homolog of NCBI NO: 6469032 NR Description: N-hydroxycinnamoyl/benzoyltransferase [Ipomoea
  misc_feature (1)..(433): Homolog of NCBI NO: 40644899 NR Description: hydroxycinnamoyl CoA quinate transferase
  misc_feature (4)..(433): Homolog of NCBI NO: 15239747 NR Description: anthranilate N-benzoyltransferase; protein id: supported by cDNA: 114130. [Arabidopsis thaliana]
  misc_feature (4)..(433): Homolog of NCBI NO: 21536883 NR Description: anthranilate N-benzoyltransferase [Arabidopsis
  misc_feature (1)..(433): Homolog of NCBI NO: 40644084 NR Description: hydroxycinnamoyl CoA quinate transferase
  misc_feature (4)..(435): Homolog of NCBI NO: 27475616 NR Description: hydroxycinnamoyl transferase [Nicotiana tabacum]
  misc_feature (5)..(433): Homolog of NCBI NO: 7484689 NR Description: anthranilate N-benzoyltransferase (EC 2.3.1.144)
  misc_feature (5)..(433): Homolog of NCBI NO: 7484692 NR Description: anthranilate N-benzoyltransferase (EC 2.3.1.144)
MTKQVVVVDTALVAPSEETPRQPLWLSNLDLAVPRTHTPLVYYYPAPGTGSFAPDRLRAALGAALVPFYPLAGRLGVGPDGRLQIECNSKGALFVVANADLTGADVFDDYEPSSEIRNTFVPLGESGEANNSPISMFQVTFLKCGGVVLGTAIHHAAMDGVGAFQFMQTWSGVARGLDVAEACGPQPFHDRTLLHARRPPCPTSDHFVYSPAFLSGRPRPYVTRIYSVSPKLLADVKSRCAPGVSTYCAVTAHLWRCVCVARGLAPGADTRLSLPANVRHRLRPPLPRTFFGNAVVRDHVTAPVSTVLGAPLGSVAETIKKAVDRVDDAFARSVLDYLELQNAGGKQLSGQAQAQAPREQLVPATDLWAVSWLGMAMYDADFGSGAPRFVAPAQMFGIGTAYMTPRGPDRDDGIAVLISLEPEYLSCFEKVFFYNE

SEQ ID NO: 7542 - protein, 301 aa, Zea mays subsp. mays
  peptide (1)..(301): Ceres Seq. ID no. 12412198
  misc_feature (1)..(300): Pfam Name: Transferase family Pfam Description: Transferase family
  misc_feature (1)..(296): Homolog of NCBI NO: 40253398 NR Description: putative hydroxyanthranilate
  misc_feature (1)..(298): Homolog of NCBI NO: 38345030 NR Description: OSJNBa0029H02.14 [Oryza sativa (japonica
  misc_feature (1)..(300): Homolog of NCBI NO: 6469032 NR Description: N-hydroxycinnamoyl/benzoyltransferase [Ipomoea
  misc_feature (1)..(298): Homolog of NCBI NO: 40644899 NR Description: hydroxycinnamoyl CoA quinate transferase
  misc_feature (1)..(298): Homolog of NCBI NO: 15239747 NR Description: anthranilate N-benzoyltransferase; protein id: supported by cDNA: 114130. [Arabidopsis thaliana]
  misc_feature (1)..(298): Homolog of NCBI NO: 21536883 NR Description: anthranilate N-benzoyltransferase [Arabidopsis
  misc_feature (1)..(298): Homolog of NCBI NO: 40644084 NR Description: hydroxycinnamoyl CoA quinate transferase
  misc_feature (1)..(300): Homolog of NCBI NO: 27475616 NR Description: hydroxycinnamoyl transferase [Nicotiana tabacum]
  misc_feature (1)..(298): Homolog of NCBI NO: 7484689 NR Description: anthranilate N-benzoyltransferase (EC 2.3.1.144)
  misc_feature (1)..(298): Homolog of NCBI NO: 7484692 NR Description: anthranilate N-benzoyltransferase (EC 2.3.1.144)
MFQVTFLKCGGVVLGTAIHHAAMDGVGAFQFMQTWSGVARGLDVAEACGPQPFHDRTLLHARRPPCPTSDHFVYSPAFLSGRPRPYVTRIYSVSPKLLADVKSRCAPGVSTYCAVTAHLWRCVCVARGLAPGADTRLSLPANVRHRLRPPLPRTFFGNAVVRDHVTAPVSTVLGAPLGSVAETIKKAVDRVDDAFARSVLDYLELQNAGGKQLSGQAQAQAPREQLVPATDLWAVSWLGMAMYDADFGSGAPRFVAPAQMFGIGTAYMTPRGPDRDDGIAVLISLEPEYLSCFEKVFFYNE

SEQ ID NO: 7543 - DNA, 1433 bp, Zea mays subsp. mays
  misc_feature (1)..(1433): Ceres Seq. ID no. 12408719
  misc_feature: MA Experiment ID: 20000492 Result: Up-regulated in Transcription
  misc_feature: MA Experiment 20000492 PARAMETER Experiment Name: Zm_Hybrid_Seed_Dev_P Parameter: DAP Value: 12
  misc_feature: MA Experiment 20000492 PARAMETER Experiment Name: Zm_Hybrid_Seed_Dev_P Parameter: Organism Value: Zea mays
  misc_feature: MA Experiment 20000492 PARAMETER Experiment Name: Zm_Hybrid_Seed_Dev_P Parameter: Plant Line Value: 35A19
  misc_feature: MA Experiment 20000492 PARAMETER Experiment Name: Zm_Hybrid_Seed_Dev_P Parameter: Tissue Value: Fert Kernel vs. Unfert Floret
  misc_feature: MA Experiment ID: 20000535 Result: Up-regulated in Transcription
  misc_feature: MA Experiment 20000535 PARAMETER Experiment Name: Zm_Hybrid_Seed_Dev_P Parameter: DAP Value: 30 vs. 12
  misc_feature: MA Experiment 20000535 PARAMETER Experiment Name: Zm_Hybrid_Seed_Dev_P Parameter: Organism Value: Zea mays
  misc_feature: MA Experiment 20000535 PARAMETER Experiment Name: Zm_Hybrid_Seed_Dev_P Parameter: Plant Line Value: 35A19
  misc_feature: MA Experiment 20000535 PARAMETER Experiment Name: Zm_Hybrid_Seed_Dev_P Parameter: Tissue Value: Embryo vs. Unfert Floret
ggcaagcctactcaggcgatccgcggtacccgcgcgccagctcctcctcctcctcccgcgccacctcgcagccgccggctccgcccccgcctcgtcccgttcgttctcccgcttccacccccgcgacgacgatgacagctctatgttcgatccaccggagccgccggtgaactggggcatgaacatagttccggagaagaaggctttcgtcgtggagaggttcgggaagtatctcaagaccctcgactccgggttccacctgctgatccccgccgtcgaccgtattgcctacgtgcactcgctcaaggaggagaccatccccattcccgatcagaacgcaatcaccaaggacaacgtcaccatacagatcgacagcgtcatatatatcaagatcatggacccctaccttgcttcctatggtgtggaggatccaatctatgctgtcctacaacttgcacaaacaaccatgagaagtgaacttgggaagataaccttagacaagacttttgaggagagagatgcattaaatgagaaaattgtgagtgccatcaatgaagcagccacagattggggcttgaagtgtattcgctatgagatcagggacataactcctccaacagggattaggcaggctatggagatgcaggctgaagcaaaaaggagaaaacgcgcccaaatccttgaatcagaagggaagaaacatgcccaaatccttgaatcagaagggaagaaaactgcccaggtccttgaatctgaaggagctatgttagatctagcaaaccgtgcgaagggtgcggccgaagcaattcttgccaagtcagaagctactgctcgtggaatgagattggtttcagatgcgatgacaactgaaggcagtgccaaggctgctagcctaaaacttgcagagcaatatatcgaagcattctcaaatctagcacaaaagacaaatacaatgctgctcccaggcaacagtgccagcccagcatctttcgtggcccaggcgatgaagacgtatcagcaaatccattcccatagtcaggcattgaagtaccaccctcaggtagaagggctggaggaatcaggagagaccacccctgctgctccatcttctgaggcaagcaagacaccaccatttgtcggggaagcagattctaaccataccttctcgctgcaacgcccaagaacaagaagtgagcttccctcaagtgcttgaagcccttttcttgtctactgttctgcaacataggagtgtcactgataaacaccagtaggtttagttttctttagtcagagaagctgatgtgcggcgaaggggatagacccgtagcccgtaggcatttggtttcgggaaagctaaatgcgaccggagagagattttgattctggtgaagtttatacgttggttccttcatatattttaaaatgaagtttgt

SEQ ID NO: 7544 - protein, 403 aa, Zea mays subsp. mays
  peptide (1)..(403): Ceres Seq. ID no. 12408720
  misc_feature (1)..(396): Homolog of NCBI NO: 7716464 NR Description: stomatin-like protein [Zea mays]
  misc_feature (54)..(391): Homolog of NCBI NO: 18417021 NR Description: putative protein; protein id: At4g27585.1, by cDNA: 20829., supported by cDNA: gi_14334465, supported by
  misc_feature (54)..(378): Homolog of NCBI NO: 7487517 NR Description: hypothetical protein T29A15.70 - Arabidopsis >gi|4469009|emb|CAB38270.1| putative protein [Arabidopsis >gi|7269612|emb|CAB81408.1| putative protein [Arabidopsis
  misc_feature (10)..(339): Homolog of NCBI NO: 15239547 NR Description: putative protein; protein id: At5g54100.1, by cDNA: 205622. [Arabidopsis thaliana] contains similarity to stomatin like protein~gene_id:MJP23.8
  misc_feature (10)..(339): Homolog of NCBI NO: 21554125 NR Description: stomatin-like protein [Arabidopsis thaliana]
  misc_feature (22)..(365): Homolog of NCBI NO: 23394406 NR Description: unknown [Phytophthora infestans]
  misc_feature (55)..(354): Homolog of NCBI NO: 32766629 NR Description: Unknown (protein for MGC:63505) [Danio rerio]
  misc_feature (55)..(318): Homolog of NCBI NO: 34905182 NR Description: P0498E12.9 [Oryza sativa (japonica
  misc_feature (60)..(349): Homolog of NCBI NO: 15892375 NR Description: unknown [Rickettsia conorii]
  misc_feature (60)..(349): Homolog of NCBI NO: 15604196 NR Description: unknown [Rickettsia prowazekii]
ASLLRRSAVPARQLLLLLPRHLAAAGSAPASSRSFSRFHPRDDDDSSMFDPPEPPVNWGMNIVPEKKAFVVERFGKYLKTLDSGFHLLIPAVDRIAYVHSLKEETIPIPDQNAITKDNVTIQIDSVIYIKIMDPYLASYGVEDPIYAVLQLAQTTMRSELGKITLDKTFEERDALNEKIVSAINEAATDWGLKCIRYEIRDITPPTGIRQAMEMQAEAKRRKRAQILESEGKKHAQILESEGKKTAQVLESEGAMLDLANRAKGAAEAILAKSEATARGMRLVSDAMTTEGSAKAASLKLAEQYIEAFSNLAQKTNTMLLPGNSASPASFVAQAMKTYQQIHSHSQALKYHPQVEGLEESGETTPAAPSSEASKTPPFVGEADSNHTFSLQRPRTRSELPSSA

SEQ ID NO: 7545 - protein, 356 aa, Zea mays subsp. mays
  peptide (1)..(356): Ceres Seq. ID no. 12408721
  misc_feature (1)..(349): Homolog of NCBI NO: 7716464 NR Description: stomatin-like protein [Zea mays]
  misc_feature (7)..(344): Homolog of NCBI NO: 18417021 NR Description: putative protein; protein id: At4g27585.1, by cDNA: 20829., supported by cDNA: gi_14334465, supported by
  misc_feature (7)..(331): Homolog of NCBI NO: 7487517 NR Description: hypothetical protein T29A15.70 - Arabidopsis >gi|4469009|emb|CAB38270.1| putative protein [Arabidopsis >gi|7269612|emb|CAB81408.1| putative protein [Arabidopsis
  misc_feature (1)..(292): Homolog of NCBI NO: 15239547 NR Description: putative protein; protein id: At5g54100.1, by cDNA: 205622. [Arabidopsis thaliana] contains similarity to stomatin like protein~gene_id:MJP23.8
  misc_feature (1)..(292): Homolog of NCBI NO: 21554125 NR Description: stomatin-like protein [Arabidopsis thaliana]
  misc_feature (1)..(318): Homolog of NCBI NO: 23394406 NR Description: unknown [Phytophthora infestans]
  misc_feature (8)..(307): Homolog of NCBI NO: 32766629 NR Description: Unknown (protein for MGC:63505) [Danio rerio]
  misc_feature (8)..(271): Homolog of NCBI NO: 34905182 NR Description: P0498E12.9 [Oryza sativa (japonica
  misc_feature (13)..(302): Homolog of NCBI NO: 15892375 NR Description: unknown [Rickettsia conorii]
  misc_feature (13)..(302): Homolog of NCBI NO: 15604196 NR Description: unknown [Rickettsia prowazekii]
MFDPPEPPVNWGMNIVPEKKAFVVERFGKYLKTLDSGFHLLIPAVDRIAYVHSLKEETIPIPDQNAITKDNVTIQIDSVIYIKIMDPYLASYGVEDPIYAVLQLAQTTMRSELGKITLDKTFEERDALNEKIVSAINEAATDWGLKCIRYEIRDITPPTGIRQAMEMQAEAKRRKRAQILESEGKKHAQILESEGKKTAQVLESEGAMLDLANRAKGAAEAILAKSEATARGMRLVSDAMTTEGSAKAASLKLAEQYIEAFSNLAQKTNTMLLPGNSASPASFVAQAMKTYQQIHSHSQALKYHPQVEGLEESGETTPAAPSSEASKTPPFVGEADSNHTFSLQRPRTRSELPSSA

SEQ ID NO: 7546 - protein, 344 aa, Zea mays subsp. mays
  peptide (1)..(344): Ceres Seq. ID no. 12408722
  misc_feature (1)..(337): Homolog of NCBI NO: 7716464 NR Description: stomatin-like protein [Zea mays]
  misc_feature (1)..(332): Homolog of NCBI NO: 18417021 NR Description: putative protein; protein id: At4g27585.1, by cDNA: 20829., supported by cDNA: gi_14334465, supported by
  misc_feature (1)..(319): Homolog of NCBI NO: 7487517 NR Description: hypothetical protein T29A15.70 - Arabidopsis >gi|4469009|emb|CAB38270.1| putative protein [Arabidopsis >gi|7269612|emb|CAB81408.1| putative protein [Arabidopsis
  misc_feature (1)..(280): Homolog of NCBI NO: 15239547 NR Description: putative protein; protein id: At5g54100.1, by cDNA: 205622. [Arabidopsis thaliana] contains similarity to stomatin like protein~gene_id:MJP23.8
  misc_feature (1)..(280): Homolog of NCBI NO: 21554125 NR Description: stomatin-like protein [Arabidopsis thaliana]
  misc_feature (1)..(306): Homolog of NCBI NO: 23394406 NR Description: unknown [Phytophthora infestans]
  misc_feature (1)..(295): Homolog of NCBI NO: 32766629 NR Description: Unknown (protein for MGC:63505) [Danio rerio]
  misc_feature (1)..(259): Homolog of NCBI NO: 34905182 NR Description: P0498E12.9 [Oryza sativa (japonica
  misc_feature (1)..(290): Homolog of NCBI NO: 15892375 NR Description: unknown [Rickettsia conorii]
  misc_feature (1)..(290): Homolog of NCBI NO: 15604196 NR Description: unknown [Rickettsia prowazekii]
MNIVPEKKAFVVERFGKYLKTLDSGFHLLIPAVDRIAYVHSLKEETIPIPDQNAITKDNVTIQIDSVIYIKIMDPYLASYGVEDPIYAVLQLAQTTMRSELGKITLDKTFEERDALNEKIVSAINEAATDWGLKCIRYEIRDITPPTGIRQAMEMQAEAKRRKRAQILESEGKKHAQILESEGKKTAQVLESEGAMLDLANRAKGAAEAILAKSEATARGMRLVSDAMTTEGSAKAASLKLAEQYIEAFSNLAQKTNTMLLPGNSASPASFVAQAMKTYQQIHSHSQALKYHPQVEGLEESGETTPAAPSSEASKTPPFVGEADSNHTFSLQRPRTRSELPSSA

SEQ ID NO: 7547 - DNA, 1414 bp, Zea mays subsp. mays
  misc_feature (1)..(1414): Ceres Seq. ID no. 12344282
  misc_feature: MA Experiment ID: 108504 Result: Down-regulated in Transcription
  misc_feature: MA Experiment 108504 PARAMETER Experiment Name: Zm_Drought_P Parameter: Age (day) Value: 8
  misc_feature: MA Experiment 108504 PARAMETER Experiment Name: Zm_Drought_P Parameter: Organism Value: Zea mays
  misc_feature: MA Experiment 108504 PARAMETER Experiment Name: Zm_Drought_P Parameter: Plant Line Value: 35A19
  misc_feature: MA Experiment 108504 PARAMETER Experiment Name: Zm_Drought_P Parameter: Timepoint (hr) Value: 12
  misc_feature: MA Experiment 108504 PARAMETER Experiment Name: Zm_Drought_P Parameter: Tissue Value: Aerial
  misc_feature: MA Experiment 108504 PARAMETER Experiment Name: Zm_Drought_P Parameter: Treatment Value: Drought vs. No Drought
  misc_feature: MA Experiment ID: 108522 Result: Down-regulated in Transcription
  misc_feature: MA Experiment 108522 PARAMETER Experiment Name: Zm_42deg_Heat_P Parameter: Age (day) Value: 8
  misc_feature: MA Experiment 108522 PARAMETER Experiment Name: Zm_42deg_Heat_P Parameter: Organism Value: Zea mays
  misc_feature: MA Experiment 108522 PARAMETER Experiment Name: Zm_42deg_Heat_P Parameter: Plant Line Value: 35A19
  misc_feature: MA Experiment 108522 PARAMETER Experiment Name: Zm_42deg_Heat_P Parameter: Temperature (deg C) Value: 42 vs. 22
  misc_feature: MA Experiment 108522 PARAMETER Experiment Name: Zm_42deg_Heat_P Parameter: Timepoint (hr) Value: 1
  misc_feature: MA Experiment 108522 PARAMETER Experiment Name: Zm_42deg_Heat_P Parameter: Tissue Value: Aerial
  misc_feature: MA Experiment ID: 108556 Result: Down-regulated in Transcription
  misc_feature: MA Experiment 108556 PARAMETER Experiment Name: Zm_Drought_P Parameter: Age (day) Value: 9
  misc_feature: MA Experiment 108556 PARAMETER Experiment Name: Zm_Drought_P Parameter: Organism Value: Zea mays
  misc_feature: MA Experiment 108556 PARAMETER Experiment Name: Zm_Drought_P Parameter: Plant Line Value: 35A19
  misc_feature: MA Experiment 108556 PARAMETER Experiment Name: Zm_Drought_P Parameter: Timepoint (hr) Value: 24
  misc_feature: MA Experiment 108556 PARAMETER Experiment Name: Zm_Drought_P Parameter: Tissue Value: Aerial
  misc_feature: MA Experiment 108556 PARAMETER Experiment Name: Zm_Drought_P Parameter: Treatment Value: Drought vs. No Drought
  misc_feature: MA Experiment ID: 108559 Result: Down-regulated in Transcription
  misc_feature: MA Experiment 108559 PARAMETER Experiment Name: Zm_5mM_NO_P Parameter: Age (day) Value: 8
  misc_feature: MA Experiment 108559 PARAMETER Experiment Name: Zm_5mM_NO_P Parameter: Organism Value: Zea mays
  misc_feature: MA Experiment 108559 PARAMETER Experiment Name: Zm_5mM_NO_P Parameter: Plant Line Value: 35A19
  misc_feature: MA Experiment 108559 PARAMETER Experiment Name: Zm_5mM_NO_P Parameter: Timepoint (hr) Value: 12
  misc_feature: MA Experiment 108559 PARAMETER Experiment Name: Zm_5mM_NO_P Parameter: Tissue Value: Aerial
  misc_feature: MA Experiment 108559 PARAMETER Experiment Name: Zm_5mM_NO_P Parameter: Treatment Value: 5mM NO vs. No Treatment
  misc_feature: MA Experiment ID: 108597 Result: Down-regulated in Transcription
  misc_feature: MA Experiment 108597 PARAMETER Experiment Name: Zm_100uM_ABA_P Parameter: Age (day) Value: 9
  misc_feature: MA Experiment 108597 PARAMETER Experiment Name: Zm_100uM_ABA_P Parameter: Organism Value: Zea mays
  misc_feature: MA Experiment 108597 PARAMETER Experiment Name: Zm_100uM_ABA_P Parameter: Plant Line Value: 35A19
  misc_feature: MA Experiment 108597 PARAMETER Experiment Name: Zm_100uM_ABA_P Parameter: Timepoint (hr) Value: 24
  misc_feature: MA Experiment 108597 PARAMETER Experiment Name: Zm_100uM_ABA_P Parameter: Tissue Value: Aerial
  misc_feature: MA Experiment 108597 PARAMETER Experiment Name: Zm_100uM_ABA_P Parameter: Treatment Value: 100uM ABA vs. No Treatment
  misc_feature: MA Experiment ID: 108687 Result: Up-regulated in Transcription
  misc_feature: MA Experiment 108687 PARAMETER Experiment Name: Zm_Embryos-Flowers__P Parameter: Tissue Value: Embryo vs. Aerial+
  misc_feature: MA Experiment ID: 20000479 Result: Down-regulated in Transcription
  misc_feature: MA Experiment 20000479 PARAMETER Experiment Name: Zm_Drought_P Parameter: Age (day) Value: 10
  misc_feature: MA Experiment 20000479 PARAMETER Experiment Name: Zm_Drought_P Parameter: Organism Value: Zea mays
  misc_feature: MA Experiment 20000479 PARAMETER Experiment Name: Zm_Drought_P Parameter: Plant Line Value: 35A19
  misc_feature: MA Experiment 20000479 PARAMETER Experiment Name: Zm_Drought_P Parameter: Timepoint (hr) Value: 48
  misc_feature: MA Experiment 20000479 PARAMETER Experiment Name: Zm_Drought_P Parameter: Tissue Value: Aerial
  misc_feature: MA Experiment 20000479 PARAMETER Experiment Name: Zm_Drought_P Parameter: Treatment Value: Drought vs. No Drought
  misc_feature: MA Experiment ID: 20000480 Result: Down-regulated in Transcription
  misc_feature: MA Experiment 20000480 PARAMETER Experiment Name: Zm_Drought_P Parameter: Age (day) Value: 11
  misc_feature: MA Experiment 20000480 PARAMETER Experiment Name: Zm_Drought_P Parameter: Organism Value: Zea mays
  misc_feature: MA Experiment 20000480 PARAMETER Experiment Name: Zm_Drought_P Parameter: Plant Line Value: 35A19
  misc_feature: MA Experiment 20000480 PARAMETER Experiment Name: Zm_Drought_P Parameter: Timepoint (hr) Value: 72
  misc_feature: MA Experiment 20000480 PARAMETER Experiment Name: Zm_Drought_P Parameter: Tissue Value: Aerial
  misc_feature: MA Experiment 20000480 PARAMETER Experiment Name: Zm_Drought_P Parameter: Treatment Value: Drought vs. No Drought
  misc_feature: MA Experiment ID: 20000534 Result: Down-regulated in Transcription
  misc_feature: MA Experiment 20000534 PARAMETER Experiment Name: Zm_Hybrid_Pollen_P Parameter: Age (day) Value: 8
  misc_feature: MA Experiment 20000534 PARAMETER Experiment Name: Zm_Hybrid_Pollen_P Parameter: Organism Value: Zea mays
  misc_feature: MA Experiment 20000534 PARAMETER Experiment Name: Zm_Hybrid_Pollen_P Parameter: Plant Line Value: 35A19
  misc_feature: MA Experiment 20000534 PARAMETER Experiment Name: Zm_Hybrid_Pollen_P Parameter: Tissue Value: Pollen vs. Aerial
tccacccgtccgatctaaccgtcccaccgcccaagccactcgagggccgatcttgctgctgctgctccgccctccctcctcctcggcaccgtctcgtccgaccatggctgctgactcgggcaagatgccgtccgccggcggcaaggcgccgccacccaagtcatccgactccggcacaggcatcatgaagaggctcccgcgcctggcgctcgtcttcctggtggcgctgctgtaccggcagctgcaggccccggctcccagggtccccggaacgcccggcgggcccccggtgacgtcgccgaggatcaggctcaaggacggaaggcacctcgcgtaccacgagtcgggcgtccccagggagcaggccaggtacaggatcgtcttcatgcacgggttcgactcgtgcaggtacgacgtgctccgggtgtcgccggagctggcccaggagctggggcgtctacctgctctccttcgaccgccccgggtacggggagagcgacccgcacccggctaggaccgacaagagcgtcgccctggacatcgagcagctcgccgacgccatggagctcggcgacaggttctacctcgccggcttctccatgggcggggagatcatgtggagctgcctcaagtacatcccgcacaggctttccggcgtagccatcctgggccccgtgggcaacttctggtggtccggcctccccgcgaacgtgtccctggaggcctggaacgtgcaggtggcgcaggacaagtgggccgtgggcgtggcgcaccacgctccctggctcacctactggtggaacacccagaagctgttcccggcctccagcgtcatcgccttcaacccggccatcatgtcccgggcggacatggcactcatccccagcttcgcctacaggacccacgcctaccaggcgcggcagcagggggagcacgagagcctgcaccgcgacatgatggtcggcttcggcaagtggagctggagcccgctggacctggaggacccgttccccgacggcgacggcaaggtgcacctgtggcacggcgccgaggacctcatcgtgcccgtggggctgtcgaggcacatcagcaagagcctgccgtgggtgcgctaccacgagctgcccacggccggccacctcttccccatggccgacgggatggccgacgtcatcgtcaagtcgctgctgctgggcgacgagtgacgattgtcatctcccgtcgtcgtcgtcgagtcgatctccctctccctcttcctccccccctgctttttcctgtgcgcgcgagtctttttgagtctttgtagtgcagtgagagaatgctacggacatgtctttgcgatcgttactcctattcctatataatatatgatatatagataaagaaatattaacgggatgtttagtttctaaag

SEQ ID NO: 7548 - protein, 214 aa, Zea mays subsp. mays
  peptide (1)..(214): Ceres Seq. ID no. 12344283
  misc_feature (1)..(208): Pfam Name: alpha/beta hydrolase fold Pfam Description: alpha/beta hydrolase fold
  misc_feature (1)..(214): Homolog of NCBI NO: 38346334 NR Description: OSJNBa0073L04.5 [Oryza sativa (japonica
  misc_feature (1)..(214): Homolog of NCBI NO: 15228377 NR Description: putative protein; protein id: At3g48410.1, by cDNA: gi_17529095 [Arabidopsis thaliana]
  misc_feature (1)..(210): Homolog of NCBI NO: 18410582 NR Description: expressed protein; protein id: At1g74300.1, by cDNA: 31039. [Arabidopsis thaliana] >gi|25406334|pir||E96771
  misc_feature (1)..(213): Homolog of NCBI NO: 18410575 NR Description: expressed protein; protein id: At1g74280.1, by cDNA: 119889. [Arabidopsis thaliana] >gi|25406331|pir||C96771
  misc_feature (1)..(210): Homolog of NCBI NO: 21537089 NR Description: unknown [Arabidopsis thaliana]
  misc_feature (1)..(213): Homolog of NCBI NO: 15221193 NR Description: unknown protein; protein id: At1g74290.1
  misc_feature (1)..(210): Homolog of NCBI NO: 11357595 NR Description: hypothetical protein F24B22.200 - Arabidopsis (fragment) >gi|6822070|emb|CAB70998.1| putative protein
  misc_feature (1)..(210): Homolog of NCBI NO: 15232465 NR Description: putative protein (fragment); protein id:
  misc_feature (1)..(211): Homolog of NCBI NO: 15242253 NR Description: putative protein; protein id: At5g22460.1, by cDNA: gi_15292740, supported by cDNA: gi_20465594 [Arabidopsis
  misc_feature (1)..(213): Homolog of NCBI NO: 28416665 NR Description: At2g36290 [Arabidopsis thaliana]
MELGDRFYLAGFSMGGEIMWSCLKYIPHRLSGVAILGPVGNFWWSGLPANVSLEAWNVQVAQDKWAVGVAHHAPWLTYWWNTQKLFPASSVIAFNPAIMSRADMALIPSFAYRTHAYQARQQGEHESLHRDMMVGFGKWSWSPLDLEDPFPDGDGKVHLWHGAEDLIVPVGLSRHISKSLPWVRYHELPTAGHLFPMADGMADVIVKSLLLGDE

SEQ ID NO: 7549 - protein, 201 aa, Zea mays subsp. mays
  peptide (1)..(201): Ceres Seq. ID no. 12344284
  misc_feature (1)..(195): Pfam Name: alpha/beta hydrolase fold Pfam Description: alpha/beta hydrolase fold
  misc_feature (1)..(201): Homolog of NCBI NO: 38346334 NR Description: OSJNBa0073L04.5 [Oryza sativa (japonica
  misc_feature (1)..(201): Homolog of NCBI NO: 15228377 NR Description: putative protein; protein id: At3g48410.1, by cDNA: gi_17529095 [Arabidopsis thaliana]
  misc_feature (1)..(197): Homolog of NCBI NO: 18410582 NR Description: expressed protein; protein id: At1g74300.1, by cDNA: 31039. [Arabidopsis thaliana] >gi|25406334|pir||E96771
  misc_feature (1)..(200): Homolog of NCBI NO: 18410575 NR Description: expressed protein; protein id: At1g74280.1, by cDNA: 119889. [Arabidopsis thaliana] >gi|25406331|pir||C96771
  misc_feature (1)..(197): Homolog of NCBI NO: 21537089 NR Description: unknown [Arabidopsis thaliana]
  misc_feature (1)..(200): Homolog of NCBI NO: 15221193 NR Description: unknown protein; protein id: At1g74290.1
  misc_feature (1)..(197): Homolog of NCBI NO: 11357595 NR Description: hypothetical protein F24B22.200 - Arabidopsis (fragment) >gi|6822070|emb|CAB70998.1| putative protein
  misc_feature (1)..(197): Homolog of NCBI NO: 15232465 NR Description: putative protein (fragment); protein id:
  misc_feature (1)..(198): Homolog of NCBI NO: 15242253 NR Description: putative protein; protein id: At5g22460.1, by cDNA: gi_15292740, supported by cDNA: gi_20465594 [Arabidopsis
  misc_feature (1)..(200): Homolog of NCBI NO: 28416665 NR Description: At2g36290 [Arabidopsis thaliana]
MGGEIMWSCLKYIPHRLSGVAILGPVGNFWWSGLPANVSLEAWNVQVAQDKWAVGVAHHAPWLTYWWNTQKLFPASSVIAFNPAIMSRADMALIPSFAYRTHAYQARQQGEHESLHRDMMVGFGKWSWSPLDLEDPFPDGDGKVHLWHGAEDLIVPVGLSRHISKSLPWVRYHELPTAGHLFPMADGMADVIVKSLLLGDE

SEQ ID NO: 7550 - protein, 196 aa, Zea mays subsp. mays
  peptide (1)..(196): Ceres Seq. ID no. 12344285
  misc_feature (1)..(190): Pfam Name: alpha/beta hydrolase fold Pfam Description: alpha/beta hydrolase fold
  misc_feature (1)..(196): Homolog of NCBI NO: 38346334 NR Description: OSJNBa0073L04.5 [Oryza sativa (japonica
  misc_feature (1)..(196): Homolog of NCBI NO: 15228377 NR Description: putative protein; protein id: At3g48410.1, by cDNA: gi_17529095 [Arabidopsis thaliana]
  misc_feature (1)..(192): Homolog of NCBI NO: 18410582 NR Description: expressed protein; protein id: At1g74300.1, by cDNA: 31039. [Arabidopsis thaliana] >gi|25406334|pir||E96771
  misc_feature (1)..(195): Homolog of NCBI NO: 18410575 NR Description: expressed protein; protein id: At1g74280.1, by cDNA: 119889. [Arabidopsis thaliana] >gi|25406331|pir||C96771
  misc_feature (1)..(192): Homolog of NCBI NO: 21537089 NR Description: unknown [Arabidopsis thaliana]
  misc_feature (1)..(195): Homolog of NCBI NO: 15221193 NR Description: unknown protein; protein id: At1g74290.1
  misc_feature (1)..(192): Homolog of NCBI NO: 11357595 NR Description: hypothetical protein F24B22.200 - Arabidopsis (fragment) >gi|6822070|emb|CAB70998.1| putative protein
  misc_feature (1)..(192): Homolog of NCBI NO: 15232465 NR Description: putative protein (fragment); protein id:
  misc_feature (1)..(193): Homolog of NCBI NO: 15242253 NR Description: putative protein; protein id: At5g22460.1, by cDNA: gi_15292740, supported by cDNA: gi_20465594 [Arabidopsis
  misc_feature (1)..(195): Homolog of NCBI NO: 28416665 NR Description: At2g36290 [Arabidopsis thaliana]
MWSCLKYIPHRLSGVAILGPVGNFWWSGLPANVSLEAWNVQVAQDKWAVGVAHHAPWLTYWWNTQKLFPASSVIAFNPAIMSRADMALIPSFAYRTHAYQARQQGEHESLHRDMMVGFGKWSWSPLDLEDPFPDGDGKVHLWHGAEDLIVPVGLSRHISKSLPWVRYHELPTAGHLFPMADGMADVIVKSLLLGDE

SEQ ID NO: 7551 - DNA, 1434 bp, Zea mays subsp. mays
  misc_feature (1)..(1434): Ceres Seq. ID no. 12356470
  misc_feature: MA Experiment ID: 108504 Result: Up-regulated in Transcription
  misc_feature: MA Experiment 108504 PARAMETER Experiment Name: Zm_Drought_P Parameter: Age (day) Value: 8
  misc_feature: MA Experiment 108504 PARAMETER Experiment Name: Zm_Drought_P Parameter: Organism Value: Zea mays
  misc_feature: MA Experiment 108504 PARAMETER Experiment Name: Zm_Drought_P Parameter: Plant Line Value: 35A19
  misc_feature: MA Experiment 108504 PARAMETER Experiment Name: Zm_Drought_P Parameter: Timepoint (hr) Value: 12
  misc_feature: MA Experiment 108504 PARAMETER Experiment Name: Zm_Drought_P Parameter: Tissue Value: Aerial
  misc_feature: MA Experiment 108504 PARAMETER Experiment Name: Zm_Drought_P Parameter: Treatment Value: Drought vs. No Drought
  misc_feature: MA Experiment ID: 108513 Result: Up-regulated in Transcription
  misc_feature: MA Experiment 108513 PARAMETER Experiment Name: Zm_100uM_ABA_P Parameter: Age (day) Value: 8
  misc_feature: MA Experiment 108513 PARAMETER Experiment Name: Zm_100uM_ABA_P Parameter: Organism Value: Zea mays
  misc_feature: MA Experiment 108513 PARAMETER Experiment Name: Zm_100uM_ABA_P Parameter: Plant Line Value: 35A19
  misc_feature: MA Experiment 108513 PARAMETER Experiment Name: Zm_100uM_ABA_P Parameter: Timepoint (hr) Value: 6
  misc_feature: MA Experiment 108513 PARAMETER Experiment Name: Zm_100uM_ABA_P Parameter: Tissue Value: Aerial
  misc_feature: MA Experiment 108513 PARAMETER Experiment Name: Zm_100uM_ABA_P Parameter: Treatment Value: 100uM ABA vs. No Treatment
  misc_feature: MA Experiment ID: 108527 Result: Up-regulated in Transcription
  misc_feature: MA Experiment 108527 PARAMETER Experiment Name: Zm_5mM_NO_P Parameter: Age (day) Value: 8
  misc_feature: MA Experiment 108527 PARAMETER Experiment Name: Zm_5mM_NO_P Parameter: Organism Value: Zea mays
  misc_feature: MA Experiment 108527 PARAMETER Experiment Name: Zm_5mM_NO_P Parameter: Plant Line Value: 35A19
  misc_feature: MA Experiment 108527 PARAMETER Experiment Name: Zm_5mM_NO_P Parameter: Timepoint (hr) Value: 6
  misc_feature: MA Experiment 108527 PARAMETER Experiment Name: Zm_5mM_NO_P Parameter: Tissue Value: Aerial
  misc_feature: MA Experiment 108527 PARAMETER Experiment Name: Zm_5mM_NO_P Parameter: Treatment Value: 5mM NO vs. No Treatment
  misc_feature: MA Experiment ID: 108533 Result: Up-regulated in Transcription
  misc_feature: MA Experiment 108533 PARAMETER Experiment Name: Zm_4deg_Cold_P Parameter: Age (hr) Value: 8
  misc_feature: MA Experiment 108533 PARAMETER Experiment Name: Zm_4deg_Cold_P Parameter: Organism Value: Zea mays
  misc_feature: MA Experiment 108533 PARAMETER Experiment Name: Zm_4deg_Cold_P Parameter: Plant Line Value: 35A19
  misc_feature: MA Experiment 108533 PARAMETER Experiment Name: Zm_4deg_Cold_P Parameter: Temperature (deg C) Value: 4 vs. 22
  misc_feature: MA Experiment 108533 PARAMETER Experiment Name: Zm_4deg_Cold_P Parameter: Timepoint (hr) Value: 1
  misc_feature: MA Experiment 108533 PARAMETER Experiment Name: Zm_4deg_Cold_P Parameter: Tissue Value: Aerial
  misc_feature: MA Experiment ID: 108534 Result: Up-regulated in Transcription
  misc_feature: MA Experiment 108534 PARAMETER Experiment Name: Zm_4deg_Cold_P Parameter: Age (hr) Value: 8
  misc_feature: MA Experiment 108534 PARAMETER Experiment Name: Zm_4deg_Cold_P Parameter: Organism Value: Zea mays
  misc_feature: MA Experiment 108534 PARAMETER Experiment Name: Zm_4deg_Cold_P Parameter: Plant Line Value: 35A19
  misc_feature: MA Experiment 108534 PARAMETER Experiment Name: Zm_4deg_Cold_P Parameter: Temperature (deg C) Value: 4 vs. 22
  misc_feature: MA Experiment 108534 PARAMETER Experiment Name: Zm_4deg_Cold_P Parameter: Timepoint (hr) Value: 6
  misc_feature: MA Experiment 108534 PARAMETER Experiment Name: Zm_4deg_Cold_P Parameter: Tissue Value: Aerial
  misc_feature: MA Experiment ID: 108535 Result: Down-regulated in Transcription
  misc_feature: MA Experiment 108535 PARAMETER Experiment Name: Zm_Meristem_P Parameter: Age (day) Value: 8
  misc_feature: MA Experiment 108535 PARAMETER Experiment Name: Zm_Meristem_P Parameter: Organism Value: Zea mays
  misc_feature: MA Experiment 108535 PARAMETER Experiment Name: Zm_Meristem_P Parameter: Plant Line Value: 35A19
  misc_feature: MA Experiment 108535 PARAMETER Experiment Name: Zm_Meristem_P Parameter: Tissue Value: Root Meristem vs. Above Root Meristem
  misc_feature: MA Experiment ID: 108536 Result: Down-regulated in Transcription
  misc_feature: MA Experiment 108536 PARAMETER Experiment Name: Zm_Meristem_P Parameter: Age (day) Value: 8
  misc_feature: MA Experiment 108536 PARAMETER Experiment Name: Zm_Meristem_P Parameter: Organism Value: Zea mays
  misc_feature: MA Experiment 108536 PARAMETER Experiment Name: Zm_Meristem_P Parameter: Plant Line Value: 35A19
  misc_feature: MA Experiment 108536 PARAMETER Experiment Name: Zm_Meristem_P Parameter: Tissue Value: Shoot Meristem vs. Above Shoot Meristem
  misc_feature: MA Experiment ID: 108540 Result: Up-regulated in Transcription
  misc_feature: MA Experiment 108540 PARAMETER Experiment Name: Zm_20percent_PEG_P Parameter: Age (day) Value: 8
  misc_feature: MA Experiment 108540 PARAMETER Experiment Name: Zm_20percent_PEG_P Parameter: Organism Value: Zea mays
  misc_feature: MA Experiment 108540 PARAMETER Experiment Name: Zm_20percent_PEG_P Parameter: Plant Line Value: 35A19
  misc_feature: MA Experiment 108540 PARAMETER Experiment Name: Zm_20percent_PEG_P Parameter: Timepoint (hr) Value: 6
  misc_feature: MA Experiment 108540 PARAMETER Experiment Name: Zm_20percent_PEG_P Parameter: Tissue Value: Aerial
  misc_feature: MA Experiment 108540 PARAMETER Experiment Name: Zm_20percent_PEG_P Parameter: Treatment Value: 20percent PEG vs. No Treatment
  misc_feature: MA Experiment ID: 108556 Result: Up-regulated in Transcription
  misc_feature: MA Experiment 108556 PARAMETER Experiment Name: Zm_Drought_P Parameter: Age (day) Value: 9
  misc_feature: MA Experiment 108556 PARAMETER Experiment Name: Zm_Drought_P Parameter: Organism Value: Zea mays
  misc_feature: MA Experiment 108556 PARAMETER Experiment Name: Zm_Drought_P Parameter: Plant Line Value: 35A19
  misc_feature: MA Experiment 108556 PARAMETER Experiment Name: Zm_Drought_P Parameter: Timepoint (hr) Value: 24
  misc_feature: MA Experiment 108556 PARAMETER Experiment Name: Zm_Drought_P Parameter: Tissue Value: Aerial
  misc_feature: MA Experiment 108556 PARAMETER Experiment Name: Zm_Drought_P Parameter: Treatment Value: Drought vs. No Drought
  misc_feature: MA Experiment ID: 108597 Result: Up-regulated in Transcription
  misc_feature: MA Experiment 108597 PARAMETER Experiment Name: Zm_100uM_ABA_P Parameter: Age (day) Value: 9
  misc_feature: MA Experiment 108597 PARAMETER Experiment Name: Zm_100uM_ABA_P Parameter: Organism Value: Zea mays
  misc_feature: MA Experiment 108597 PARAMETER Experiment Name: Zm_100uM_ABA_P Parameter: Plant Line Value: 35A19
  misc_feature: MA Experiment 108597 PARAMETER Experiment Name: Zm_100uM_ABA_P Parameter: Timepoint (hr) Value: 24
  misc_feature: MA Experiment 108597 PARAMETER Experiment Name: Zm_100uM_ABA_P Parameter: Tissue Value: Aerial
  misc_feature: MA Experiment 108597 PARAMETER Experiment Name: Zm_100uM_ABA_P Parameter: Treatment Value: 100uM ABA vs. No Treatment
  misc_feature: MA Experiment ID: 20000108 Result: Down-regulated in Transcription
  misc_feature: MA Experiment 20000108 PARAMETER Experiment Name: Zm_Root-Tips_P Parameter: Age (day) Value: 12
  misc_feature: MA Experiment 20000108 PARAMETER Experiment Name: Zm_Root-Tips_P Parameter: Organism Value: Zea mays
  misc_feature: MA Experiment 20000108 PARAMETER Experiment Name: Zm_Root-Tips_P Parameter: Tissue Value: Root tips vs. Root mid region    35
  misc_feature: MA Experiment 20000108 PARAMETER Experiment Name: Zm_Root-Tips_P Parameter: Tissue Value: Root tips vs. Root mid region   Sequence Listing-Misc Features (4)
  misc_feature: MA Experiment ID: 20000479 Result: Up-regulated in Transcription
  misc_feature: MA Experiment 20000479 PARAMETER Experiment Name: Zm_Drought_P Parameter: Age (day) Value: 10
  misc_feature: MA Experiment 20000479 PARAMETER Experiment Name: Zm_Drought_P Parameter: Organism Value: Zea mays
  misc_feature: MA Experiment 20000479 PARAMETER Experiment Name: Zm_Drought_P Parameter: Plant Line Value: 35A19
  misc_feature: MA Experiment 20000479 PARAMETER Experiment Name: Zm_Drought_P Parameter: Timepoint (hr) Value: 48
  misc_feature: MA Experiment 20000479 PARAMETER Experiment Name: Zm_Drought_P Parameter: Tissue Value: Aerial
  misc_feature: MA Experiment 20000479 PARAMETER Experiment Name: Zm_Drought_P Parameter: Treatment Value: Drought vs. No Drought
  misc_feature: MA Experiment ID: 20000488 Result: Down-regulated in Transcription
  misc_feature: MA Experiment 20000488 PARAMETER Experiment Name: Zm_50mM_NH4NO3_L_to_H_P Parameter: Organism Value: Zea mays
  misc_feature: MA Experiment 20000488 PARAMETER Experiment Name: Zm_50mM_NH4NO3_L_to_H_P Parameter: Timepoint (hr) Value: 8
  misc_feature: MA Experiment 20000488 PARAMETER Experiment Name: Zm_50mM_NH4NO3_L_to_H_P Parameter: Tissue Value: Leaves
  misc_feature: MA Experiment 20000488 PARAMETER Experiment Name: Zm_50mM_NH4NO3_L_to_H_P Parameter: Treatment Value: 50mM NH4NO3 vs. 100mM Mannitol
  misc_feature: MA Experiment ID: 20000532 Result: Up-regulated in Transcription
  misc_feature: MA Experiment 20000532 PARAMETER Experiment Name: Zm_0.001percent_MeJA_P Parameter: Age (day) Value: 10
  misc_feature: MA Experiment 20000532 PARAMETER Experiment Name: Zm_0.001percent_MeJA_P Parameter: Organism Value: Zea mays
  misc_feature: MA Experiment 20000532 PARAMETER Experiment Name: Zm_0.001percent_MeJA_P Parameter: Plant Line Value: 35A19
  misc_feature: MA Experiment 20000532 PARAMETER Experiment Name: Zm_0.001percent_MeJA_P Parameter: Timepoint (hr) Value: 48
  misc_feature: MA Experiment 20000532 PARAMETER Experiment Name: Zm_0.001percent_MeJA_P Parameter: Tissue Value: Aerial
  misc_feature: MA Experiment 20000532 PARAMETER Experiment Name: Zm_0.001percent_MeJA_P Parameter: Treatment Value: 0.001percent MeJA vs. No Treatment
  misc_feature: MA Experiment ID: 20000533 Result: Up-regulated in Transcription
  misc_feature: MA Experiment 20000533 PARAMETER Experiment Name: Zm_0.001percent_MeJA_P Parameter: Age (day) Value: 11
  misc_feature: MA Experiment 20000533 PARAMETER Experiment Name: Zm_0.001percent_MeJA_P Parameter: Organism Value: Zea mays
  misc_feature: MA Experiment 20000533 PARAMETER Experiment Name: Zm_0.001percent_MeJA_P Parameter: Plant Line Value: 35A19
  misc_feature: MA Experiment 20000533 PARAMETER Experiment Name: Zm_0.001percent_MeJA_P Parameter: Timepoint (hr) Value: 72
  misc_feature: MA Experiment 20000533 PARAMETER Experiment Name: Zm_0.001percent_MeJA_P Parameter: Tissue Value: Aerial
  misc_feature: MA Experiment 20000533 PARAMETER Experiment Name: Zm_0.001percent_MeJA_P Parameter: Treatment Value: 0.001percent MeJA vs. No Treatment
  misc_feature: MA Experiment ID: 20000626 Result: Down-regulated in Transcription
  misc_feature: MA Experiment 20000626 PARAMETER Experiment Name: Zm_Herbicide-Treatments_P Parameter: Timepoint (hr) Value: 12
  misc_feature: MA Experiment 20000626 PARAMETER Experiment Name: Zm_Herbicide-Treatments_P Parameter: Tissue Value: Aerial
  misc_feature: MA Experiment 20000626 PARAMETER Experiment Name: Zm_Herbicide-Treatments_P Parameter: Treatment Value: Roundup vs. No Treatment
  misc_feature: MA Experiment ID: 20001612 Result: Down-regulated in Transcription
  misc_feature: MA Experiment 20001612 PARAMETER Experiment Name: Zm_50ppm_KNO3_L-to-H_P Parameter: Age (day) Value: 19
  misc_feature: MA Experiment 20001612 PARAMETER Experiment Name: Zm_50ppm_KNO3_L-to-H_P Parameter: Organism Value: Zea mays
  misc_feature: MA Experiment 20001612 PARAMETER Experiment Name: Zm_50ppm_KNO3_L-to-H_P Parameter: Plant Line Value: 35A19
  misc_feature: MA Experiment 20001612 PARAMETER Experiment Name: Zm_50ppm_KNO3_L-to-H_P Parameter: Timepoint (hr) Value: 8
  misc_feature: MA Experiment 20001612 PARAMETER Experiment Name: Zm_50ppm_KNO3_L-to-H_P Parameter: Tissue Value: Roots
  misc_feature: MA Experiment 20001612 PARAMETER Experiment Name: Zm_50ppm_KNO3_L-to-H_P Parameter: Treatment Value: 50ppm KNO3 vs. 50ppm KCl
accgagatgcaatgcaatgcaaacatcctccctcttctcctgctcctcacagacatcttatcctagctcccggtcgaaggccgtaggtaggattcccttctctattcctcgtccgcttcctcctccggcagccggacctagctagctagctttcttgccgttcgccgcccatggctaggaagtgctctagctgtgggaacaacggccacaactccaggacctgcggcgggcacagcaggaccacggcggccttcgagaacaacggcggcgccggcgtgaggctgttcggggtgcagctgcacgtggggtcctcgtcgcccgtagccgtagccatgaagaggtgcttcagcatggagtgcctgtcgtcgccgccgcccgccgcgccggcgtactacgcggccgctctcgccgccgccaacagcagctcgccgtcggcgtccgcgtcggcgtcctcgtcctcgtcgctcgtctcggtggaggaggcacaggcacccgagaagatggccagcgggtacctctccgacgggctcgtgggcagggcgcaggcggagaggaagaagggcgttccgtggacggaggacgagcaccggcggttcctggcgggcctggagaagctcgggaagggcgactggcgaggcatctcccggcacttcgtcacgacgcggacgccgacgcaggtggccagccacgcccagaagtacttcctccggcagagcagcctggcgcacaagaagcgcaggtccagcctcttcgacgtggtggagaacgctgctgagagggcgacgacgacgagctccagggagcgcccgaggctcacggtcacggatgcgataatcgcgaccgcctctgctgcagcacccggaacaacggcagcactcccggccctgtcgctcggcatccgacggccagcgaggcctgagtaccacgttgacgtcgcgctgcctccgagcagcctgtccatgcagctgccgcggtgctcggcggcaatgggtagcgcgtcggcgtcgccgtcgccgagcctggcgctggcgctggcggggccgaaacacaagcacccttcgccttcgtccctgacggcggcaaaggctagtagtagtggccaggcaccagacctggagctgaagatctcgaccggccggcagagcgagcaccaggtccagacgggctcgccgccgaggacgccctttctgggcaccatcagggtcacgtaaccggaatgacggcggcggcggttagtcgggaatgtcctgctggtagaagaagagcttggccgggccggggtgggaaaactgaaaaggaggagcttttggcagtggtgttggtgtgtgtgtgttgctgccagtggcagccgagacgacgatgccgttcgtttatcacgtgggtgtggtgttgtgcatcatcatcagaaagatggaaactttactttagtggcct

SEQ ID NO: 7552 - protein, 346 aa, Zea mays subsp. mays
  peptide (1)..(346): Ceres Seq. ID no. 12356471
  misc_feature (131)..(178): Pfam Name: Myb-like DNA-binding domain Pfam Description: Myb-like DNA-binding domain
  misc_feature (1)..(220): Homolog of NCBI NO: 34906444 NR Description: P0671B11.14 [Oryza sativa (japonica
  misc_feature (1)..(201): Homolog of NCBI NO: 34912404 NR Description: putative Myb-related transcription factor [Oryza
  misc_feature (30)..(259): Homolog of NCBI NO: 12406995 NR Description: MCB2 protein [Hordeum vulgare subsp. vulgare]
  misc_feature (80)..(197): Homolog of NCBI NO: 24850307 NR Description: transcription factor MYBS3 [Oryza sativa
  misc_feature (1)..(47): Homolog of NCBI NO: 24850307 NR Description: transcription factor MYBS3 [Oryza sativa
  misc_feature (1)..(256): Homolog of NCBI NO: 15228185 NR Description: putative MYB family transcription factor; protein At3g16350.1 [Arabidopsis thaliana] >gi|29028776|gb|AAO64767.1|
  misc_feature (1)..(256): Homolog of NCBI NO: 2062176 NR Description: Myb-related transcription activator (MybSt1)
  misc_feature (83)..(197): Homolog of NCBI NO: 15238083 NR Description: Myb-related transcription activator-like; protein At5g47390.1, supported by cDNA: 102806., supported by cDNA:
  misc_feature (1)..(47): Homolog of NCBI NO: 15238083 NR Description: Myb-related transcription activator-like; protein At5g47390.1, supported by cDNA: 102806., supported by cDNA:
  misc_feature (112)..(197): Homolog of NCBI NO: 7705206 NR Description: MybSt1 [Solanum tuberosum]
MARKCSSCGNNGHNSRTCGGHSRTTAAFENNGGAGVRLFGVQLHVGSSSPVAVAMKRCFSMECLSSPPPAAPAYYAAALAAANSSSPSASASASSSSSLVSVEEAQAPEKMASGYLSDGLVGRAQAERKKGVPWTEDEHRRFLAGLEKLGKGDWRGISRHFVTTRTPTQVASHAQKYFLRQSSLAHKKRRSSLFDVVENAAERATTTSSRERPRLTVTDAIIATASAAAPGTTAALPALSLGIRRPARPEYHVDVALPPSSLSMQLPRCSAAMGSASASPSPSLALALAGPKHKHPSPSSLTAAKASSSGQAPDLELKISTGRQSEHQVQTGSPPRTPFLGTIRVT

SEQ ID NO: 7553 - protein, 292 aa, Zea mays subsp. mays
  peptide (1)..(292): Ceres Seq. ID no. 12356472
  misc_feature (77)..(124): Pfam Name: Myb-like DNA-binding domain Pfam Description: Myb-like DNA-binding domain
  misc_feature (1)..(166): Homolog of NCBI NO: 34906444 NR Description: P0671B11.14 [Oryza sativa (japonica
  misc_feature (1)..(147): Homolog of NCBI NO: 34912404 NR Description: putative Myb-related transcription factor [Oryza
  misc_feature (1)..(205): Homolog of NCBI NO: 12406995 NR Description: MCB2 protein [Hordeum vulgare subsp. vulgare]
  misc_feature (26)..(143): Homolog of NCBI NO: 24850307 NR Description: transcription factor MYBS3 [Oryza sativa
  misc_feature (1)..(202): Homolog of NCBI NO: 15228185 NR Description: putative MYB family transcription factor; protein At3g16350.1 [Arabidopsis thaliana] >gi|29028776|gb|AAO64767.1|
  misc_feature (1)..(202): Homolog of NCBI NO: 2062176 NR Description: Myb-related transcription activator (MybSt1)
  misc_feature (29)..(143): Homolog of NCBI NO: 15238083 NR Description: Myb-related transcription activator-like; protein At5g47390.1, supported by cDNA: 102806., supported by cDNA:
  misc_feature (58)..(143): Homolog of NCBI NO: 7705206 NR Description: MybSt1 [Solanum tuberosum]
  misc_feature (58)..(143): Homolog of NCBI NO: 1076660 NR Description: D13F(MYBST1) protein - potato
  misc_feature (11)..(152): Homolog of NCBI NO: 15241963 NR Description: putative protein; protein id: At5g56840.1
MKRCFSMECLSSPPPAAPAYYAAALAAANSSSPSASASASSSSSLVSVEEAQAPEKMASGYLSDGLVGRAQAERKKGVPWTEDEHRRFLAGLEKLGKGDWRGISRHFVTTRTPTQVASHAQKYFLRQSSLAHKKRRSSLFDVVENAAERATTTSSRERPRLTVTDAIIATASAAAPGTTAALPALSLGIRRPARPEYHVDVALPPSSLSMQLPRCSAAMGSASASPSPSLALALAGPKHKHPSPSSLTAAKASSSGQAPDLELKISTGRQSEHQVQTGSPPRTPFLGTIRVT

SEQ ID NO: 7554 - protein, 286 aa, Zea mays subsp. mays
  peptide (1)..(286): Ceres Seq. ID no. 12356473
  misc_feature (71)..(118): Pfam Name: Myb-like DNA-binding domain Pfam Description: Myb-like DNA-binding domain
  misc_feature (1)..(199): Homolog of NCBI NO: 12406995 NR Description: MCB2 protein [Hordeum vulgare subsp. vulgare]
  misc_feature (20)..(137): Homolog of NCBI NO: 24850307 NR Description: transcription factor MYBS3 [Oryza sativa
  misc_feature (1)..(196): Homolog of NCBI NO: 15228185 NR Description: putative MYB family transcription factor; protein At3g16350.1 [Arabidopsis thaliana] >gi|29028776|gb|AAO64767.1|
  misc_feature (1)..(196): Homolog of NCBI NO: 2062176 NR Description: Myb-related transcription activator (MybSt1)
  misc_feature (1)..(160): Homolog of NCBI NO: 34906444 NR Description: P0671B11.14 [Oryza sativa (japonica
  misc_feature (1)..(141): Homolog of NCBI NO: 34912404 NR Description: putative Myb-related transcription factor [Oryza
  misc_feature (23)..(137): Homolog of NCBI NO: 15238083 NR Description: Myb-related transcription activator-like; protein At5g47390.1, supported by cDNA: 102806., supported by cDNA:
  misc_feature (52)..(137): Homolog of NCBI NO: 7705206 NR Description: MybSt1 [Solanum tuberosum]
  misc_feature (52)..(137): Homolog of NCBI NO: 1076660 NR Description: D13F(MYBST1) protein - potato
  misc_feature (5)..(146): Homolog of NCBI NO: 15241963 NR Description: putative protein; protein id: At5g56840.1
MECLSSPPPAAPAYYAAALAAANSSSPSASASASSSSSLVSVEEAQAPEKMASGYLSDGLVGRAQAERKKGVPWTEDEHRRFLAGLEKLGKGDWRGISRHFVTTRTPTQVASHAQKYFLRQSSLAHKKRRSSLFDVVENAAERATTTSSRERPRLTVTDAIIATASAAAPGTTAALPALSLGIRRPARPEYHVDVALPPSSLSMQLPRCSAAMGSASASPSPSLALALAGPKHKHPSPSSLTAAKASSSGQAPDLELKISTGRQSEHQVQTGSPPRTPFLGTIRVT

SEQ ID NO: 7555 - DNA, 1979 bp, Zea mays subsp. mays
  misc_feature (1)..(1979): Ceres Seq. ID no. 12363354
  misc_feature: MA Experiment ID: 108522 Result: Up-regulated in Transcription
  misc_feature: MA Experiment 108522 PARAMETER Experiment Name: Zm_42deg_Heat_P Parameter: Age (day) Value: 8
  misc_feature: MA Experiment 108522 PARAMETER Experiment Name: Zm_42deg_Heat_P Parameter: Organism Value: Zea mays
  misc_feature: MA Experiment 108522 PARAMETER Experiment Name: Zm_42deg_Heat_P Parameter: Plant Line Value: 35A19
  misc_feature: MA Experiment 108522 PARAMETER Experiment Name: Zm_42deg_Heat_P Parameter: Temperature (deg C) Value: 42 vs. 22
  misc_feature: MA Experiment 108522 PARAMETER Experiment Name: Zm_42deg_Heat_P Parameter: Timepoint (hr) Value: 1
  misc_feature: MA Experiment 108522 PARAMETER Experiment Name: Zm_42deg_Heat_P Parameter: Tissue Value: Aerial
  misc_feature: MA Experiment ID: 108527 Result: Up-regulated in Transcription
  misc_feature: MA Experiment 108527 PARAMETER Experiment Name: Zm_5mM_NO_P Parameter: Age (day) Value: 8
  misc_feature: MA Experiment 108527 PARAMETER Experiment Name: Zm_5mM_NO_P Parameter: Organism Value: Zea mays
  misc_feature: MA Experiment 108527 PARAMETER Experiment Name: Zm_5mM_NO_P Parameter: Plant Line Value: 35A19
  misc_feature: MA Experiment 108527 PARAMETER Experiment Name: Zm_5mM_NO_P Parameter: Timepoint (hr) Value: 6
  misc_feature: MA Experiment 108527 PARAMETER Experiment Name: Zm_5mM_NO_P Parameter: Tissue Value: Aerial
  misc_feature: MA Experiment 108527 PARAMETER Experiment Name: Zm_5mM_NO_P Parameter: Treatment Value: 5mM NO vs. No Treatment
  misc_feature: MA Experiment ID: 108535 Result: Down-regulated in Transcription
  misc_feature: MA Experiment 108535 PARAMETER Experiment Name: Zm_Meristem_P Parameter: Age (day) Value: 8
  misc_feature: MA Experiment 108535 PARAMETER Experiment Name: Zm_Meristem_P Parameter: Organism Value: Zea mays
  misc_feature: MA Experiment 108535 PARAMETER Experiment Name: Zm_Meristem_P Parameter: Plant Line Value: 35A19
  misc_feature: MA Experiment 108535 PARAMETER Experiment Name: Zm_Meristem_P Parameter: Tissue Value: Root Meristem vs. Above Root Meristem
gcacgagaccattacctagaacatcctaatcgaaaaatcttcgtctctctccgactctccctcgcccgcgcacctttccgcgccgcctccttcctttcctcgcgtgctctggcgcgcgcaaggatcaaaaggcgccggccactagaggcgagtgagtcgcatgtaaacgaccaccagctgctgtgatctcaaaagggagcgagagacaaaggagaggcgagcaggtcgtggcggcagcaatcgttgcgaatccgcgcgggattctgtcctctgcaccactgcttcccgctttcctgcccggcggaagtggtataattctccaacgcggttgactgtattgcctctcgctctcggtgggtgggggcatggacgaggcagaggagatgcaggtggagaggctgcacgaggaggccgatgcggggggagccgacacggacaagctcagctacgagatattctccatcctcgagagcaagttcctgttcggctataccgacccgcaccagctctggctgcccaagccagcggcggaactgccggcgcaggcgtccgcggcggcgccgggtaaggcggcgcagcgcgggaaggtctgcgtgctctgcgtggacggcggcgggggcggcctgcgggcgctgctgcccggccgcgcgcttgcgcacctggaggccgcgctgcgccgcgcgtctggggaccccgacgcccgggtcgccgactacttcgacctcgctgcgggcaccggcgccggcggcgtgttcgccgcgatgctcttctccacgcactcgcgcggcgcnccgctgttccacgccnacgacacgtggcggctcgtcgcggaccacgcgccgcgcatgttccgcaggcccgcggcctcctcgtccacttccctcttctgccgcggcaagaagcggcccctggccgcgccaacggcggcgctggaggcggcaatgaagnnggcgttcggccaggagctcaccctgcgggacaccatcaagcccgtgctcatctcttgctacgacctcaagacgtccgcgccgctggtgttctctcgcgccgacgcactggagaacgggagctacgacttccgcctctgcgaggtcgggcgcgccgcgtggtccgaggccggacgcttcgagcccgccgaggtggcgtcggtggacggcgccacgtcctgcgccgctgtagacggcggccccaccatgggcagcccggcggccgccgccatcacgcacgtgctacacaacaagcacgagttcccgttcgtgcgcggggtcgaggacctcctcgtgctctccatcggcggctgctctggcggaggctctggcgccgctggcgaggcggaactccggcgcatgcgtcggtggggtcccaaggagtgggcacgccccatcgcccgtattgcggccgacggcgccgccgaccttgtcgaccacgccgtggcgcgcgccttcggccaatgccgcgcatccaactacctgcgcatccaggcgaagcgggagagcatgccgccgtgcggtacggacggggagtacgacccgaccccaggcaacgtgcgcgcgctgctcgcggcggcggacgagatgctcaagcagcggaacgtggagtcggtgctgttcgaggggaggcgagtcggggagcagacgaacgcggagaagctggactggttcgcggcagagctcgtcgccgagcaccgcagcagagcctcccggatcgcacccaccgttgcgttcaagcaggcgccgcagaagccgtaggcgctggactgagctggtggccgtaagaccgtggcgttaagggcatgtaggcctctctttcttcttgcttgggctggcggctggaattcctgctgcatatttttgacgcggcagcatggcatatcaatatggcattgctctgtgatggagcatttgccgctgtgaaatcgtttcaagggaggatggaatatgaaaggaacgaacgttgccgatataaaaattctaatcttc

SEQ ID NO: 7556 - protein, 460 aa, Zea mays subsp. mays
  peptide (1)..(460): Ceres Seq. ID no. 12363355
  misc_feature (78)..(285): Pfam Name: Patatin-like phospholipase Pfam Description: Patatin-like phospholipase
  misc_feature (22)..(456): Homolog of NCBI NO: 15225054 NR Description: patatin family; protein id: At2g39220.1, by cDNA: gi_17065143 [Arabidopsis thaliana]
  misc_feature (58)..(456): Homolog of NCBI NO: 15233136 NR Description: patatin-related; protein id: At3g54950.1
  misc_feature (72)..(459): Homolog of NCBI NO: 30688454 NR Description: patatin-related [Arabidopsis thaliana]
  misc_feature (72)..(459): Homolog of NCBI NO: 7486230 NR Description: hypothetical protein F27B13.40 - Arabidopsis >gi|4914404|emb|CAB43655.1| putative protein [Arabidopsis >gi|7269879|emb|CAB79738.1| putative protein [Arabidopsis
  misc_feature (72)..(452): Homolog of NCBI NO: 34899642 NR Description: contains ESTs
  misc_feature (16)..(366): Homolog of NCBI NO: 34897124 NR Description: putative lipid acyl hydrolase [Oryza sativa]
  misc_feature (74)..(373): Homolog of NCBI NO: 11357489 NR Description: hypothetical protein F16M2.50 - Arabidopsis >gi|7523402|emb|CAB86421.1| putative protein [Arabidopsis
  misc_feature (74)..(373): Homolog of NCBI NO: 18412659 NR Description: putative protein; protein id: At3g63200.1, by cDNA: gi_15912226 [Arabidopsis thaliana] AT3g63200/F16M2_50 [Arabidopsis thaliana]
  misc_feature (401)..(442): Homolog of NCBI NO: 11357489 NR Description: hypothetical protein F16M2.50 - Arabidopsis >gi|7523402|emb|CAB86421.1| putative protein [Arabidopsis
  misc_feature (401)..(442): Homolog of NCBI NO: 18412659 NR Description: putative protein; protein id: At3g63200.1, by cDNA: gi_15912226 [Arabidopsis thaliana] AT3g63200/F16M2_50 [Arabidopsis thaliana]
  misc_feature (142)..(142): Xaa is any aa, unknown or other
  misc_feature (148)..(148): Xaa is any aa, unknown or other
  misc_feature (195)..(195): Xaa is any aa, unknown or other
MDEAEEMQVERLHEEADAGGADTDKLSYEIFSILESKFLFGYTDPHQLWLPKPAAELPAQASAAAPGKAAQRGKVCVLCVDGGGGGLRALLPGRALAHLEAALRRASGDPDARVADYFDLAAGTGAGGVFAAMLFSTHSRGXPLFHAXDTWRLVADHAPRMFRRPAASSSTSLFCRGKKRPLAAPTAALEAAMKXAFGQELTLRDTIKPVLISCYDLKTSAPLVFSRADALENGSYDFRLCEVGRAAWSEAGRFEPAEVASVDGATSCAAVDGGPTMGSPAAAAITHVLHNKHEFPFVRGVEDLLVLSIGGCSGGGSGAAGEAELRRMRRWGPKEWARPIARIAADGAADLVDHAVARAFGQCRASNYLRIQAKRESMPPCGTDGEYDPTPGNVRALLAAADEMLKQRNVESVLFEGRRVGEQTNAEKLDWFAAELVAEHRSRASRIAPTVAFKQAPQKP

SEQ ID NO: 7557 - protein, 454 aa, Zea mays subsp. mays
  peptide (1)..(454): Ceres Seq. ID no. 12363356
  misc_feature (72)..(279): Pfam Name: Patatin-like phospholipase Pfam Description: Patatin-like phospholipase
  misc_feature (16)..(450): Homolog of NCBI NO: 15225054 NR Description: patatin family; protein id: At2g39220.1, by cDNA: gi_17065143 [Arabidopsis thaliana]
  misc_feature (52)..(450): Homolog of NCBI NO: 15233136 NR Description: patatin-related; protein id: At3g54950.1
  misc_feature (66)..(453): Homolog of NCBI NO: 30688454 NR Description: patatin-related [Arabidopsis thaliana]
  misc_feature (66)..(453): Homolog of NCBI NO: 7486230 NR Description: hypothetical protein F27B13.40 - Arabidopsis >gi|4914404|emb|CAB43655.1| putative protein [Arabidopsis >gi|7269879|emb|CAB79738.1| putative protein [Arabidopsis
  misc_feature (66)..(446): Homolog of NCBI NO: 34899642 NR Description: contains ESTs
  misc_feature (10)..(360): Homolog of NCBI NO: 34897124 NR Description: putative lipid acyl hydrolase [Oryza sativa]
  misc_feature (68)..(367): Homolog of NCBI NO: 11357489 NR Description: hypothetical protein F16M2.50 - Arabidopsis >gi|7523402|emb|CAB86421.1| putative protein [Arabidopsis
  misc_feature (68)..(367): Homolog of NCBI NO: 18412659 NR Description: putative protein; protein id: At3g63200.1, by cDNA: gi_15912226 [Arabidopsis thaliana] AT3g63200/F16M2_50 [Arabidopsis thaliana]
  misc_feature (395)..(436): Homolog of NCBI NO: 11357489 NR Description: hypothetical protein F16M2.50 - Arabidopsis >gi|7523402|emb|CAB86421.1| putative protein [Arabidopsis
  misc_feature (395)..(436): Homolog of NCBI NO: 18412659 NR Description: putative protein; protein id: At3g63200.1, by cDNA: gi_15912226 [Arabidopsis thaliana] AT3g63200/F16M2_50 [Arabidopsis thaliana]
  misc_feature (136)..(136): Xaa is any aa, unknown or other
  misc_feature (142)..(142): Xaa is any aa, unknown or other
  misc_feature (189)..(189): Xaa is any aa, unknown or other
MQVERLHEEADAGGADTDKLSYEIFSILESKFLFGYTDPHQLWLPKPAAELPAQASAAAPGKAAQRGKVCVLCVDGGGGGLRALLPGRALAHLEAALRRASGDPDARVADYFDLAAGTGAGGVFAAMLFSTHSRGXPLFHAXDTWRLVADHAPRMFRRPAASSSTSLFCRGKKRPLAAPTAALEAAMKXAFGQELTLRDTIKPVLISCYDLKTSAPLVFSRADALENGSYDFRLCEVGRAAWSEAGRFEPAEVASVDGATSCAAVDGGPTMGSPAAAAITHVLHNKHEFPFVRGVEDLLVLSIGGCSGGGSGAAGEAELRRMRRWGPKEWARPIARIAADGAADLVDHAVARAFGQCRASNYLRIQAKRESMPPCGTDGEYDPTPGNVRALLAAADEMLKQRNVESVLFEGRRVGEQTNAEKLDWFAAELVAEHRSRASRIAPTVAFKQAPQKP

SEQ ID NO: 7558 - protein, 328 aa, Zea mays subsp. mays
  peptide (1)..(328): Ceres Seq. ID no. 12363357
  misc_feature (1)..(153): Pfam Name: Patatin-like phospholipase Pfam Description: Patatin-like phospholipase
  misc_feature (1)..(324): Homolog of NCBI NO: 15225054 NR Description: patatin family; protein id: At2g39220.1, by cDNA: gi_17065143 [Arabidopsis thaliana]
  misc_feature (1)..(324): Homolog of NCBI NO: 15233136 NR Description: patatin-related; protein id: At3g54950.1
  misc_feature (1)..(327): Homolog of NCBI NO: 30688454 NR Description: patatin-related [Arabidopsis thaliana]
  misc_feature (1)..(327): Homolog of NCBI NO: 7486230 NR Description: hypothetical protein F27B13.40 - Arabidopsis >gi|4914404|emb|CAB43655.1| putative protein [Arabidopsis >gi|7269879|emb|CAB79738.1| putative protein [Arabidopsis
  misc_feature (1)..(320): Homolog of NCBI NO: 34899642 NR Description: contains ESTs
  misc_feature (1)..(234): Homolog of NCBI NO: 34897124 NR Description: putative lipid acyl hydrolase [Oryza sativa]
  misc_feature (1)..(241): Homolog of NCBI NO: 11357489 NR Description: hypothetical protein F16M2.50 - Arabidopsis >gi|7523402|emb|CAB86421.1| putative protein [Arabidopsis
  misc_feature (1)..(241): Homolog of NCBI NO: 18412659 NR Description: putative protein; protein id: At3g63200.1, by cDNA: gi_15912226 [Arabidopsis thaliana] AT3g63200/F16M2_50 [Arabidopsis thaliana]
  misc_feature (269)..(310): Homolog of NCBI NO: 11357489 NR Description: hypothetical protein F16M2.50 - Arabidopsis >gi|7523402|emb|CAB86421.1| putative protein [Arabidopsis
  misc_feature (269)..(310): Homolog of NCBI NO: 18412659 NR Description: putative protein; protein id: At3g63200.1, by cDNA: gi_15912226 [Arabidopsis thaliana] AT3g63200/F16M2_50 [Arabidopsis thaliana]
  misc_feature (10)..(10): Xaa is any aa, unknown or other
  misc_feature (16)..(16): Xaa is any aa, unknown or other
  misc_feature (63)..(63): Xaa is any aa, unknown or other
MLFSTHSRGXPLFHAXDTWRLVADHAPRMFRRPAASSSTSLFCRGKKRPLAAPTAALEAAMKXAFGQELTLRDTIKPVLISCYDLKTSAPLVFSRADALENGSYDFRLCEVGRAAWSEAGRFEPAEVASVDGATSCAAVDGGPTMGSPAAAAITHVLHNKHEFPFVRGVEDLLVLSIGGCSGGGSGAAGEAELRRMRRWGPKEWARPIARIAADGAADLVDHAVARAFGQCRASNYLRIQAKRESMPPCGTDGEYDPTPGNVRALLAAADEMLKQRNVESVLFEGRRVGEQTNAEKLDWFAAELVAEHRSRASRIAPTVAFKQAPQKP

SEQ ID NO: 7559 - DNA, 1383 bp, Zea mays subsp. mays
  misc_feature (1)..(1383): Ceres Seq. ID no. 12408711
  misc_feature: MA Experiment ID: 108559 Result: Up-regulated in Transcription
  misc_feature: MA Experiment 108559 PARAMETER Experiment Name: Zm_5mM_NO_P Parameter: Age (day) Value: 8
  misc_feature: MA Experiment 108559 PARAMETER Experiment Name: Zm_5mM_NO_P Parameter: Organism Value: Zea mays
  misc_feature: MA Experiment 108559 PARAMETER Experiment Name: Zm_5mM_NO_P Parameter: Plant Line Value: 35A19
  misc_feature: MA Experiment 108559 PARAMETER Experiment Name: Zm_5mM_NO_P Parameter: Timepoint (hr) Value: 12
  misc_feature: MA Experiment 108559 PARAMETER Experiment Name: Zm_5mM_NO_P Parameter: Tissue Value: Aerial
  misc_feature: MA Experiment 108559 PARAMETER Experiment Name: Zm_5mM_NO_P Parameter: Treatment Value: 5mM NO vs. No Treatment
aactttccctgcaagaatggatcgcgagaccaagaacagtagaccaaagacaaaggaaggcgagggccaccatccccaaaacccgtaaaaaaacccgaattgacaaattgagtcgacggggaaggaaataaagaaggggaagagcacgcgccgccgccagcaccgcgtccgccatggccgcctcctcccgccgcgcgtctcaattgctggggtccgcggcctcccgcctcctcctcgggcggggcttcgccgcggcagccgccgcggcgccctcgccggcggtcttcgtcgacaagagcacccgtgtgatctgccagggcatcacggggaagaacggcaccttccacaccgagcaggccatcgagtacggcaccaacatggttggtggagtgactcccaagaaaggtggaactgaacatttagggctcccagtgtttaactctgtagcagaagctaaggctgaaacaaaagccaatgcatctgttatatatgttccaccaccatttgctgccgccgctataatggaggcaatggaggctgagctcgaccttgttgtctgcattacggaaggaattccccagcatgacatggtgaaagtgaaggctgcactaaatagacaatctaaaactcgattgattgggccaaattgccctggtatcattaagcctggtgagtgtaaaattggaatcatgccaggttacatccacaagcctgggcgtattgggattgtatctcgttctggtaccttgacatatgaagcggtgtttcaaacaacagctgtaggcttggggcagtcaacttgtgtaggcattggtggtgacccattcaatggcacaaattttgttgattgccttgaaaaatttgtcgatgaccctcagacagaaggcattgttctcatcggtgaaattggaggtacggctgaggaggatgctgcaacgttcatccaggaaagcaaaacacaaaagcctgttgttgcattcattgctggacttacggcactcccaggccgtcgcatgggtcatgctggagctatcgtggcaggaggaaagggtactgcccaggacaaaatcaaggcactcagagaggctggtgttaccgttgtcgagtcaccagcgaagattggttctaccatgtttgaaatcttcaaacagcgtggaatggtagaatagacacagtggtacagtagagagacattgagaaaccgctttttgatgcttgcgggcaatcgcgagcaattcctcggtagatccttctccctggccacaaacaaaactactgaggttttcttttcgtacttgtcttatctttggaagatgtcctggccttcttcacttggataacctttcgctgagctcatttcaataagacgtttcggagccatgg

SEQ ID NO: 7560 - protein, 331 aa, Zea mays subsp. mays
  peptide (1)..(331): Ceres Seq. ID no. 12408712
  misc_feature (38)..(149): Pfam Name: CoA binding domain Pfam Description: CoA binding domain
  misc_feature (1)..(331): Homolog of NCBI NO: 34393512 NR Description: putative succinyl-CoA ligase alpha subunit [Oryza
  misc_feature (31)..(330): Homolog of NCBI NO: 27357175 NR Description: succinyl-CoA ligase alpha subunit [Lycopersicon
  misc_feature (1)..(331): Homolog of NCBI NO: 15241592 NR Description: succinyl-CoA-ligase alpha subunit; protein id: supported by cDNA: 10292., supported by cDNA: gi_18252214
  misc_feature (19)..(331): Homolog of NCBI NO: 15237260 NR Description: succinyl-CoA synthetase, alpha subunit; protein At5g23250.1, supported by cDNA: 39462., supported by cDNA:
  misc_feature (19)..(331): Homolog of NCBI NO: 21593483 NR Description: succinyl-CoA synthetase, alpha subunit
  misc_feature (37)..(331): Homolog of NCBI NO: 1076415 NR Description: succinate-CoA ligase (GDP-forming) (EC 6.2.1.4)
  misc_feature (20)..(320): Homolog of NCBI NO: 1711574 NR Description: SUCCINYL-COA LIGASE [GDP-FORMING] ALPHA-CHAIN,
  misc_feature (1)..(330): Homolog of NCBI NO: 2258465 NR Description: succinyl-CoA synthetase alpha subunit [Sus scrofa]
  misc_feature (3)..(330): Homolog of NCBI NO: 38181885 NR Description: Suclg1 protein [Rattus norvegicus]
  misc_feature (3)..(330): Homolog of NCBI NO: 16758586 NR Description: succinate-CoA ligase, GDP-forming, alpha subunit
MAASSRRASQLLGSAASRLLLGRGFAAAAAAAPSPAVFVDKSTRVICQGITGKNGTFHTEQAIEYGTNMVGGVTPKKGGTEHLGLPVFNSVAEAKAETKANASVIYVPPPFAAAAIMEAMEAELDLVVCITEGIPQHDMVKVKAALNRQSKTRLIGPNCPGIIKPGECKIGIMPGYIHKPGRIGIVSRSGTLTYEAVFQTTAVGLGQSTCVGIGGDPFNGTNFVDCLEKFVDDPQTEGIVLIGEIGGTAEEDAATFIQESKTQKPVVAFIAGLTALPGRRMGHAGAIVAGGKGTAQDKIKALREAGVTVVESPAKIGSTMFEIFKQRGMVE

SEQ ID NO: 7561 - protein, 263 aa, Zea mays subsp. mays
  peptide (1)..(263): Ceres Seq. ID no. 12408713
  misc_feature (1)..(81): Pfam Name: CoA binding domain Pfam Description: CoA binding domain
  misc_feature (1)..(263): Homolog of NCBI NO: 34393512 NR Description: putative succinyl-CoA ligase alpha subunit [Oryza
  misc_feature (1)..(262): Homolog of NCBI NO: 27357175 NR Description: succinyl-CoA ligase alpha subunit [Lycopersicon
  misc_feature (1)..(263): Homolog of NCBI NO: 15241592 NR Description: succinyl-CoA-ligase alpha subunit; protein id: supported by cDNA: 10292., supported by cDNA: gi_18252214
  misc_feature (1)..(263): Homolog of NCBI NO: 15237260 NR Description: succinyl-CoA synthetase, alpha subunit; protein At5g23250.1, supported by cDNA: 39462., supported by cDNA:
  misc_feature (1)..(263): Homolog of NCBI NO: 21593483 NR Description: succinyl-CoA synthetase, alpha subunit
  misc_feature (1)..(263): Homolog of NCBI NO: 1076415 NR Description: succinate-CoA ligase (GDP-forming) (EC 6.2.1.4)
  misc_feature (1)..(252): Homolog of NCBI NO: 1711574 NR Description: SUCCINYL-COA LIGASE [GDP-FORMING] ALPHA-CHAIN,
  misc_feature (1)..(262): Homolog of NCBI NO: 2258465 NR Description: succinyl-CoA synthetase alpha subunit [Sus scrofa]
  misc_feature (1)..(262): Homolog of NCBI NO: 38181885 NR Description: Suclg1 protein [Rattus norvegicus]
  misc_feature (1)..(262): Homolog of NCBI NO: 16758586 NR Description: succinate-CoA ligase, GDP-forming, alpha subunit
MVGGVTPKKGGTEHLGLPVFNSVAEAKAETKANASVIYVPPPFAAAAIMEAMEAELDLVVCITEGIPQHDMVKVKAALNRQSKTRLIGPNCPGIIKPGECKIGIMPGYIHKPGRIGIVSRSGTLTYEAVFQTTAVGLGQSTCVGIGGDPFNGTNFVDCLEKFVDDPQTEGIVLIGEIGGTAEEDAATFIQESKTQKPVVAFIAGLTALPGRRMGHAGAIVAGGKGTAQDKIKALREAGVTVVESPAKIGSTMFEIFKQRGMVE

SEQ ID NO: 7562 - protein, 215 aa, Zea mays subsp. mays
  peptide (1)..(215): Ceres Seq. ID no. 12408714
  misc_feature (1)..(215): Homolog of NCBI NO: 34393512 NR Description: putative succinyl-CoA ligase alpha subunit [Oryza
  misc_feature (1)..(214): Homolog of NCBI NO: 27357175 NR Description: succinyl-CoA ligase alpha subunit [Lycopersicon
  misc_feature (1)..(215): Homolog of NCBI NO: 15241592 NR Description: succinyl-CoA-ligase alpha subunit; protein id: supported by cDNA: 10292., supported by cDNA: gi_18252214
  misc_feature (1)..(215): Homolog of NCBI NO: 15237260 NR Description: succinyl-CoA synthetase, alpha subunit; protein At5g23250.1, supported by cDNA: 39462., supported by cDNA:
  misc_feature (1)..(215): Homolog of NCBI NO: 21593483 NR Description: succinyl-CoA synthetase, alpha subunit
  misc_feature (1)..(215): Homolog of NCBI NO: 1076415 NR Description: succinate-CoA ligase (GDP-forming) (EC 6.2.1.4)
  misc_feature (1)..(204): Homolog of NCBI NO: 1711574 NR Description: SUCCINYL-COA LIGASE [GDP-FORMING] ALPHA-CHAIN,
  misc_feature (1)..(214): Homolog of NCBI NO: 2258465 NR Description: succinyl-CoA synthetase alpha subunit [Sus scrofa]
  misc_feature (1)..(214): Homolog of NCBI NO: 38181885 NR Description: Suclg1 protein [Rattus norvegicus]
  misc_feature (1)..(214): Homolog of NCBI NO: 16758586 NR Description: succinate-CoA ligase, GDP-forming, alpha subunit
MEAMEAELDLVVCITEGIPQHDMVKVKAALNRQSKTRLIGPNCPGIIKPGECKIGIMPGYIHKPGRIGIVSRSGTLTYEAVFQTTAVGLGQSTCVGIGGDPFNGTNFVDCLEKFVDDPQTEGIVLIGEIGGTAEEDAATFIQESKTQKPVVAFIAGLTALPGRRMGHAGAIVAGGKGTAQDKIKALREAGVTVVESPAKIGSTMFEIFKQRGMVE

SEQ ID NO: 7563 - DNA, 1023 bp, Zea mays subsp. mays
  misc_feature (1)..(1023): Ceres Seq. ID no. 12408705
  misc_feature: MA Experiment ID: 108544 Result: Up-regulated in Transcription
  misc_feature: MA Experiment ID: 20000480 Result: Up-regulated in Transcription
  misc_feature: MA Experiment 20000480 PARAMETER Experiment Name: Zm_Drought_P Parameter: Age (day) Value: 11
  misc_feature: MA Experiment 20000480 PARAMETER Experiment Name: Zm_Drought_P Parameter: Organism Value: Zea mays
  misc_feature: MA Experiment 20000480 PARAMETER Experiment Name: Zm_Drought_P Parameter: Plant Line Value: 35A19
  misc_feature: MA Experiment 20000480 PARAMETER Experiment Name: Zm_Drought_P Parameter: Timepoint (hr) Value: 72
  misc_feature: MA Experiment 20000480 PARAMETER Experiment Name: Zm_Drought_P Parameter: Tissue Value: Aerial
  misc_feature: MA Experiment 20000480 PARAMETER Experiment Name: Zm_Drought_P Parameter: Treatment Value: Drought vs. No Drought
  misc_feature: MA Experiment ID: 20000492 Result: Down-regulated in Transcription
  misc_feature: MA Experiment 20000492 PARAMETER Experiment Name: Zm_Hybrid_Seed_Dev_P Parameter: DAP Value: 12
  misc_feature: MA Experiment 20000492 PARAMETER Experiment Name: Zm_Hybrid_Seed_Dev_P Parameter: Organism Value: Zea mays
  misc_feature: MA Experiment 20000492 PARAMETER Experiment Name: Zm_Hybrid_Seed_Dev_P Parameter: Plant Line Value: 35A19
  misc_feature: MA Experiment 20000492 PARAMETER Experiment Name: Zm_Hybrid_Seed_Dev_P Parameter: Tissue Value: Fert Kernel vs. Unfert Floret
  misc_feature: MA Experiment ID: 20000534 Result: Down-regulated in Transcription
  misc_feature: MA Experiment 20000534 PARAMETER Experiment Name: Zm_Hybrid_Pollen_P Parameter: Age (day) Value: 8
  misc_feature: MA Experiment 20000534 PARAMETER Experiment Name: Zm_Hybrid_Pollen_P Parameter: Organism Value: Zea mays
  misc_feature: MA Experiment 20000534 PARAMETER Experiment Name: Zm_Hybrid_Pollen_P Parameter: Plant Line Value: 35A19
  misc_feature: MA Experiment 20000534 PARAMETER Experiment Name: Zm_Hybrid_Pollen_P Parameter: Tissue Value: Pollen vs. Aerial
agtatacgatgatttgagggtgtgagctgaaaaatctccacatcaccagattacggccggcggcggcccgctctgttccatcgcccccaagcggcgggccttggctgcgccgcctaaatccaccggcgagagtaaagggcgcccctctctcacacgatggcctcgagctccgcaagcggcgccggggtggagggcggggtcggggaggggccgacgacgctggacgagctgtaccagatcaacgtagtgccggccgagctccacttcaagttccgcaaggagctgcagggcctccgcgtcggcctcaacctcgagttctacaatcttgaggtcaatgactttgaggcaaagatagtactgaagcctctagattacgagcggaaatggaagttccagtacaagcccatcagtggcgacatacagctgctttccaagaagataccagtcacaaagtttctaaatctacaggttggcattggccacaattttcaactgaatgcaactggatggaagtggaagctttctacttgcctggggggagatggtgtgtctcagataagaaacaagtcaaaactcagcttgttcccagggtttgatttgaggattgggtggaaagcagagtatgtgcttcctgagattcatggggctgttggcacaggagaaccagccttcagtatgaactatggaaggttgcatgcatcgatagatcgggtcgaggctatcgttactcagtcagatcagtattgatcttccagtgcggaaaggcaagggagtttcttgatcaataacaaacacgttgagtagatcccagggttacaagaagcattctgaagctccgtgcctgatgtacagcaaataccaaagtttaggaccacgctttgagaagctgtttgagttctccaaagcttttgactttgagcggcttctgttgcttctgaaagcgtaactataaataatgtttatcctgcttgtgtacgaaacaccagagtatcagtaattcagtatagtgagcgacgtcaaagc

SEQ ID NO: 7564 - protein, 196 aa, Zea mays subsp. mays
  peptide (1)..(196): Ceres Seq. ID no. 12408706
  misc_feature (1)..(196): Homolog of NCBI NO: 38344551 NR Description: OSJNBa0027P08.19 [Oryza sativa (japonica
  misc_feature (17)..(194): Homolog of NCBI NO: 18396223 NR Description: hypothetical protein; protein id: At2g06010.1, by cDNA: gi_18252842 [Arabidopsis thaliana] unknown protein [Arabidopsis thaliana]
  misc_feature (51)..(163): Homolog of NCBI NO: 25411202 NR Description: hypothetical protein At2g06010 [imported] -
MASSSASGAGVEGGVGEGPTTLDELYQINVVPAELHFKFRKELQGLRVGLNLEFYNLEVNDFEAKIVLKPLDYERKWKFQYKPISGDIQLLSKKIPVTKFLNLQVGIGHNFQLNATGWKWKLSTCLGGDGVSQIRNKSKLSLFPGFDLRIGWKAEYVLPEIHGAVGTGEPAFSMNYGRLHASIDRVEAIVTQSDQY

SEQ ID NO: 7565 - DNA, 1200 bp, Zea mays subsp. mays
  misc_feature (1)..(1200): Ceres Seq. ID no. 12373524
  misc_feature: MA Experiment ID: 20000478 Result: Down-regulated in Transcription
  misc_feature: MA Experiment 20000478 PARAMETER Experiment Name: Zm_5mM_SA_P Parameter: Age (day) Value: 11
  misc_feature: MA Experiment 20000478 PARAMETER Experiment Name: Zm_5mM_SA_P Parameter: Organism Value: Zea mays
  misc_feature: MA Experiment 20000478 PARAMETER Experiment Name: Zm_5mM_SA_P Parameter: Plant Line Value: 35A19
  misc_feature: MA Experiment 20000478 PARAMETER Experiment Name: Zm_5mM_SA_P Parameter: Timepoint (hr) Value: 72
  misc_feature: MA Experiment 20000478 PARAMETER Experiment Name: Zm_5mM_SA_P Parameter: Tissue Value: Aerial
  misc_feature: MA Experiment 20000478 PARAMETER Experiment Name: Zm_5mM_SA_P Parameter: Treatment Value: 5mM SA vs. No Treatment
atcgctggaccatttccccatttccattcccatcccaattcccatccgtttcatttccacctccttttccagtttcgactcgattcgaaacaggataccaaatgcatgatcgatcccacaagccgcagccggcggaggccggcaacggcgggccggctggcgagggcggcggcgggaacgtggatcgggtgctcttcaagaacctcgtcgagatggtgccgctcgtcgagtcgctcatggaccggagggtcaacccggcatactcgcgtcgcgcttcgctggtctacacgccggcgccgcccaagaaggcaagcgatttgaaaagtgtcaaattgccacagagcgtatcagccaaaaagcggagagaccctggtgatatagccaagaagagcaccccagattctaacggcgacaacggttcagttgtgccattatctctgtcaggtgctgaaaatatgcccaaggatgaggttgccgtgctaagcgagcagatcaatgacctacaaaagaagctgcttgagaaggaggaggcactgaggtctgcggagagctctgtgactgagatgaatgcagcatatgcaactatcgatgaactcagacgcctggtggctgacaaagaagctttgatcagatctaccaattctcagttgcatgatgcaaagattatgcttgcagacaagcaagcgtctttagagaaacttgaatgggaggtgaagatgtcaaataaaaaggtcgaagatcttcaaggagatatgtcgaatatgggattcgagataagctcattgatggtatttttcgaaaaaatttcagagaatgtttcaggtgactcttatgatgatataataccatcatcatatgaattagagacacttcaatcaatgagtgaaattgacaagattgaggtcgacaagctagacaaggaaagggttacatatgctgaagctctggcggcagcgagagagaaccctgacgaggagcacttgaatatagctgcggaggcgaggtcaaggctgcaggtccttgtactttagtgtccccttctgattatagcgtttgtatgataatgttgaactgctgatgtaattgtatgtgttggcttgagttgaggtgctcgtggaatccttccggtgattgattcagcactgtaaactgacagctgtttcatgttgtaaccatatttaaggcgtgtttgatttctcc

SEQ ID NO: 7566 - protein, 342 aa, Zea mays subsp. mays
  peptide (1)..(342): Ceres Seq. ID no. 12373525
  misc_feature (162)..(330): Pfam Name: Tropomyosin Pfam Description: Tropomyosin
  misc_feature (59)..(342): Homolog of NCBI NO: 19716176 NR Description: TMV-MP30 binding protein 2C [Nicotiana tabacum]
  misc_feature (52)..(340): Homolog of NCBI NO: 15241531 NR Description: myosin heavy chain-like protein; protein id: supported by cDNA: gi_13877922, supported by cDNA: gi_1732514
  misc_feature (145)..(340): Homolog of NCBI NO: 1732515 NR Description: myosin heavy chain-like protein [Arabidopsis
RWTISPFPFPSQFPSVSFPPPFPVSTRFETGYQMHDRSHKPQPAEAGNGGPAGEGGGGNVDRVLFKNLVEMVPLVESLMDRRVNPAYSRRASLVYTPAPPKKASDLKSVKLPQSVSAKKRRDPGDIAKKSTPDSNGDNGSVVPLSLSGAENMPKDEVAVLSEQINDLQKKLLEKEEALRSAESSVTEMNAAYATIDELRRLVADKEALIRSTNSQLHDAKIMLADKQASLEKLEWEVKMSNKKVEDLQGDMSNMGFEISSLMVFFEKISENVSGDSYDDIIPSSYELETLQSMSEIDKIEVDKLDKERVTYAEALAAARENPDEEHLNIAAEARSRLQVLVL

SEQ ID NO: 7567 - protein, 309 aa, Zea mays subsp. mays
  peptide (1)..(309): Ceres Seq. ID no. 12373526
  misc_feature (129)..(297): Pfam Name: Tropomyosin Pfam Description: Tropomyosin
  misc_feature (26)..(309): Homolog of NCBI NO: 19716176 NR Description: TMV-MP30 binding protein 2C [Nicotiana tabacum]
  misc_feature (19)..(307): Homolog of NCBI NO: 15241531 NR Description: myosin heavy chain-like protein; protein id: supported by cDNA: gi_13877922, supported by cDNA: gi_1732514
  misc_feature (112)..(307): Homolog of NCBI NO: 1732515 NR Description: myosin heavy chain-like protein [Arabidopsis
MHDRSHKPQPAEAGNGGPAGEGGGGNVDRVLFKNLVEMVPLVESLMDRRVNPAYSRRASLVYTPAPPKKASDLKSVKLPQSVSAKKRRDPGDIAKKSTPDSNGDNGSVVPLSLSGAENMPKDEVAVLSEQINDLQKKLLEKEEALRSAESSVTEMNAAYATIDELRRLVADKEALIRSTNSQLHDAKIMLADKQASLEKLEWEVKMSNKKVEDLQGDMSNMGFEISSLMVFFEKISENVSGDSYDDIIPSSYELETLQSMSEIDKIEVDKLDKERVTYAEALAAARENPDEEHLNIAAEARSRLQVLVL

SEQ ID NO: 7568 - protein, 272 aa, Zea mays subsp. mays
  peptide (1)..(272): Ceres Seq. ID no. 12373527
  misc_feature (92)..(260): Pfam Name: Tropomyosin Pfam Description: Tropomyosin
  misc_feature (1)..(272): Homolog of NCBI NO: 19716176 NR Description: TMV-MP30 binding protein 2C [Nicotiana tabacum]
  misc_feature (1)..(270): Homolog of NCBI NO: 15241531 NR Description: myosin heavy chain-like protein; protein id: supported by cDNA: gi_13877922, supported by cDNA: gi_1732514
  misc_feature (75)..(270): Homolog of NCBI NO: 1732515 NR Description: myosin heavy chain-like protein [Arabidopsis
MVPLVESLMDRRVNPAYSRRASLVYTPAPPKKASDLKSVKLPQSVSAKKRRDPGDIAKKSTPDSNGDNGSVVPLSLSGAENMPKDEVAVLSEQINDLQKKLLEKEEALRSAESSVTEMNAAYATIDELRRLVADKEALIRSTNSQLHDAKIMLADKQASLEKLEWEVKMSNKKVEDLQGDMSNMGFEISSLMVFFEKISENVSGDSYDDIIPSSYELETLQSMSEIDKIEVDKLDKERVTYAEALAAARENPDEEHLNIAAEARSRLQVLVL

SEQ ID NO: 7569 - DNA, 1304 bp, Zea mays subsp. mays
  misc_feature (1)..(1304): Ceres Seq. ID no. 12372716
  misc_feature: MA Experiment ID: 108535 Result: Up-regulated in Transcription
  misc_feature: MA Experiment 108535 PARAMETER Experiment Name: Zm_Meristem_P Parameter: Age (day) Value: 8
  misc_feature: MA Experiment 108535 PARAMETER Experiment Name: Zm_Meristem_P Parameter: Organism Value: Zea mays
  misc_feature: MA Experiment 108535 PARAMETER Experiment Name: Zm_Meristem_P Parameter: Plant Line Value: 35A19
  misc_feature: MA Experiment 108535 PARAMETER Experiment Name: Zm_Meristem_P Parameter: Tissue Value: Root Meristem vs. Above Root Meristem
  misc_feature: MA Experiment ID: 108544 Result: Down-regulated in Transcription
  misc_feature: MA Experiment ID: 20000487 Result: Up-regulated in Transcription
  misc_feature: MA Experiment 20000487 PARAMETER Experiment Name: Zm_50mM_NH4NO3_L_to_H_P Parameter: Organism Value: Zea mays
  misc_feature: MA Experiment 20000487 PARAMETER Experiment Name: Zm_50mM_NH4NO3_L_to_H_P Parameter: Timepoint (hr) Value: 4
  misc_feature: MA Experiment 20000487 PARAMETER Experiment Name: Zm_50mM_NH4NO3_L_to_H_P Parameter: Tissue Value: Leaves
  misc_feature: MA Experiment 20000487 PARAMETER Experiment Name: Zm_50mM_NH4NO3_L_to_H_P Parameter: Treatment Value: 50mM NH4NO3 vs. 100mM Mannitol
  misc_feature: MA Experiment ID: 20000488 Result: Up-regulated in Transcription
  misc_feature: MA Experiment 20000488 PARAMETER Experiment Name: Zm_50mM_NH4NO3_L_to_H_P Parameter: Organism Value: Zea mays
  misc_feature: MA Experiment 20000488 PARAMETER Experiment Name: Zm_50mM_NH4NO3_L_to_H_P Parameter: Timepoint (hr) Value: 8
  misc_feature: MA Experiment 20000488 PARAMETER Experiment Name: Zm_50mM_NH4NO3_L_to_H_P Parameter: Tissue Value: Leaves
  misc_feature: MA Experiment 20000488 PARAMETER Experiment Name: Zm_50mM_NH4NO3_L_to_H_P Parameter: Treatment Value: 50mM NH4NO3 vs. 100mM Mannitol
  misc_feature: MA Experiment ID: 20000492 Result: Up-regulated in Transcription
  misc_feature: MA Experiment 20000492 PARAMETER Experiment Name: Zm_Hybrid_Seed_Dev_P Parameter: DAP Value: 12
  misc_feature: MA Experiment 20000492 PARAMETER Experiment Name: Zm_Hybrid_Seed_Dev_P Parameter: Organism Value: Zea mays
  misc_feature: MA Experiment 20000492 PARAMETER Experiment Name: Zm_Hybrid_Seed_Dev_P Parameter: Plant Line Value: 35A19
  misc_feature: MA Experiment 20000492 PARAMETER Experiment Name: Zm_Hybrid_Seed_Dev_P Parameter: Tissue Value: Fert Kernel vs. Unfert Floret
  misc_feature: MA Experiment ID: 20000534 Result: Down-regulated in Transcription
  misc_feature: MA Experiment 20000534 PARAMETER Experiment Name: Zm_Hybrid_Pollen_P Parameter: Age (day) Value: 8
  misc_feature: MA Experiment 20000534 PARAMETER Experiment Name: Zm_Hybrid_Pollen_P Parameter: Organism Value: Zea mays
  misc_feature: MA Experiment 20000534 PARAMETER Experiment Name: Zm_Hybrid_Pollen_P Parameter: Plant Line Value: 35A19
  misc_feature: MA Experiment 20000534 PARAMETER Experiment Name: Zm_Hybrid_Pollen_P Parameter: Tissue Value: Pollen vs. Aerial
gcacgagaccattacctagaacatcctaatcaaaaaaggccacaagcgcccgagcggcttaaaccctagctcgccgtcgtgctcggctcgccaccccgcgcctgctcctttcaggccctaaccgttcgccgccgcgcattcgagcacacgcggaagcgcacctagtgccatggcgaagaagcggaagcgcaccgacgcgcccgcagaggcggccggcgcagagaagcctgacgactccgcgccggcgcgcccggagcgcacgctcttcggcttcaaggacctggtccccgacgccgagcccgcctccgcgggcgccgaggccgcggtggcgccgttccggaacagggagaaggtactcatcacctgctcccgccgaatcacgtataggtatcggcacctgatgcaggacgtgctgtcgctgctcccgcatgcgaagaaggacagcaaggtcgagtcgaagcagagcaaggggaacgcgctgaacgagctccttgagctcaggagctgctccagctgccttttcttcgagtgcagaaaacagaaggatctttacctttggatggtgaagtctcctggaggaccatcagtaaaatttctagttaatgctgttcacaccatggaggagttgaagcttaccggtaaccatctgaaagggtcacgcccacttcttacattttctacaaattttgatgagcaacctcattggaagcttgtgaaggaaatgataactcagatatttgctactcctaaagatcaccgtaaagcaaaacctttccatgaccatgtgtttgtcttctccattgtggatggccatgtttggtttcgaaactaccagatttcggttccccacaatgagattgataaagttgataaaggtggtctggataaaatgacacttattgaggttggccccaggttctgtttgaatccaatcaaaatatttggtggtagttttggtggtcctacatgggtatgagaacccatactacatttcccccaatcagatccgtgcactagagaagaggcagaaggcaggcaaatatgccaagaaggtgaaggccaaggtgaggcggaagatgcacgagatggagaacacgctggagcctgatgagtttgctgagctctggaaaggggagtaactggtctttgatcgaccctgtcaaagtcgtgaagcaccagcaactccttccacttccaccaagcgcaggtcttgtttaccattgtggcagtgccgactgtcgaggttgtggaagttttgtatcacaaagcatacttttatttatataaaatcggattttagtgat

SEQ ID NO: 7570 - protein, 268 aa, Zea mays subsp. mays
  peptide (1)..(268): Ceres Seq. ID no. 12372717
  misc_feature (1)..(268): Homolog of NCBI NO: 18400776 NR Description: expressed protein; protein id: At3g15460.1, by cDNA: 2356., supported by cDNA: gi_16648688 [Arabidopsis
  misc_feature (1)..(268): Homolog of NCBI NO: 16648689 NR Description: AT3g15460/MJK13_12 [Arabidopsis thaliana]
  misc_feature (1)..(268): Homolog of NCBI NO: 18404250 NR Description: expressed protein; protein id: At1g52930.1, by cDNA: gi_13878054, supported by cDNA: gi_17104646 [Arabidopsis
  misc_feature (2)..(268): Homolog of NCBI NO: 30580352 NR Description: Ribosome biogenesis protein Brix
  misc_feature (53)..(265): Homolog of NCBI NO: 6324496 NR Description: Essential nucleolar protein required for of the 60S ribosomal subunit; Brx1p [Saccharomyces cerevisiae]
  misc_feature (2)..(268): Homolog of NCBI NO: 30580353 NR Description: Ribosome biogenesis protein Brix (Bx24)
  misc_feature (1)..(268): Homolog of NCBI NO: 33604118 NR Description: Unknown (protein for IMAGE:6789379) [Danio rerio]
  misc_feature (23)..(268): Homolog of NCBI NO: 27370947 NR Description: Similar to BRIX [Xenopus laevis]
  misc_feature (3)..(268): Homolog of NCBI NO: 19311012 NR Description: BRIX [Homo sapiens]
  misc_feature (90)..(268): Homolog of NCBI NO: 34854362 NR Description: similar to BRIX [Rattus norvegicus]
MAKKRKRTDAPAEAAGAEKPDDSAPARPERTLFGFKDLVPDAEPASAGAEAAVAPFRNREKVLITCSRRITYRYRHLMQDVLSLLPHAKKDSKVESKQSKGNALNELLELRSCSSCLFFECRKQKDLYLWMVKSPGGPSVKFLVNAVHTMEELKLTGNHLKGSRPLLTFSTNFDEQPHWKLVKEMITQIFATPKDHRKAKPFHDHVFVFSIVDGHVWFRNYQISVPHNEIDKVDKGGLDKMTLIEVGPRFCLNPIKIFGGSFGGPTWV

SEQ ID NO: 7571 - protein, 191 aa, Zea mays subsp. mays
  peptide (1)..(191): Ceres Seq. ID no. 12372718
  misc_feature (1)..(191): Homolog of NCBI NO: 18400776 NR Description: expressed protein; protein id: At3g15460.1, by cDNA: 2356., supported by cDNA: gi_16648688 [Arabidopsis
  misc_feature (1)..(191): Homolog of NCBI NO: 16648689 NR Description: AT3g15460/MJK13_12 [Arabidopsis thaliana]
  misc_feature (1)..(191): Homolog of NCBI NO: 18404250 NR Description: expressed protein; protein id: At1g52930.1, by cDNA: gi_13878054, supported by cDNA: gi_17104646 [Arabidopsis
  misc_feature (1)..(191): Homolog of NCBI NO: 30580352 NR Description: Ribosome biogenesis protein Brix
  misc_feature (1)..(188): Homolog of NCBI NO: 6324496 NR Description: Essential nucleolar protein required for of the 60S ribosomal subunit; Brx1p [Saccharomyces cerevisiae]
  misc_feature (1)..(191): Homolog of NCBI NO: 30580353 NR Description: Ribosome biogenesis protein Brix (Bx24)
  misc_feature (1)..(191): Homolog of NCBI NO: 33604118 NR Description: Unknown (protein for IMAGE:6789379) [Danio rerio]
  misc_feature (1)..(191): Homolog of NCBI NO: 27370947 NR Description: Similar to BRIX [Xenopus laevis]
  misc_feature (1)..(191): Homolog of NCBI NO: 19311012 NR Description: BRIX [Homo sapiens]
  misc_feature (13)..(191): Homolog of NCBI NO: 34854362 NR Description: similar to BRIX [Rattus norvegicus]
MQDVLSLLPHAKKDSKVESKQSKGNALNELLELRSCSSCLFFECRKQKDLYLWMVKSPGGPSVKFLVNAVHTMEELKLTGNHLKGSRPLLTFSTNFDEQPHWKLVKEMITQIFATPKDHRKAKPFHDHVFVFSIVDGHVWFRNYQISVPHNEIDKVDKGGLDKMTLIEVGPRFCLNPIKIFGGSFGGPTWV

SEQ ID NO: 7572 - protein, 138 aa, Zea mays subsp. mays
  peptide (1)..(138): Ceres Seq. ID no. 12372719
  misc_feature (1)..(138): Homolog of NCBI NO: 18404250 NR Description: expressed protein; protein id: At1g52930.1, by cDNA: gi_13878054, supported by cDNA: gi_17104646 [Arabidopsis
  misc_feature (1)..(138): Homolog of NCBI NO: 30580352 NR Description: Ribosome biogenesis protein Brix
  misc_feature (1)..(135): Homolog of NCBI NO: 6324496 NR Description: Essential nucleolar protein required for of the 60S ribosomal subunit; Brx1p [Saccharomyces cerevisiae]
  misc_feature (1)..(138): Homolog of NCBI NO: 30580353 NR Description: Ribosome biogenesis protein Brix (Bx24)
  misc_feature (1)..(138): Homolog of NCBI NO: 33604118 NR Description: Unknown (protein for IMAGE:6789379) [Danio rerio]
  misc_feature (1)..(138): Homolog of NCBI NO: 27370947 NR Description: Similar to BRIX [Xenopus laevis]
  misc_feature (1)..(138): Homolog of NCBI NO: 19311012 NR Description: BRIX [Homo sapiens]
  misc_feature (1)..(138): Homolog of NCBI NO: 34854362 NR Description: similar to BRIX [Rattus norvegicus]
  misc_feature (1)..(138): Homolog of NCBI NO: 18400776 NR Description: expressed protein; protein id: At3g15460.1, by cDNA: 2356., supported by cDNA: gi_16648688 [Arabidopsis
  misc_feature (1)..(138): Homolog of NCBI NO: 16648689 NR Description: AT3g15460/MJK13_12 [Arabidopsis thaliana]
MVKSPGGPSVKFLVNAVHTMEELKLTGNHLKGSRPLLTFSTNFDEQPHWKLVKEMITQIFATPKDHRKAKPFHDHVFVFSIVDGHVWFRNYQISVPHNEIDKVDKGGLDKMTLIEVGPRFCLNPIKIFGGSFGGPTWV

SEQ ID NO: 7573 - DNA, 1919 bp, Zea mays subsp. mays; identical to SEQ ID NO: 4314
  misc_feature (1)..(1919): Ceres Seq. ID no. 12406508
  misc_feature: MA Experiment ID: 20000535 Result: Down-regulated in Transcription
  misc_feature: MA Experiment 20000535 PARAMETER Experiment Name: Zm_Hybrid_Seed_Dev_P Parameter: DAP Value: 30 vs. 12
  misc_feature: MA Experiment 20000535 PARAMETER Experiment Name: Zm_Hybrid_Seed_Dev_P Parameter: Organism Value: Zea mays
  misc_feature: MA Experiment 20000535 PARAMETER Experiment Name: Zm_Hybrid_Seed_Dev_P Parameter: Plant Line Value: 35A19
  misc_feature: MA Experiment 20000535 PARAMETER Experiment Name: Zm_Hybrid_Seed_Dev_P Parameter: Tissue Value: Embryo vs. Unfert Floret
  misc_feature: MA Experiment ID: 20000626 Result: Up-regulated in Transcription
  misc_feature: MA Experiment 20000626 PARAMETER Experiment Name: Zm_Herbicide-Treatments_P Parameter: Timepoint (hr) Value: 12
  misc_feature: MA Experiment 20000626 PARAMETER Experiment Name: Zm_Herbicide-Treatments_P Parameter: Tissue Value: Aerial
  misc_feature: MA Experiment 20000626 PARAMETER Experiment Name: Zm_Herbicide-Treatments_P Parameter: Treatment Value: Roundup vs. No Treatment

SEQ ID NO: 7574 - protein, 460 aa, Zea mays subsp. mays; identical to SEQ ID NO: 4315
  peptide (1)..(460): Ceres Seq. ID no. 12406509
  misc_feature (18)..(442): Homolog of NCBI NO: 34895168 NR Description: putative cytochrome P450 [Oryza sativa (japonica group)] >gi|21104826|dbj|BAB93411.1| putative cytochrome P450
  misc_feature (33)..(442): Homolog of NCBI NO: 34913354 NR Description: putative cytochrome P450 [Oryza sativa (japonica group)] >gi|22293694|dbj|BAC10039.1| putative cytochrome P450
  misc_feature (20)..(442): Homolog of NCBI NO: 38112707 NR Description: cytochrome P450 [Triticum aestivum]
  misc_feature (20)..(442): Homolog of NCBI NO: 22324446 NR Description: putative cytochrome P450 [Oryza sativa (japonica
  misc_feature (29)..(442): Homolog of NCBI NO: 34913346 NR Description: putative cytochrome P450 [Oryza sativa (japonica group)] >gi|22093840|dbj|BAC07127.1| putative cytochrome P450
  misc_feature (23)..(442): Homolog of NCBI NO: 34913362 NR Description: putative cytochrome P450 [Oryza sativa (japonica group)] >gi|22293698|dbj|BAC10043.1| putative cytochrome P450
  misc_feature (20)..(434): Homolog of NCBI NO: 34896952 NR Description: putative cytochrome P450-related protein [Oryza
  misc_feature (21)..(442): Homolog of NCBI NO: 14719280 NR Description: cytochrome P450 [Zea mays]
  misc_feature (19)..(434): Homolog of NCBI NO: 15226472 NR Description: cytochrome p450, putative; protein id: [Arabidopsis thaliana] >gi|7430708|pir||T02192 probable
  misc_feature (20)..(434): Homolog of NCBI NO: 15234248 NR Description: cytochrome P450 - like protein; protein id: [Arabidopsis thaliana] >gi|7484900|pir||T05876 cytochrome P450

SEQ ID NO: 7575 - protein, 371 aa, Zea mays subsp. mays; identical to SEQ ID NO: 4316
  peptide (1)..(371): Ceres Seq. ID no. 12406510
  misc_feature (1)..(353): Homolog of NCBI NO: 34895168 NR Description: putative cytochrome P450 [Oryza sativa (japonica group)] >gi|21104826|dbj|BAB93411.1| putative cytochrome P450
  misc_feature (1)..(353): Homolog of NCBI NO: 34913354 NR Description: putative cytochrome P450 [Oryza sativa (japonica group)] >gi|22293694|dbj|BAC10039.1| putative cytochrome P450
  misc_feature (1)..(353): Homolog of NCBI NO: 38112707 NR Description: cytochrome P450 [Triticum aestivum]
  misc_feature (1)..(353): Homolog of NCBI NO: 22324446 NR Description: putative cytochrome P450 [Oryza sativa (japonica
  misc_feature (1)..(353): Homolog of NCBI NO: 34913346 NR Description: putative cytochrome P450 [Oryza sativa (japonica group)] >gi|22093840|dbj|BAC07127.1| putative cytochrome P450
  misc_feature (1)..(353): Homolog of NCBI NO: 34913362 NR Description: putative cytochrome P450 [Oryza sativa (japonica group)] >gi|22293698|dbj|BAC10043.1| putative cytochrome P450
  misc_feature (1)..(345): Homolog of NCBI NO: 34896952 NR Description: putative cytochrome P450-related protein [Oryza
  misc_feature (1)..(353): Homolog of NCBI NO: 14719280 NR Description: cytochrome P450 [Zea mays]
  misc_feature (1)..(345): Homolog of NCBI NO: 15226472 NR Description: cytochrome p450, putative; protein id: [Arabidopsis thaliana] >gi|7430708|pir||T02192 probable
  misc_feature (1)..(345): Homolog of NCBI NO: 15234248 NR Description: cytochrome P450 - like protein; protein id: [Arabidopsis thaliana] >gi|7484900|pir||T05876 cytochrome P450

SEQ ID NO: 7576 - protein, 319 aa, Zea mays subsp. mays; identical to SEQ ID NO: 4317
  peptide (1)..(319): Ceres Seq. ID no. 12406511
  misc_feature (1)..(301): Homolog of NCBI NO: 34895168 NR Description: putative cytochrome P450 [Oryza sativa (japonica group)] >gi|21104826|dbj|BAB93411.1| putative cytochrome P450
  misc_feature (1)..(301): Homolog of NCBI NO: 34913354 NR Description: putative cytochrome P450 [Oryza sativa (japonica group)] >gi|22293694|dbj|BAC10039.1| putative cytochrome P450
  misc_feature (1)..(301): Homolog of NCBI NO: 38112707 NR Description: cytochrome P450 [Triticum aestivum]
  misc_feature (1)..(301): Homolog of NCBI NO: 22324446 NR Description: putative cytochrome P450 [Oryza sativa (japonica
  misc_feature (1)..(301): Homolog of NCBI NO: 34913346 NR Description: putative cytochrome P450 [Oryza sativa (japonica group)] >gi|22093840|dbj|BAC07127.1| putative cytochrome P450
  misc_feature (1)..(301): Homolog of NCBI NO: 34913362 NR Description: putative cytochrome P450 [Oryza sativa (japonica group)] >gi|22293698|dbj|BAC10043.1| putative cytochrome P450
  misc_feature (1)..(293): Homolog of NCBI NO: 34896952 NR Description: putative cytochrome P450-related protein [Oryza
  misc_feature (1)..(301): Homolog of NCBI NO: 14719280 NR Description: cytochrome P450 [Zea mays]
  misc_feature (1)..(293): Homolog of NCBI NO: 15226472 NR Description: cytochrome p450, putative; protein id: [Arabidopsis thaliana] >gi|7430708|pir||T02192 probable
  misc_feature (1)..(293): Homolog of NCBI NO: 15234248 NR Description: cytochrome P450 - like protein; protein id: [Arabidopsis thaliana] >gi|7484900|pir||T05876 cytochrome P450

SEQ ID NO: 7577 - DNA, 1506 bp, Zea mays subsp. mays
  misc_feature (1)..(1506): Ceres Seq. ID no. 12406215
  misc_feature: MA Experiment ID: 20000492 Result: Down-regulated in Transcription
  misc_feature: MA Experiment 20000492 PARAMETER Experiment Name: Zm_Hybrid_Seed_Dev_P Parameter: DAP Value: 12
  misc_feature: MA Experiment 20000492 PARAMETER Experiment Name: Zm_Hybrid_Seed_Dev_P Parameter: Organism Value: Zea mays
  misc_feature: MA Experiment 20000492 PARAMETER Experiment Name: Zm_Hybrid_Seed_Dev_P Parameter: Plant Line Value: 35A19
  misc_feature: MA Experiment 20000492 PARAMETER Experiment Name: Zm_Hybrid_Seed_Dev_P Parameter: Tissue Value: Fert Kernel vs. Unfert Floret
  misc_feature: MA Experiment ID: 20000535 Result: Down-regulated in Transcription
  misc_feature: MA Experiment 20000535 PARAMETER Experiment Name: Zm_Hybrid_Seed_Dev_P Parameter: DAP Value: 30 vs. 12
  misc_feature: MA Experiment 20000535 PARAMETER Experiment Name: Zm_Hybrid_Seed_Dev_P Parameter: Organism Value: Zea mays
  misc_feature: MA Experiment 20000535 PARAMETER Experiment Name: Zm_Hybrid_Seed_Dev_P Parameter: Plant Line Value: 35A19
  misc_feature: MA Experiment 20000535 PARAMETER Experiment Name: Zm_Hybrid_Seed_Dev_P Parameter: Tissue Value: Embryo vs. Unfert Floret
ctctttctccttcctcctccttcctctcgctcgctcccctcccttccccgctcctcctcctcctcctcctcctccctttcattcctacctccgctcgcgccactctcctccgaccgaggggcagggaccggtgcccgtccgcccgccatggtctcctggcggcgcagcgcgtcctggctgtcgtcggcgtcgcgctcctcgctcggcgccgccgtcggcggggaggccaaggtcacgccgnagncggatccgncggcgcagcacgacgagcccgacgaggagcgctggtcgcgcctgctgccggagctgctcacggagatcatgcgccgcgtggacgccggcgccgagcgctggccgccgcgccgggacgtcgtggtctgcgcctgcgtgtgccgccggtggcgcgacgccgctgtctcggtcgtgcgcccgccgctcgagtgcggcaggatcaccttcccgtcgtcgctcaagcagcctggaccaagggatgcgccgatgcactgttttatccggagggacaaaaaaaattcaaccttttctctctatctcagcttaacgcaggccctaacggataaagggaagtttcttttggctgctcgaaggttcagacaaggagcacatacagaatatatcatctcttatgactacgatgatctgcacccaagaagcagttcatatgttggaaagttgagatctgacttcttggggacaaagttcatcatctatgatagccaggcgccatatgacggtgccaaaccttcgaggacccgatccactcgccgctttgcaagcaagcagataagcccacaggtttcaggcggcaatttcgaagttggacaagtgacctacaggttcaacttcatgaaatcaagagggccgagacggatgcagtgcaatatccagtgccctgtaggccagggcagcgcttcggatccatccaaggagaaaacaccctcgccgagttccttggacctaaagaacaaggctccaagatggcacgaccatcttcagtgttggtgcttaaatttccacggccgggtgaccgtcgcctccgtgaagaacttccagctcgtcgccacagctggctccggcggtccatggggcgtcggagacgaggagacggtgatcctgcagttcgggaagatcgaggacgatgcgtttacgatggactaccggcagcctctgtccgccttccaggcgttcgccatctgcctcaccagctttggcacgaagctggcctgtgaataaatggttgccggtttacccaactatgttggggatcagattgtagggggtagtctgaactagttgccctgagcacctcagatgggagaaaactggcgataagaaacagggcggacgttgtccctataagctttgactccttgtaatcgcctaaatgattgatttatatatatatgatgtgcgcctatgttgttgaagagatgacgatgacttatcgttgtaaatgccattcccttccgtttggtgacattccattct

SEQ ID NO: 7578 - protein, 416 aa, Zea mays subsp. mays
  peptide (1)..(416): Ceres Seq. ID no. 12406216
  misc_feature (160)..(416): Pfam Name: Tub family Pfam Description: Tub family
  misc_feature (160)..(416): Homolog of NCBI NO: 34911070 NR Description: putative tubby-like protein [Oryza sativa
  misc_feature (73)..(159): Homolog of NCBI NO: 34911070 NR Description: putative tubby-like protein [Oryza sativa
  misc_feature (50)..(414): Homolog of NCBI NO: 34909710 NR Description: putative Tub family protein [Oryza sativa
  misc_feature (96)..(416): Homolog of NCBI NO: 18404413 NR Description: F-box containing tubby family protein; protein At1g53320.1, supported by cDNA: gi_13877766, supported by cDNA: [Arabidopsis thaliana] >gi|13877767|gb|AAK43961.1|AF370146_1
  misc_feature (232)..(416): Homolog of NCBI NO: 7769867 NR Description: F12M16.22 [Arabidopsis thaliana]
  misc_feature (96)..(243): Homolog of NCBI NO: 7769867 NR Description: F12M16.22 [Arabidopsis thaliana]
  misc_feature (93)..(319): Homolog of NCBI NO: 34899264 NR Description: contains ESTs
  misc_feature (318)..(416): Homolog of NCBI NO: 34899264 NR Description: contains ESTs
  misc_feature (93)..(299): Homolog of NCBI NO: 5777631 NR Description: CAA303719.1 protein [Oryza sativa]
  misc_feature (307)..(362): Homolog of NCBI NO: 5777631 NR Description: CAA303719.1 protein [Oryza sativa]
  misc_feature (81)..(81): Xaa is any aa, unknown or other
  misc_feature (82)..(82): Xaa is any aa, unknown or other
  misc_feature (85)..(85): Xaa is any aa, unknown or other
LFLLPPPSSRSLPSLPRSSSSSSSSLSFLPPLAPLSSDRGAGTGARPPAMVSWRRSASWLSSASRSSLGAAVGGEAKVTPXXDPXAQHDEPDEERWSRLLPELLTEIMRRVDAGAERWPPRRDVVVCACVCRRWRDAAVSVVRPPLECGRITFPSSLKQPGPRDAPMHCFIRRDKKNSTFSLYLSLTQALTDKGKFLLAARRFRQGAHTEYIISYDYDDLHPRSSSYVGKLRSDFLGTKFIIYDSQAPYDGAKPSRTRSTRRFASKQISPQVSGGNFEVGQVTYRFNFMKSRGPRRMQCNIQCPVGQGSASDPSKEKTPSPSSLDLKNKAPRWHDHLQCWCLNFHGRVTVASVKNFQLVATAGSGGPWGVGDEETVILQFGKIEDDAFTMDYRQPLSAFQAFAICLTSFGTKLACE

SEQ ID NO: 7579 - protein, 367 aa, Zea mays subsp. mays
  peptide (1)..(367): Ceres Seq. ID no. 12406217
  misc_feature (111)..(367): Pfam Name: Tub family Pfam Description: Tub family
  misc_feature (111)..(367): Homolog of NCBI NO: 34911070 NR Description: putative tubby-like protein [Oryza sativa
  misc_feature (24)..(110): Homolog of NCBI NO: 34911070 NR Description: putative tubby-like protein [Oryza sativa
  misc_feature (1)..(365): Homolog of NCBI NO: 34909710 NR Description: putative Tub family protein [Oryza sativa
  misc_feature (47)..(367): Homolog of NCBI NO: 18404413 NR Description: F-box containing tubby family protein; protein At1g53320.1, supported by cDNA: gi_13877766, supported by cDNA: [Arabidopsis thaliana] >gi|13877767|gb|AAK43961.1|AF370146_1
  misc_feature (183)..(367): Homolog of NCBI NO: 7769867 NR Description: F12M16.22 [Arabidopsis thaliana]
  misc_feature (47)..(194): Homolog of NCBI NO: 7769867 NR Description: F12M16.22 [Arabidopsis thaliana]
  misc_feature (44)..(270): Homolog of NCBI NO: 34899264 NR Description: contains ESTs
  misc_feature (269)..(367): Homolog of NCBI NO: 34899264 NR Description: contains ESTs
  misc_feature (44)..(250): Homolog of NCBI NO: 5777631 NR Description: CAA303719.1 protein [Oryza sativa]
  misc_feature (258)..(313): Homolog of NCBI NO: 5777631 NR Description: CAA303719.1 protein [Oryza sativa]
  misc_feature (32)..(32): Xaa is any aa, unknown or other
  misc_feature (33)..(33): Xaa is any aa, unknown or other
  misc_feature (36)..(36): Xaa is any aa, unknown or other
MVSWRRSASWLSSASRSSLGAAVGGEAKVTPXXDPXAQHDEPDEERWSRLLPELLTEIMRRVDAGAERWPPRRDVVVCACVCRRWRDAAVSVVRPPLECGRITFPSSLKQPGPRDAPMHCFIRRDKKNSTFSLYLSLTQALTDKGKFLLAARRFRQGAHTEYIISYDYDDLHPRSSSYVGKLRSDFLGTKFIIYDSQAPYDGAKPSRTRSTRRFASKQISPQVSGGNFEVGQVTYRFNFMKSRGPRRMQCNIQCPVGQGSASDPSKEKTPSPSSLDLKNKAPRWHDHLQCWCLNFHGRVTVASVKNFQLVATAGSGGPWGVGDEETVILQFGKIEDDAFTMDYRQPLSAFQAFAICLTSFGTKLACE

SEQ ID NO: 7580 - protein, 309 aa, Zea mays subsp. mays
  peptide (1)..(309): Ceres Seq. ID no. 12406218
  misc_feature (53)..(309): Pfam Name: Tub family Pfam Description: Tub family
  misc_feature (53)..(309): Homolog of NCBI NO: 34911070 NR Description: putative tubby-like protein [Oryza sativa
  misc_feature (1)..(52): Homolog of NCBI NO: 34911070 NR Description: putative tubby-like protein [Oryza sativa
  misc_feature (1)..(307): Homolog of NCBI NO: 34909710 NR Description: putative Tub family protein [Oryza sativa
  misc_feature (1)..(309): Homolog of NCBI NO: 18404413 NR Description: F-box containing tubby family protein; protein At1g53320.1, supported by cDNA: gi_13877766, supported by cDNA: [Arabidopsis thaliana] >gi|13877767|gb|AAK43961.1|AF370146_1
  misc_feature (125)..(309): Homolog of NCBI NO: 7769867 NR Description: F12M16.22 [Arabidopsis thaliana]
  misc_feature (1)..(136): Homolog of NCBI NO: 7769867 NR Description: F12M16.22 [Arabidopsis thaliana]
  misc_feature (1)..(212): Homolog of NCBI NO: 34899264 NR Description: contains ESTs
  misc_feature (211)..(309): Homolog of NCBI NO: 34899264 NR Description: contains ESTs
  misc_feature (1)..(192): Homolog of NCBI NO: 5777631 NR Description: CAA303719.1 protein [Oryza sativa]
  misc_feature (200)..(255): Homolog of NCBI NO: 5777631 NR Description: CAA303719.1 protein [Oryza sativa]
MRRVDAGAERWPPRRDVVVCACVCRRWRDAAVSVVRPPLECGRITFPSSLKQPGPRDAPMHCFIRRDKKNSTFSLYLSLTQALTDKGKFLLAARRFRQGAHTEYIISYDYDDLHPRSSSYVGKLRSDFLGTKFIIYDSQAPYDGAKPSRTRSTRRFASKQISPQVSGGNFEVGQVTYRFNFMKSRGPRRMQCNIQCPVGQGSASDPSKEKTPSPSSLDLKNKAPRWHDHLQCWCLNFHGRVTVASVKNFQLVATAGSGGPWGVGDEETVILQFGKIEDDAFTMDYRQPLSAFQAFAICLTSFGTKLACE

SEQ ID NO: 7581 - DNA, 2012 bp, Zea mays subsp. mays
  misc_feature (1)..(2012): Ceres Seq. ID no. 12408330
  misc_feature: MA Experiment ID: 108536 Result: Up-regulated in Transcription
  misc_feature: MA Experiment 108536 PARAMETER Experiment Name: Zm_Meristem_P Parameter: Age (day) Value: 8
  misc_feature: MA Experiment 108536 PARAMETER Experiment Name: Zm_Meristem_P Parameter: Organism Value: Zea mays
  misc_feature: MA Experiment 108536 PARAMETER Experiment Name: Zm_Meristem_P Parameter: Plant Line Value: 35A19
  misc_feature: MA Experiment 108536 PARAMETER Experiment Name: Zm_Meristem_P Parameter: Tissue Value: Shoot Meristem vs. Above Shoot Meristem
  misc_feature: MA Experiment ID: 108687 Result: Down-regulated in Transcription
  misc_feature: MA Experiment 108687 PARAMETER Experiment Name: Zm_Embryos-Flowers__P Parameter: Tissue Value: Embryo vs. Aerial+
gacttgaacacggccagcgtctcatcggctgggcgtggtctacactgcacgcacacttaccaccagccaccgcaagtgaatcactagccggaagacaggccaaccccactgctagtgctaggaatctaggagcgagaacgagagaccatgtcctcagaggccagcagcgtcgtcgtcgccgacgagaatggagcggcggagacggtcggcgtcgggcggtacgtggaaatggagaaggaccaagactcgagcgcagccaagtcgcggctctcgggcctgctctggcacggcggctccgcctacgacgcttggttcagctgcgcgtccaaccaggtggctcaggtgctcctgaccctgccctactcgttctcgcaactggggatgctgagcggcatactgttccagctcctgtacgggctgatgggcagctggacggcgtacctcatcagcgttctctacgtggagtaccgggccaggaaggagagggagaaggcggacttcaggaaccatgtcatccagtggttcgaggtgctggacgggctgctcgggaggcactggaggaacgtcggcctggccttcaactgcacgttcctgctcttcggctcggtcatccagctcatcgcatgcgcaagcaacatctactacatcaacgacaagctggacaagcggacgtggacgtacatcttcggcgcctgctgcgccacgacggtgttcatcccgtcgttccacaactaccggatctggtcgttcctgggcctcgtcatgaccacctacacggcgtggtacctcgccgtcgcgtccctcatccatggccaggttgatggcgtgaagcactccgggccgaccaagatggtgctctacttcaccggggccacaaacattctctacactttcggagggcacgctgttaccgtggagatcatgcacgcgatgtggcggccgcagaagttcaaggcgatctacctgatggcgacgctgtacgtgctgacgctgacgctgccgtcggcggccagcgtgtactgggcgttcggcgaccagctgctgacccgctccaacgcgctggcgctgctcccgcgcacggcgttccgcgacgccgccgtcgtgctcatgctcgcccaccagttcatcaccttcggcttcgcctgcacgccgctctacttcgtctgggagaagctcgtcggcctgcacgactgccgcagcctctgcaggcgcgccgccgcgcgcctccccgtcgtcgtccccatctggttcctcgccatcatcttccccttcttcgggcccatcaactccgccgtcggctccctcctcgtcagcttcaccgtctacatcatcccggcgctggcgcacatgatcacgttccggtccgcaacagcccgtgagaacgcgatggagccgccgccgcggctgctggggcgttggacgggcgcgtacatgatcaacgcgttcgtggtggcgtgggtgctggtggtcggcttcggcttcggcggctgggcgagcatgacaaacttcgtccgccagatcgacaccttcggcctcttcaccaagtgctaccagtgcccgccgccaccgcccctgccgttccccggcggcggcctcggcaacatcacgatgccattcaacggcgacgggctccctcctaccccggctccttcgccggcgcattacttcttccgccaccaccggcatcacagccaccaccgcgggctctgatgagagacgatgaaatgaacccggcttaccaccagtagtgcgtgcgtggcacactgctgctttagtttgagctgatcccttagttaagtctagcttaattagcacctgcatgcagcatcttcgttctctcctctagcttgctggtgtcgaacgcatgctttcccggtttcagtgactttagagaccctgcctgagcctgacacgaggggagtatcactgtatcagtactagcatgcagtctcttgtgttccgggctgtgtcctggcgtggagctcaaagaaggggaatccatttctacagcc

SEQ ID NO: 7582 - protein, 520 aa, Zea mays subsp. mays
  peptide (1)..(520): Ceres Seq. ID no. 12408331
  misc_feature (15)..(520): Homolog of NCBI NO: 37531048 NR Description: putative AUX1-like permease [Oryza sativa
  misc_feature (13)..(479): Homolog of NCBI NO: 15226450 NR Description: AUX1-like amino acid permease; protein id: supported by cDNA: gi_15451207 [Arabidopsis thaliana]
  misc_feature (10)..(478): Homolog of NCBI NO: 6689614 NR Description: AUX1 protein [Zea mays]
  misc_feature (16)..(515): Homolog of NCBI NO: 14279184 NR Description: putative AUX1-like permease [Populus tremula x
  misc_feature (17)..(511): Homolog of NCBI NO: 21586474 NR Description: auxin influx carrier protein [Medicago truncatula]
  misc_feature (18)..(475): Homolog of NCBI NO: 15217443 NR Description: putative AUX1-like permease; protein id: supported by cDNA: gi_15809995 [Arabidopsis thaliana]
  misc_feature (18)..(472): Homolog of NCBI NO: 10800922 NR Description: putative AUX1-like permease [Medicago truncatula]
  misc_feature (3)..(472): Homolog of NCBI NO: 18404642 NR Description: expressed protein; protein id: At2g38120.1, by cDNA: 31586., supported by cDNA: gi_15450815, supported by gi_20259903 [Arabidopsis thaliana] >gi|7485590|pir||T01244
  misc_feature (3)..(479): Homolog of NCBI NO: 21586468 NR Description: auxin influx carrier protein [Medicago truncatula]
MSSEASSVVVADENGAAETVGVGRYVEMEKDQDSSAAKSRLSGLLWHGGSAYDAWFSCASNQVAQVLLTLPYSFSQLGMLSGILFQLLYGLMGSWTAYLISVLYVEYRARKEREKADFRNHVIQWFEVLDGLLGRHWRNVGLAFNCTFLLFGSVIQLIACASNIYYINDKLDKRTWTYIFGACCATTVFIPSFHNYRIWSFLGLVMTTYTAWYLAVASLIHGQVDGVKHSGPTKMVLYFTGATNILYTFGGHAVTVEIMHAMWRPQKFKAIYLMATLYVLTLTLPSAASVYWAFGDQLLTRSNALALLPRTAFRDAAVVLMLAHQFITFGFACTPLYFVWEKLVGLHDCRSLCRRAAARLPVVVPIWFLAIIFPFFGPINSAVGSLLVSFTVYIIPALAHMITFRSATARENAMEPPPRLLGRWTGAYMINAFVVAWVLVVGFGFGGWASMTNFVRQIDTFGLFTKCYQCPPPPPLPFPGGGLGNITMPFNGDGLPPTPAPSPAHYFFRHHRHHSHHRGL

SEQ ID NO: 7583 - protein, 493 aa, Zea mays subsp. mays
  peptide (1)..(493): Ceres Seq. ID no. 12408332
  misc_feature (1)..(493): Homolog of NCBI NO: 37531048 NR Description: putative AUX1-like permease [Oryza sativa
  misc_feature (1)..(452): Homolog of NCBI NO: 15226450 NR Description: AUX1-like amino acid permease; protein id: supported by cDNA: gi_15451207 [Arabidopsis thaliana]
  misc_feature (1)..(451): Homolog of NCBI NO: 6689614 NR Description: AUX1 protein [Zea mays]
  misc_feature (1)..(488): Homolog of NCBI NO: 14279184 NR Description: putative AUX1-like permease [Populus tremula x
  misc_feature (1)..(484): Homolog of NCBI NO: 21586474 NR Description: auxin influx carrier protein [Medicago truncatula]
  misc_feature (1)..(448): Homolog of NCBI NO: 15217443 NR Description: putative AUX1-like permease; protein id: supported by cDNA: gi_15809995 [Arabidopsis thaliana]
  misc_feature (1)..(445): Homolog of NCBI NO: 10800922 NR Description: putative AUX1-like permease [Medicago truncatula]
  misc_feature (1)..(445): Homolog of NCBI NO: 18404642 NR Description: expressed protein; protein id: At2g38120.1, by cDNA: 31586., supported by cDNA: gi_15450815, supported by gi_20259903 [Arabidopsis thaliana] >gi|7485590|pir||T01244
  misc_feature (1)..(452): Homolog of NCBI NO: 21586468 NR Description: auxin influx carrier protein [Medicago truncatula]
MEKDQDSSAAKSRLSGLLWHGGSAYDAWFSCASNQVAQVLLTLPYSFSQLGMLSGILFQLLYGLMGSWTAYLISVLYVEYRARKEREKADFRNHVIQWFEVLDGLLGRHWRNVGLAFNCTFLLFGSVIQLIACASNIYYINDKLDKRTWTYIFGACCATTVFIPSFHNYRIWSFLGLVMTTYTAWYLAVASLIHGQVDGVKHSGPTKMVLYFTGATNILYTFGGHAVTVEIMHAMWRPQKFKAIYLMATLYVLTLTLPSAASVYWAFGDQLLTRSNALALLPRTAFRDAAVVLMLAHQFITFGFACTPLYFVWEKLVGLHDCRSLCRRAAARLPVVVPIWFLAIIFPFFGPINSAVGSLLVSFTVYIIPALAHMITFRSATARENAMEPPPRLLGRWTGAYMINAFVVAWVLVVGFGFGGWASMTNFVRQIDTFGLFTKCYQCPPPPPLPFPGGGLGNITMPFNGDGLPPTPAPSPAHYFFRHHRHHSHHRGL

SEQ ID NO: 7584 - protein, 442 aa, Zea mays subsp. mays
  peptide (1)..(442): Ceres Seq. ID no. 12408333
  misc_feature (1)..(442): Homolog of NCBI NO: 37531048 NR Description: putative AUX1-like permease [Oryza sativa
  misc_feature (1)..(401): Homolog of NCBI NO: 15226450 NR Description: AUX1-like amino acid permease; protein id: supported by cDNA: gi_15451207 [Arabidopsis thaliana]
  misc_feature (1)..(400): Homolog of NCBI NO: 6689614 NR Description: AUX1 protein [Zea mays]
  misc_feature (1)..(437): Homolog of NCBI NO: 14279184 NR Description: putative AUX1-like permease [Populus tremula x
  misc_feature (1)..(433): Homolog of NCBI NO: 21586474 NR Description: auxin influx carrier protein [Medicago truncatula]
  misc_feature (1)..(397): Homolog of NCBI NO: 15217443 NR Description: putative AUX1-like permease; protein id: supported by cDNA: gi_15809995 [Arabidopsis thaliana]
  misc_feature (1)..(394): Homolog of NCBI NO: 10800922 NR Description: putative AUX1-like permease [Medicago truncatula]
  misc_feature (1)..(394): Homolog of NCBI NO: 18404642 NR Description: expressed protein; protein id: At2g38120.1, by cDNA: 31586., supported by cDNA: gi_15450815, supported by gi_20259903 [Arabidopsis thaliana] >gi|7485590|pir||T01244
  misc_feature (1)..(401): Homolog of NCBI NO: 21586468 NR Description: auxin influx carrier protein [Medicago truncatula]
MLSGILFQLLYGLMGSWTAYLISVLYVEYRARKEREKADFRNHVIQWFEVLDGLLGRHWRNVGLAFNCTFLLFGSVIQLIACASNIYYINDKLDKRTWTYIFGACCATTVFIPSFHNYRIWSFLGLVMTTYTAWYLAVASLIHGQVDGVKHSGPTKMVLYFTGATNILYTFGGHAVTVEIMHAMWRPQKFKAIYLMATLYVLTLTLPSAASVYWAFGDQLLTRSNALALLPRTAFRDAAVVLMLAHQFITFGFACTPLYFVWEKLVGLHDCRSLCRRAAARLPVVVPIWFLAIIFPFFGPINSAVGSLLVSFTVYIIPALAHMITFRSATARENAMEPPPRLLGRWTGAYMINAFVVAWVLVVGFGFGGWASMTNFVRQIDTFGLFTKCYQCPPPPPLPFPGGGLGNITMPFNGDGLPPTPAPSPAHYFFRHHRHHSHHRGL

SEQ ID NO: 7585 - DNA, 1460 bp, Zea mays subsp. mays
  misc_feature (1)..(1460): Ceres Seq. ID no. 12383521
  misc_feature: MA Experiment ID: 108522 Result: Down-regulated in Transcription
  misc_feature: MA Experiment 108522 PARAMETER Experiment Name: Zm_42deg_Heat_P Parameter: Age (day) Value: 8
  misc_feature: MA Experiment 108522 PARAMETER Experiment Name: Zm_42deg_Heat_P Parameter: Organism Value: Zea mays
  misc_feature: MA Experiment 108522 PARAMETER Experiment Name: Zm_42deg_Heat_P Parameter: Plant Line Value: 35A19
  misc_feature: MA Experiment 108522 PARAMETER Experiment Name: Zm_42deg_Heat_P Parameter: Temperature (deg C) Value: 42 vs. 22
  misc_feature: MA Experiment 108522 PARAMETER Experiment Name: Zm_42deg_Heat_P Parameter: Timepoint (hr) Value: 1
  misc_feature: MA Experiment 108522 PARAMETER Experiment Name: Zm_42deg_Heat_P Parameter: Tissue Value: Aerial
  misc_feature: MA Experiment ID: 108535 Result: Up-regulated in Transcription
  misc_feature: MA Experiment 108535 PARAMETER Experiment Name: Zm_Meristem_P Parameter: Age (day) Value: 8
  misc_feature: MA Experiment 108535 PARAMETER Experiment Name: Zm_Meristem_P Parameter: Organism Value: Zea mays
  misc_feature: MA Experiment 108535 PARAMETER Experiment Name: Zm_Meristem_P Parameter: Plant Line Value: 35A19
  misc_feature: MA Experiment 108535 PARAMETER Experiment Name: Zm_Meristem_P Parameter: Tissue Value: Root Meristem vs. Above Root Meristem
  misc_feature: MA Experiment ID: 108543 Result: Down-regulated in Transcription
  misc_feature: MA Experiment ID: 20000487 Result: Up-regulated in Transcription
  misc_feature: MA Experiment 20000487 PARAMETER Experiment Name: Zm_50mM_NH4NO3_L_to_H_P Parameter: Organism Value: Zea mays
  misc_feature: MA Experiment 20000487 PARAMETER Experiment Name: Zm_50mM_NH4NO3_L_to_H_P Parameter: Timepoint (hr) Value: 4
  misc_feature: MA Experiment 20000487 PARAMETER Experiment Name: Zm_50mM_NH4NO3_L_to_H_P Parameter: Tissue Value: Leaves
  misc_feature: MA Experiment 20000487 PARAMETER Experiment Name: Zm_50mM_NH4NO3_L_to_H_P Parameter: Treatment Value: 50mM NH4NO3 vs. 100mM Mannitol
  misc_feature: MA Experiment ID: 20000488 Result: Up-regulated in Transcription
  misc_feature: MA Experiment 20000488 PARAMETER Experiment Name: Zm_50mM_NH4NO3_L_to_H_P Parameter: Organism Value: Zea mays
  misc_feature: MA Experiment 20000488 PARAMETER Experiment Name: Zm_50mM_NH4NO3_L_to_H_P Parameter: Timepoint (hr) Value: 8
  misc_feature: MA Experiment 20000488 PARAMETER Experiment Name: Zm_50mM_NH4NO3_L_to_H_P Parameter: Tissue Value: Leaves
  misc_feature: MA Experiment 20000488 PARAMETER Experiment Name: Zm_50mM_NH4NO3_L_to_H_P Parameter: Treatment Value: 50mM NH4NO3 vs. 100mM Mannitol
actcggagagcgtgattatgctgcacgcgttgatttaacagctaaggtttatggtctacataaagcagaacagtatatcgagaaaattcctgcatctcataggagtgaggttgtgtatagaacacttctggcgaattgtgttgctgaaggcaatgtaaaaaaatcggagcaagtttttaataggatgaaggatcttggattcccagttacaacattttcttccaatcagcttctgctactctacaaaagattggacaagaaaaagattgctgatgttctcacaatgatggaaaaggaggatgtgaaaccatctatctttacttacaaggtccttgtagacgccaagggaatggttggagatgtagaagctatggagaaagtggttgaatcaatggtgaaagatggcattgagccagatctcacgtttaatgctacaattgccagacagtacatatttaatggtcagcgtgataaagcagagacacttttggagtcaatggagggtgatgatatccagaaaaaccgtgctgcttgcaagtttctattacctttatatgcttttctgggcaatggtgatgctgtggaaagaatttggaaggtgtgtgaggataatactcgtatagatgagtgcttgtctgctatagatgccttcggtaagcttggtaatgttgaaaaggcagagaaggtttttgaggatatgtttgtgaaatggaaaaacctctcttccaaatactacaccgctttgctaaaggtgtatgctaatcagaacctcttagacaagggtgaggaactagcaaagcggatggatgaggagggtgccaagtttgggaccccaactttgaatgcacttgtgaagctatatgctgacgctggagaggtggagaaagctgagtccctattgcacaagctatctctgaagaacaacgtcaagcccagttacagctcatacatgacactgcttgatagctactcgaagaaaggagacgtccacaactcggagaaagtgttcaacaagttgagacagataggctacactgggaggatcaggatgtaccagtttctgctccattcttatctacatgctaaggcccctgcgtatggattcaaagagaggatgaaggctgacaacattttccccaacagtgccgtggcaactctgattgccgctactgatccgttcgtcaagaagaaatcagtatcggacttgctcgattagattatggagtagtgtgaggtactgaggtccatcatgttgctatgcgcatgtgctgtttcgataagactatggagtagtgtgagaatatatggtgagataataacgtcttagtcttgtaatgaactaccattgactttgcatttagactcatgcgctttgctgaacttgagtcatagaaacaggataaagtgcacgagagagagagaacttgtgctaattcttgatataatattttttgttatcc

SEQ ID NO: 7586 - protein, 404 aa, Zea mays subsp. mays
  peptide (1)..(404): Ceres Seq. ID no. 12383522
  misc_feature (37)..(70): Pfam Name: PPR repeat Pfam Description: PPR repeat
  misc_feature (1)..(404): Homolog of NCBI NO: 34903362 NR Description: unnamed protein product [Oryza sativa (japonica group)] >gi|6498438|dbj|BAA87841.1| unnamed protein product
  misc_feature (1)..(404): Homolog of NCBI NO: 6958202 NR Description: DNA-binding protein [Triticum aestivum]
  misc_feature (3)..(404): Homolog of NCBI NO: 15220095 NR Description: hypothetical protein; protein id: At1g80270.1, by cDNA: gi_17064897, supported by cDNA: gi_20259917 [Arabidopsis
  misc_feature (3)..(404): Homolog of NCBI NO: 15218196 NR Description: hypothetical protein; protein id: At1g15480.1 thaliana] >gi|5103846|gb|AAD39676.1|AC007591_41 F9L1.43
  misc_feature (3)..(404): Homolog of NCBI NO: 22331104 NR Description: DNA-binding protein, putative; protein id:
  misc_feature (3)..(385): Homolog of NCBI NO: 34900334 NR Description: P0592C06.16 [Oryza sativa (japonica
  misc_feature (34)..(385): Homolog of NCBI NO: 34394024 NR Description: putative DNA-binding protein [Oryza sativa
  misc_feature (5)..(377): Homolog of NCBI NO: 15240937 NR Description: putative protein; protein id: At5g27460.1
  misc_feature (5)..(387): Homolog of NCBI NO: 15219808 NR Description: hypothetical protein; protein id: At1g60770.1
  misc_feature (1)..(388): Homolog of NCBI NO: 37535776 NR Description: putative leaf protein [Oryza sativa (japonica group)] >gi|22165054|gb|AAM93671.1| putative leaf protein [Oryza
LGERDYAARVDLTAKVYGLHKAEQYIEKIPASHRSEVVYRTLLANCVAEGNVKKSEQVFNRMKDLGFPVTTFSSNQLLLLYKRLDKKKIADVLTMMEKEDVKPSIFTYKVLVDAKGMVGDVEAMEKVVESMVKDGIEPDLTFNATIARQYIFNGQRDKAETLLESMEGDDIQKNRAACKFLLPLYAFLGNGDAVERIWKVCEDNTRIDECLSAIDAFGKLGNVEKAEKVFEDMFVKWKNLSSKYYTALLKVYANQNLLDKGEELAKRMDEEGAKFGTPTLNALVKLYADAGEVEKAESLLHKLSLKNNVKPSYSSYMTLLDSYSKKGDVHNSEKVFNKLRQIGYTGRIRMYQFLLHSYLHAKAPAYGFKERMKADNIFPNSAVATLIAATDPFVKKKSVSDLLD

SEQ ID NO: 7587 - protein, 343 aa, Zea mays subsp. mays
  peptide (1)..(343): Ceres Seq. ID no. 12383523
  misc_feature (1)..(343): Homolog of NCBI NO: 34903362 NR Description: unnamed protein product [Oryza sativa (japonica group)] >gi|6498438|dbj|BAA87841.1| unnamed protein product
  misc_feature (1)..(343): Homolog of NCBI NO: 6958202 NR Description: DNA-binding protein [Triticum aestivum]
  misc_feature (1)..(343): Homolog of NCBI NO: 15220095 NR Description: hypothetical protein; protein id: At1g80270.1, by cDNA: gi_17064897, supported by cDNA: gi_20259917 [Arabidopsis
  misc_feature (1)..(343): Homolog of NCBI NO: 15218196 NR Description: hypothetical protein; protein id: At1g15480.1 thaliana] >gi|5103846|gb|AAD39676.1|AC007591_41 F9L1.43
  misc_feature (1)..(343): Homolog of NCBI NO: 22331104 NR Description: DNA-binding protein, putative; protein id:
  misc_feature (1)..(324): Homolog of NCBI NO: 34900334 NR Description: P0592C06.16 [Oryza sativa (japonica
  misc_feature (1)..(324): Homolog of NCBI NO: 34394024 NR Description: putative DNA-binding protein [Oryza sativa
  misc_feature (1)..(316): Homolog of NCBI NO: 15240937 NR Description: putative protein; protein id: At5g27460.1
  misc_feature (1)..(326): Homolog of NCBI NO: 15219808 NR Description: hypothetical protein; protein id: At1g60770.1
  misc_feature (1)..(327): Homolog of NCBI NO: 37535776 NR Description: putative leaf protein [Oryza sativa (japonica group)] >gi|22165054|gb|AAM93671.1| putative leaf protein [Oryza
MKDLGFPVTTFSSNQLLLLYKRLDKKKIADVLTMMEKEDVKPSIFTYKVLVDAKGMVGDVEAMEKVVESMVKDGIEPDLTFNATIARQYIFNGQRDKAETLLESMEGDDIQKNRAACKFLLPLYAFLGNGDAVERIWKVCEDNTRIDECLSAIDAFGKLGNVEKAEKVFEDMFVKWKNLSSKYYTALLKVYANQNLLDKGEELAKRMDEEGAKFGTPTLNALVKLYADAGEVEKAESLLHKLSLKNNVKPSYSSYMTLLDSYSKKGDVHNSEKVFNKLRQIGYTGRIRMYQFLLHSYLHAKAPAYGFKERMKADNIFPNSAVATLIAATDPFVKKKSVSDLLD

SEQ ID NO: 7588 - protein, 310 aa, Zea mays subsp. mays
  peptide (1)..(310): Ceres Seq. ID no. 12383524
  misc_feature (1)..(310): Homolog of NCBI NO: 6958202 NR Description: DNA-binding protein [Triticum aestivum]
  misc_feature (1)..(310): Homolog of NCBI NO: 15220095 NR Description: hypothetical protein; protein id: At1g80270.1, by cDNA: gi_17064897, supported by cDNA: gi_20259917 [Arabidopsis
  misc_feature (1)..(310): Homolog of NCBI NO: 15218196 NR Description: hypothetical protein; protein id: At1g15480.1 thaliana] >gi|5103846|gb|AAD39676.1|AC007591_41 F9L1.43
  misc_feature (1)..(310): Homolog of NCBI NO: 22331104 NR Description: DNA-binding protein, putative; protein id:
  misc_feature (1)..(291): Homolog of NCBI NO: 34900334 NR Description: P0592C06.16 [Oryza sativa (japonica
  misc_feature (1)..(291): Homolog of NCBI NO: 34394024 NR Description: putative DNA-binding protein [Oryza sativa
  misc_feature (1)..(283): Homolog of NCBI NO: 15240937 NR Description: putative protein; protein id: At5g27460.1
  misc_feature (1)..(293): Homolog of NCBI NO: 15219808 NR Description: hypothetical protein; protein id: At1g60770.1
  misc_feature (1)..(294): Homolog of NCBI NO: 37535776 NR Description: putative leaf protein [Oryza sativa (japonica group)] >gi|22165054|gb|AAM93671.1| putative leaf protein [Oryza
  misc_feature (1)..(310): Homolog of NCBI NO: 34903362 NR Description: unnamed protein product [Oryza sativa (japonica group)] >gi|6498438|dbj|BAA87841.1| unnamed protein product
MMEKEDVKPSIFTYKVLVDAKGMVGDVEAMEKVVESMVKDGIEPDLTFNATIARQYIFNGQRDKAETLLESMEGDDIQKNRAACKFLLPLYAFLGNGDAVERIWKVCEDNTRIDECLSAIDAFGKLGNVEKAEKVFEDMFVKWKNLSSKYYTALLKVYANQNLLDKGEELAKRMDEEGAKFGTPTLNALVKLYADAGEVEKAESLLHKLSLKNNVKPSYSSYMTLLDSYSKKGDVHNSEKVFNKLRQIGYTGRIRMYQFLLHSYLHAKAPAYGFKERMKADNIFPNSAVATLIAATDPFVKKKSVSDLLD

SEQ ID NO: 7589 - DNA, 1169 bp, Zea mays subsp. mays
  misc_feature (1)..(1169): Ceres Seq. ID no. 12407205
  misc_feature: MA Experiment ID: 108527 Result: Up-regulated in Transcription
  misc_feature: MA Experiment 108527 PARAMETER Experiment Name: Zm_5mM_NO_P Parameter: Age (day) Value: 8
  misc_feature: MA Experiment 108527 PARAMETER Experiment Name: Zm_5mM_NO_P Parameter: Organism Value: Zea mays
  misc_feature: MA Experiment 108527 PARAMETER Experiment Name: Zm_5mM_NO_P Parameter: Plant Line Value: 35A19
  misc_feature: MA Experiment 108527 PARAMETER Experiment Name: Zm_5mM_NO_P Parameter: Timepoint (hr) Value: 6
  misc_feature: MA Experiment 108527 PARAMETER Experiment Name: Zm_5mM_NO_P Parameter: Tissue Value: Aerial
  misc_feature: MA Experiment 108527 PARAMETER Experiment Name: Zm_5mM_NO_P Parameter: Treatment Value: 5mM NO vs. No Treatment
  misc_feature: MA Experiment ID: 108528 Result: Up-regulated in Transcription
  misc_feature: MA Experiment 108528 PARAMETER Experiment Name: Zm_Imbibed_Seeds_P Parameter: Age (day) Value: 5 vs. 2
  misc_feature: MA Experiment 108528 PARAMETER Experiment Name: Zm_Imbibed_Seeds_P Parameter: Organism Value: Zea mays
  misc_feature: MA Experiment 108528 PARAMETER Experiment Name: Zm_Imbibed_Seeds_P Parameter: Plant Line Value: 35A19
  misc_feature: MA Experiment 108528 PARAMETER Experiment Name: Zm_Imbibed_Seeds_P Parameter: Tissue Value: Aerial vs. Embryo
  misc_feature: MA Experiment ID: 108529 Result: Up-regulated in Transcription
  misc_feature: MA Experiment 108529 PARAMETER Experiment Name: Zm_Imbibed_Seeds_P Parameter: Age (day) Value: 5 vs. 2
  misc_feature: MA Experiment 108529 PARAMETER Experiment Name: Zm_Imbibed_Seeds_P Parameter: Organism Value: Zea mays
  misc_feature: MA Experiment 108529 PARAMETER Experiment Name: Zm_Imbibed_Seeds_P Parameter: Plant Line Value: 35A19
  misc_feature: MA Experiment 108529 PARAMETER Experiment Name: Zm_Imbibed_Seeds_P Parameter: Tissue Value: Roots vs. Embryo
  misc_feature: MA Experiment ID: 108530 Result: Up-regulated in Transcription
  misc_feature: MA Experiment 108530 PARAMETER Experiment Name: Zm_Imbibed_Seeds_P Parameter: Age (day) Value: 6 vs. 2
  misc_feature: MA Experiment 108530 PARAMETER Experiment Name: Zm_Imbibed_Seeds_P Parameter: Organism Value: Zea mays
  misc_feature: MA Experiment 108530 PARAMETER Experiment Name: Zm_Imbibed_Seeds_P Parameter: Plant Line Value: 35A19
  misc_feature: MA Experiment 108530 PARAMETER Experiment Name: Zm_Imbibed_Seeds_P Parameter: Tissue Value: Aerial vs. Embryo
  misc_feature: MA Experiment ID: 108533 Result: Up-regulated in Transcription
  misc_feature: MA Experiment 108533 PARAMETER Experiment Name: Zm_4deg_Cold_P Parameter: Age (hr) Value: 8
  misc_feature: MA Experiment 108533 PARAMETER Experiment Name: Zm_4deg_Cold_P Parameter: Organism Value: Zea mays
  misc_feature: MA Experiment 108533 PARAMETER Experiment Name: Zm_4deg_Cold_P Parameter: Plant Line Value: 35A19
  misc_feature: MA Experiment 108533 PARAMETER Experiment Name: Zm_4deg_Cold_P Parameter: Temperature (deg C) Value: 4 vs. 22
  misc_feature: MA Experiment 108533 PARAMETER Experiment Name: Zm_4deg_Cold_P Parameter: Timepoint (hr) Value: 1
  misc_feature: MA Experiment 108533 PARAMETER Experiment Name: Zm_4deg_Cold_P Parameter: Tissue Value: Aerial
  misc_feature: MA Experiment ID: 108534 Result: Up-regulated in Transcription
  misc_feature: MA Experiment 108534 PARAMETER Experiment Name: Zm_4deg_Cold_P Parameter: Age (hr) Value: 8
  misc_feature: MA Experiment 108534 PARAMETER Experiment Name: Zm_4deg_Cold_P Parameter: Organism Value: Zea mays
  misc_feature: MA Experiment 108534 PARAMETER Experiment Name: Zm_4deg_Cold_P Parameter: Plant Line Value: 35A19
  misc_feature: MA Experiment 108534 PARAMETER Experiment Name: Zm_4deg_Cold_P Parameter: Temperature (deg C) Value: 4 vs. 22
  misc_feature: MA Experiment 108534 PARAMETER Experiment Name: Zm_4deg_Cold_P Parameter: Timepoint (hr) Value: 6
  misc_feature: MA Experiment 108534 PARAMETER Experiment Name: Zm_4deg_Cold_P Parameter: Tissue Value: Aerial
  misc_feature: MA Experiment ID: 108535 Result: Down-regulated in Transcription
  misc_feature: MA Experiment 108535 PARAMETER Experiment Name: Zm_Meristem_P Parameter: Age (day) Value: 8
  misc_feature: MA Experiment 108535 PARAMETER Experiment Name: Zm_Meristem_P Parameter: Organism Value: Zea mays
  misc_feature: MA Experiment 108535 PARAMETER Experiment Name: Zm_Meristem_P Parameter: Plant Line Value: 35A19
  misc_feature: MA Experiment 108535 PARAMETER Experiment Name: Zm_Meristem_P Parameter: Tissue Value: Root Meristem vs. Above Root Meristem
  misc_feature: MA Experiment ID: 108536 Result: Up-regulated in Transcription
  misc_feature: MA Experiment 108536 PARAMETER Experiment Name: Zm_Meristem_P Parameter: Age (day) Value: 8
  misc_feature: MA Experiment 108536 PARAMETER Experiment Name: Zm_Meristem_P Parameter: Organism Value: Zea mays
  misc_feature: MA Experiment 108536 PARAMETER Experiment Name: Zm_Meristem_P Parameter: Plant Line Value: 35A19
  misc_feature: MA Experiment 108536 PARAMETER Experiment Name: Zm_Meristem_P Parameter: Tissue Value: Shoot Meristem vs. Above Shoot Meristem
  misc_feature: MA Experiment ID: 108545 Result: Down-regulated in Transcription
  misc_feature: MA Experiment 108545 PARAMETER Experiment Name: Zm_Imbibed_Seeds_P Parameter: Age (day) Value: 3 vs. 2
  misc_feature: MA Experiment 108545 PARAMETER Experiment Name: Zm_Imbibed_Seeds_P Parameter: Organism Value: Zea mays
  misc_feature: MA Experiment 108545 PARAMETER Experiment Name: Zm_Imbibed_Seeds_P Parameter: Plant Line Value: 35A19
  misc_feature: MA Experiment 108545 PARAMETER Experiment Name: Zm_Imbibed_Seeds_P Parameter: Tissue Value: Aerial vs. Embryo
  misc_feature: MA Experiment ID: 108546 Result: Up-regulated in Transcription
  misc_feature: MA Experiment 108546 PARAMETER Experiment Name: Zm_Imbibed_Seeds_P Parameter: Age (day) Value: 3 vs. 2
  misc_feature: MA Experiment 108546 PARAMETER Experiment Name: Zm_Imbibed_Seeds_P Parameter: Organism Value: Zea mays
  misc_feature: MA Experiment 108546 PARAMETER Experiment Name: Zm_Imbibed_Seeds_P Parameter: Plant Line Value: 35A19
  misc_feature: MA Experiment 108546 PARAMETER Experiment Name: Zm_Imbibed_Seeds_P Parameter: Tissue Value: Roots vs. Embryo
  misc_feature: MA Experiment ID: 108547 Result: Up-regulated in Transcription
  misc_feature: MA Experiment 108547 PARAMETER Experiment Name: Zm_Imbibed_Seeds_P Parameter: Age (day) Value: 4 vs. 2
  misc_feature: MA Experiment 108547 PARAMETER Experiment Name: Zm_Imbibed_Seeds_P Parameter: Organism Value: Zea mays
  misc_feature: MA Experiment 108547 PARAMETER Experiment Name: Zm_Imbibed_Seeds_P Parameter: Plant Line Value: 35A19
  misc_feature: MA Experiment 108547 PARAMETER Experiment Name: Zm_Imbibed_Seeds_P Parameter: Tissue Value: Aerial vs. Embryo
  misc_feature: MA Experiment ID: 108687 Result: Down-regulated in Transcription
  misc_feature: MA Experiment 108687 PARAMETER Experiment Name: Zm_Embryos-Flowers__P Parameter: Tissue Value: Embryo vs. Aerial+
  misc_feature: MA Experiment ID: 108688 Result: Down-regulated in Transcription
  misc_feature: MA Experiment 108688 PARAMETER Experiment Name: Zm_Embryos-Flowers__P Parameter: Tissue Value: Immature Flowers vs. Aerial+
  misc_feature: MA Experiment ID: 20000108 Result: Down-regulated in Transcription
  misc_feature: MA Experiment 20000108 PARAMETER Experiment Name: Zm_Root-Tips_P Parameter: Age (day) Value: 12
  misc_feature: MA Experiment 20000108 PARAMETER Experiment Name: Zm_Root-Tips_P Parameter: Organism Value: Zea mays
  misc_feature: MA Experiment 20000108 PARAMETER Experiment Name: Zm_Root-Tips_P Parameter: Tissue Value: Root tips vs. Root mid region    35
  misc_feature: MA Experiment 20000108 PARAMETER Experiment Name: Zm_Root-Tips_P Parameter: Tissue Value: Root tips vs. Root mid region   Sequence Listing-Misc Features (4)
  misc_feature: MA Experiment ID: 20000535 Result: Down-regulated in Transcription
  misc_feature: MA Experiment 20000535 PARAMETER Experiment Name: Zm_Hybrid_Seed_Dev_P Parameter: DAP Value: 30 vs. 12
  misc_feature: MA Experiment 20000535 PARAMETER Experiment Name: Zm_Hybrid_Seed_Dev_P Parameter: Organism Value: Zea mays
  misc_feature: MA Experiment 20000535 PARAMETER Experiment Name: Zm_Hybrid_Seed_Dev_P Parameter: Plant Line Value: 35A19
  misc_feature: MA Experiment 20000535 PARAMETER Experiment Name: Zm_Hybrid_Seed_Dev_P Parameter: Tissue Value: Embryo vs. Unfert Floret
atcaacccaacacggcgtccccgtcccgagtcaccaccgacccaagcaaaaccgcacgcaccctgccagcggccccccaactcccaacccaacccctactccagctagctcgcggcggcggccagcggccatggccttccggctgagcaacaacctgatcggggtcctaaacttcgtcaccttcctgctctccgtcccgatcctgggcgcgggcatctggctgggccaccgcgccgacggcaccgagtgcgagcgctacctctcggcgcccgtcatcgcgctgggggccttcctcctcgccgtctccctggcgggcctcgtcggcgcctgctgccgcgtcacctggctgctctgggcctacctcctcgccatgttcgtcctcatcctcgtcctcttctgcttcaccgtcttcgccttcgtcgtcaccaacaggggcgccggcgaggccgtctccggccgcggatacaaggagtaccgcctcggggactactccaactggctgcagaagcgcgtcgagaacaccaggaactgggaccggatcaggagctgcctccaggactccaaggtctgcaagagcctgcaggacaagaacgagaccgtcgcccagttcatgagttccagcctctcccccatcgagtctggctgctgcaagccccccaccagctgcggctacacctacgtcggcggcacggactggacgccggtgaccaccaactcgacggacccggactgcaagacctggagcaacgacgcctcggcgctctgctacaactgccagtcgtgcaaggccggcgtggtggccacgttccagcggaactggaagcgcgtcgccgtcgtctgcatcgtcttcctcgtcttcatcatcatcgtctactccgtcggctgctgcgccttcaggaacaaccgcagagacaacgcctaccgcggcgggtggaagggcgggtacgcttgatccaccatcgcgtcgtttaggagcggagccatgcacgcgcgctcggtgctctgctctgctccctgcccgccgctgtcgtcgtacgtacatgtttagtaggctcgttgtagctctgtacaggtgatggagatcgttgttgcggattcttatcgtcttcctggttacatacttacattattgttatgatctgatcagcggtaggttttgtatacgctgc

SEQ ID NO: 7590 - protein, 316 aa, Zea mays subsp. mays
  peptide (1)..(316): Ceres Seq. ID no. 12407206
  misc_feature (49)..(287): Pfam Name: Tetraspanin family Pfam Description: Tetraspanin family
  misc_feature (44)..(316): Homolog of NCBI NO: 29367553 NR Description: senescence-associated protein-like protein [Oryza
  misc_feature (46)..(313): Homolog of NCBI NO: 3551954 NR Description: senescence-associated protein 5 [Hemerocallis
  misc_feature (47)..(307): Homolog of NCBI NO: 20197174 NR Description: hypothetical protein [Arabidopsis thaliana]
  misc_feature (49)..(303): Homolog of NCBI NO: 15234374 NR Description: senescence-associated protein -like; protein id: supported by cDNA: 39831., supported by cDNA: gi_17065395, by cDNA: gi_20148628 [Arabidopsis thaliana]
  misc_feature (47)..(315): Homolog of NCBI NO: 15234743 NR Description: senescence-associated protein homolog; protein
  misc_feature (47)..(315): Homolog of NCBI NO: 21537169 NR Description: senescence-associated protein-like protein
  misc_feature (47)..(303): Homolog of NCBI NO: 15238641 NR Description: senescence-associated protein - like; protein id:
  misc_feature (47)..(305): Homolog of NCBI NO: 15231187 NR Description: putative protein; protein id: At3g45600.1, by cDNA: 11427., supported by cDNA: gi_14423445 [Arabidopsis
  misc_feature (48)..(315): Homolog of NCBI NO: 17979386 NR Description: putative senescence-associated protein 5
  misc_feature (48)..(315): Homolog of NCBI NO: 15237490 NR Description: senescence-associated protein 5-like protein; id: At5g46700.1, supported by cDNA: gi_17979385 [Arabidopsis
STQHGVPVPSHHRPKQNRTHPASGPPTPNPTPTPASSRRRPAAMAFRLSNNLIGVLNFVTFLLSVPILGAGIWLGHRADGTECERYLSAPVIALGAFLLAVSLAGLVGACCRVTWLLWAYLLAMFVLILVLFCFTVFAFVVTNRGAGEAVSGRGYKEYRLGDYSNWLQKRVENTRNWDRIRSCLQDSKVCKSLQDKNETVAQFMSSSLSPIESGCCKPPTSCGYTYVGGTDWTPVTTNSTDPDCKTWSNDASALCYNCQSCKAGVVATFQRNWKRVAVVCIVFLVFIIIVYSVGCCAFRNNRRDNAYRGGWKGGYA

SEQ ID NO: 7591 - protein, 273 aa, Zea mays subsp. mays; identical to SEQ ID NO: 2104
  peptide (1)..(273): Ceres Seq. ID no. 12407207
  misc_feature (6)..(244): Pfam Name: Tetraspanin family Pfam Description: Tetraspanin family
  misc_feature (1)..(273): Homolog of NCBI NO: 29367553 NR Description: senescence-associated protein-like protein [Oryza
  misc_feature (3)..(270): Homolog of NCBI NO: 3551954 NR Description: senescence-associated protein 5 [Hemerocallis
  misc_feature (4)..(264): Homolog of NCBI NO: 20197174 NR Description: hypothetical protein [Arabidopsis thaliana]
  misc_feature (6)..(260): Homolog of NCBI NO: 15234374 NR Description: senescence-associated protein -like; protein id: supported by cDNA: 39831., supported by cDNA: gi_17065395, by cDNA: gi_20148628 [Arabidopsis thaliana]
  misc_feature (4)..(272): Homolog of NCBI NO: 15234743 NR Description: senescence-associated protein homolog; protein
  misc_feature (4)..(272): Homolog of NCBI NO: 21537169 NR Description: senescence-associated protein-like protein
  misc_feature (4)..(260): Homolog of NCBI NO: 15238641 NR Description: senescence-associated protein - like; protein id:
  misc_feature (4)..(262): Homolog of NCBI NO: 15231187 NR Description: putative protein; protein id: At3g45600.1, by cDNA: 11427., supported by cDNA: gi_14423445 [Arabidopsis
  misc_feature (5)..(272): Homolog of NCBI NO: 17979386 NR Description: putative senescence-associated protein 5
  misc_feature (5)..(272): Homolog of NCBI NO: 15237490 NR Description: senescence-associated protein 5-like protein; id: At5g46700.1, supported by cDNA: gi_17979385 [Arabidopsis

SEQ ID NO: 7592 - protein, 193 aa, Zea mays subsp. mays
  peptide (1)..(193): Ceres Seq. ID no. 12407208
  misc_feature (1)..(164): Pfam Name: Tetraspanin family Pfam Description: Tetraspanin family
  misc_feature (1)..(193): Homolog of NCBI NO: 29367553 NR Description: senescence-associated protein-like protein [Oryza
  misc_feature (1)..(190): Homolog of NCBI NO: 3551954 NR Description: senescence-associated protein 5 [Hemerocallis
  misc_feature (1)..(184): Homolog of NCBI NO: 20197174 NR Description: hypothetical protein [Arabidopsis thaliana]
  misc_feature (1)..(180): Homolog of NCBI NO: 15234374 NR Description: senescence-associated protein -like; protein id: supported by cDNA: 39831., supported by cDNA: gi_17065395, by cDNA: gi_20148628 [Arabidopsis thaliana]
  misc_feature (1)..(192): Homolog of NCBI NO: 15234743 NR Description: senescence-associated protein homolog; protein
  misc_feature (1)..(192): Homolog of NCBI NO: 21537169 NR Description: senescence-associated protein-like protein
  misc_feature (1)..(180): Homolog of NCBI NO: 15238641 NR Description: senescence-associated protein - like; protein id:
  misc_feature (1)..(182): Homolog of NCBI NO: 15231187 NR Description: putative protein; protein id: At3g45600.1, by cDNA: 11427., supported by cDNA: gi_14423445 [Arabidopsis
  misc_feature (1)..(192): Homolog of NCBI NO: 17979386 NR Description: putative senescence-associated protein 5
  misc_feature (1)..(192): Homolog of NCBI NO: 15237490 NR Description: senescence-associated protein 5-like protein; id: At5g46700.1, supported by cDNA: gi_17979385 [Arabidopsis
MFVLILVLFCFTVFAFVVTNRGAGEAVSGRGYKEYRLGDYSNWLQKRVENTRNWDRIRSCLQDSKVCKSLQDKNETVAQFMSSSLSPIESGCCKPPTSCGYTYVGGTDWTPVTTNSTDPDCKTWSNDASALCYNCQSCKAGVVATFQRNWKRVAVVCIVFLVFIIIVYSVGCCAFRNNRRDNAYRGGWKGGYA

SEQ ID NO: 7593 - DNA, 927 bp, Zea mays subsp. mays
  misc_feature (1)..(927): Ceres Seq. ID no. 12408690
  misc_feature: MA Experiment ID: 108528 Result: Up-regulated in Transcription
  misc_feature: MA Experiment 108528 PARAMETER Experiment Name: Zm_Imbibed_Seeds_P Parameter: Age (day) Value: 5 vs. 2
  misc_feature: MA Experiment 108528 PARAMETER Experiment Name: Zm_Imbibed_Seeds_P Parameter: Organism Value: Zea mays
  misc_feature: MA Experiment 108528 PARAMETER Experiment Name: Zm_Imbibed_Seeds_P Parameter: Plant Line Value: 35A19
  misc_feature: MA Experiment 108528 PARAMETER Experiment Name: Zm_Imbibed_Seeds_P Parameter: Tissue Value: Aerial vs. Embryo
  misc_feature: MA Experiment ID: 108530 Result: Up-regulated in Transcription
  misc_feature: MA Experiment 108530 PARAMETER Experiment Name: Zm_Imbibed_Seeds_P Parameter: Age (day) Value: 6 vs. 2
  misc_feature: MA Experiment 108530 PARAMETER Experiment Name: Zm_Imbibed_Seeds_P Parameter: Organism Value: Zea mays
  misc_feature: MA Experiment 108530 PARAMETER Experiment Name: Zm_Imbibed_Seeds_P Parameter: Plant Line Value: 35A19
  misc_feature: MA Experiment 108530 PARAMETER Experiment Name: Zm_Imbibed_Seeds_P Parameter: Tissue Value: Aerial vs. Embryo
gtctcctcccgctccccttgcacccgaacccaagccccagtctccacgcgagcggcacacgacgggtgccctggcccccgcgccaccgccgccgctgcctcgcgacgccgccgtcgcggaacgggagctcctcctcgccggagattgactggtgcccggtgcctccggaccagctccccgtgaacgagtacgaggcgctcgcggcctccctgcccttctcctgggcggcggggggcctccgcgtctactgctcccgcctcgcgctcacgggcgccgccgtcgcgctcttcgtcgggctcccggtcgccgccttcgggggccgcggcggggccggcggcgacgctctgcacctcgcgctcggcgccacggggtccgggatcctcgccgtcacgctcgctgtcgtgcggatgtacctcgggtgggcctacgtcggcaaccgcctgctcagcgccacagtggagtatgaggaaacgggatggtatgatggtcagatatgggttaaaactccagaagttttagctcgtgatcggcttctaggctcattttctgtcaagcctgtgctaaacagggtgaagttcaccttggtgggtctggcaggctccctgatcctttgcattcttctgtacgtgaacacggaaaccccaaaggaaccttatggaaataccggtggaaggtctatcccgggagtgtacagcgacgctgctgcaaggtcgtttgagcccgatgcattctgtggagaacctgatttgtcgtagcatcgtaaagcgtggagcatggaaggtttgtagatggcggtatatggtctcacagggtatatacgggggtttctgtacggggtttctgatccatcaaactagggtaatgtaaatatttggccacacccacactagtatcgacattttagacgcaagcctcttatgaaaattc

SEQ ID NO: 7594 - protein, 250 aa, Zea mays subsp. mays
  peptide (1)..(250): Ceres Seq. ID no. 12408691
  misc_feature (46)..(247): Homolog of NCBI NO: 15239796 NR Description: putative protein; protein id: At5g11840.1
  misc_feature (38)..(221): Homolog of NCBI NO: 15240715 NR Description: putative protein; protein id: At5g67370.1, by cDNA: gi_13430429, supported by cDNA: gi_15293188 [Arabidopsis >gi|9758436|dbj|BAB09022.1| gb|AAC18972.1~gene_id:K8K14.9~similar
  misc_feature (38)..(208): Homolog of NCBI NO: 40736997 NR Description: expressed protein [Oryza sativa (japonica
  misc_feature (51)..(208): Homolog of NCBI NO: 17231662 NR Description: hypothetical protein [Nostoc sp. PCC 7120]
  misc_feature (51)..(202): Homolog of NCBI NO: 23123845 NR Description: hypothetical protein [Nostoc punctiforme]
  misc_feature (53)..(198): Homolog of NCBI NO: 37520418 NR Description: hypothetical protein [Gloeobacter violaceus]
  misc_feature (50)..(209): Homolog of NCBI NO: 11467354 NR Description: ycf36 [Cyanophora paradoxa] Hypothetical 18.6 kDa protein ycf36 >gi|7448726|pir||T06899
  misc_feature (44)..(208): Homolog of NCBI NO: 16331827 NR Description: hypothetical protein [Synechocystis sp. PCC 6803]
  misc_feature (51)..(197): Homolog of NCBI NO: 22298607 NR Description: ORF_ID:tll1063~hypothetical protein
  misc_feature (52)..(205): Homolog of NCBI NO: 23040962 NR Description: hypothetical protein [Trichodesmium erythraeum
LLPLPLHPNPSPSLHASGTRRVPWPPRHRRRCLATPPSRNGSSSSPEIDWCPVPPDQLPVNEYEALAASLPFSWAAGGLRVYCSRLALTGAAVALFVGLPVAAFGGRGGAGGDALHLALGATGSGILAVTLAVVRMYLGWAYVGNRLLSATVEYEETGWYDGQIWVKTPEVLARDRLLGSFSVKPVLNRVKFTLVGLAGSLILCILLYVNTETPKEPYGNTGGRSIPGVYSDAAARSFEPDAFCGEPDLS

SEQ ID NO: 7595 - DNA, 1833 bp, Zea mays subsp. mays
  misc_feature (1)..(1833): Ceres Seq. ID no. 12406205
  misc_feature: MA Experiment ID: 108528 Result: Up-regulated in Transcription
  misc_feature: MA Experiment 108528 PARAMETER Experiment Name: Zm_Imbibed_Seeds_P Parameter: Age (day) Value: 5 vs. 2
  misc_feature: MA Experiment 108528 PARAMETER Experiment Name: Zm_Imbibed_Seeds_P Parameter: Organism Value: Zea mays
  misc_feature: MA Experiment 108528 PARAMETER Experiment Name: Zm_Imbibed_Seeds_P Parameter: Plant Line Value: 35A19
  misc_feature: MA Experiment 108528 PARAMETER Experiment Name: Zm_Imbibed_Seeds_P Parameter: Tissue Value: Aerial vs. Embryo
  misc_feature: MA Experiment ID: 108530 Result: Up-regulated in Transcription
  misc_feature: MA Experiment 108530 PARAMETER Experiment Name: Zm_Imbibed_Seeds_P Parameter: Age (day) Value: 6 vs. 2
  misc_feature: MA Experiment 108530 PARAMETER Experiment Name: Zm_Imbibed_Seeds_P Parameter: Organism Value: Zea mays
  misc_feature: MA Experiment 108530 PARAMETER Experiment Name: Zm_Imbibed_Seeds_P Parameter: Plant Line Value: 35A19
  misc_feature: MA Experiment 108530 PARAMETER Experiment Name: Zm_Imbibed_Seeds_P Parameter: Tissue Value: Aerial vs. Embryo
  misc_feature: MA Experiment ID: 108535 Result: Down-regulated in Transcription
  misc_feature: MA Experiment 108535 PARAMETER Experiment Name: Zm_Meristem_P Parameter: Age (day) Value: 8
  misc_feature: MA Experiment 108535 PARAMETER Experiment Name: Zm_Meristem_P Parameter: Organism Value: Zea mays
  misc_feature: MA Experiment 108535 PARAMETER Experiment Name: Zm_Meristem_P Parameter: Plant Line Value: 35A19
  misc_feature: MA Experiment 108535 PARAMETER Experiment Name: Zm_Meristem_P Parameter: Tissue Value: Root Meristem vs. Above Root Meristem
  misc_feature: MA Experiment ID: 108545 Result: Up-regulated in Transcription
  misc_feature: MA Experiment 108545 PARAMETER Experiment Name: Zm_Imbibed_Seeds_P Parameter: Age (day) Value: 3 vs. 2
  misc_feature: MA Experiment 108545 PARAMETER Experiment Name: Zm_Imbibed_Seeds_P Parameter: Organism Value: Zea mays
  misc_feature: MA Experiment 108545 PARAMETER Experiment Name: Zm_Imbibed_Seeds_P Parameter: Plant Line Value: 35A19
  misc_feature: MA Experiment 108545 PARAMETER Experiment Name: Zm_Imbibed_Seeds_P Parameter: Tissue Value: Aerial vs. Embryo
  misc_feature: MA Experiment ID: 108547 Result: Up-regulated in Transcription
  misc_feature: MA Experiment 108547 PARAMETER Experiment Name: Zm_Imbibed_Seeds_P Parameter: Age (day) Value: 4 vs. 2
  misc_feature: MA Experiment 108547 PARAMETER Experiment Name: Zm_Imbibed_Seeds_P Parameter: Organism Value: Zea mays
  misc_feature: MA Experiment 108547 PARAMETER Experiment Name: Zm_Imbibed_Seeds_P Parameter: Plant Line Value: 35A19
  misc_feature: MA Experiment 108547 PARAMETER Experiment Name: Zm_Imbibed_Seeds_P Parameter: Tissue Value: Aerial vs. Embryo
  misc_feature: MA Experiment ID: 108687 Result: Down-regulated in Transcription
  misc_feature: MA Experiment 108687 PARAMETER Experiment Name: Zm_Embryos-Flowers__P Parameter: Tissue Value: Embryo vs. Aerial+
  misc_feature: MA Experiment ID: 20000480 Result: Up-regulated in Transcription
  misc_feature: MA Experiment 20000480 PARAMETER Experiment Name: Zm_Drought_P Parameter: Age (day) Value: 11
  misc_feature: MA Experiment 20000480 PARAMETER Experiment Name: Zm_Drought_P Parameter: Organism Value: Zea mays
  misc_feature: MA Experiment 20000480 PARAMETER Experiment Name: Zm_Drought_P Parameter: Plant Line Value: 35A19
  misc_feature: MA Experiment 20000480 PARAMETER Experiment Name: Zm_Drought_P Parameter: Timepoint (hr) Value: 72
  misc_feature: MA Experiment 20000480 PARAMETER Experiment Name: Zm_Drought_P Parameter: Tissue Value: Aerial
  misc_feature: MA Experiment 20000480 PARAMETER Experiment Name: Zm_Drought_P Parameter: Treatment Value: Drought vs. No Drought
  misc_feature: MA Experiment ID: 20000535 Result: Down-regulated in Transcription
  misc_feature: MA Experiment 20000535 PARAMETER Experiment Name: Zm_Hybrid_Seed_Dev_P Parameter: DAP Value: 30 vs. 12
  misc_feature: MA Experiment 20000535 PARAMETER Experiment Name: Zm_Hybrid_Seed_Dev_P Parameter: Organism Value: Zea mays
  misc_feature: MA Experiment 20000535 PARAMETER Experiment Name: Zm_Hybrid_Seed_Dev_P Parameter: Plant Line Value: 35A19
  misc_feature: MA Experiment 20000535 PARAMETER Experiment Name: Zm_Hybrid_Seed_Dev_P Parameter: Tissue Value: Embryo vs. Unfert Floret
aaaaagaagctagaacacgctaacaagacaacaaggtgagtagtttcttgctccaaccgccttacctgccgttgactcgcttgctgcctcggctcatggggcgctactacctgtaggatcatggggcgcgggcgcggccacctcctgctgccggcagcagccgcctgcctgtgggcgctgtcgtgcgcgctgctgctgcgcgcgtcccctcaccgcgctggcgccggcgccggcgggctgctgagggtcgggctcagcaggcgcggcggcgggctcgaccagcgcgcgctggcggcggccaaggccgcgaggcagcaggaggcaagccgtctcggggcctccgncggcggcgacgtccctctcgtcgactacctcaacacccagtactatggggtcgtcggcatcggcacaccgccgcagaacttcaccgtcatcttcgacaccggcagctccaacctctgggtcccctcctccagatgctacttctcgattgcctgctacctgcaccacagatacaagtcggccaagtctagcacgtacaaggcggacggcgagacctgcaagatcacctacggctccggctcgatcgccgggttcttcagcgacgacgacgtgctggtcggggacctgaccgtcaaaaaccagaagttcatcgagacaacgcgcgaaagcagcgtaacgttcataatcggcaagttcgacggcatcctcggtctcggataccccgagatctccgtcggcaaggctcctccgatctggcagagcatgcaggagcaggagctgctggcggaggacgtcttctccttctggctgaaccggagcccggacgcggacgcagcgtccggcggcgagctcgtcttcggcggcgtcgaccctgcgcacttcagcgggaaccacacctacgtccccgtctcccgcaagggatactggcagttcgacatgggggaccttctcatcgacggccactccaccggtttctgcgccaaggggtgcgctgccatcgtcgactccgggacttccttgctcgctggcccaacggccataattgcccaggtgaacgaagcgatcggggcagacgggatcatcancacggagtgcaaggnagttgtgagccagtacggagagatgatcctcgacatgctcatcgcacagacggatccacagagggtgtgcagccaggttggtctgtgcgtgttcgatggcgctcgatctgtcagcgaggggattgaatctgttgtcgggaaagaaaacctgggctcagatgtcatgtgctcggcctgtcagatggctgtcgtgtggatagagaaccagtccgcgaaaacaagaccaaggagntcatactgcagtacgctaaccagctgtgtgagcgtctgccgagccccaacggagagtcaacagtcagctgccaggagatctccaagatgcccagccttgcgttcaccatcgcaaacaagaccttcaccctaacacccgagcagtacattgtgaagctggagcaaggaggccaaaccgtctgcatcagtgggttcatggcgtatgacgtgccaccgccgcgtggtcctctctggattcttggggacgtcttcatgggagcttaccacacggtgttcgacttcggcaacgacaggattgnttcgcggaatctgcatgagtgtggagagcactctcatctttataaagacgataccctatgtattagggatgtgtagtttattgtctatccactacatgccaacagtacgccgcaaataaatcggtggccaaaattgctgaaaccagaaacgtgaacagtactgctttctttgtttctggagaagagcaaatggatgcttc

SEQ ID NO: 7596 - protein, 448 aa, Zea mays subsp. mays
  peptide (1)..(448): Ceres Seq. ID no. 12406206
  misc_feature (40)..(365): Pfam Name: Eukaryotic aspartyl protease Pfam Description: Eukaryotic aspartyl protease
  misc_feature (7)..(404): Homolog of NCBI NO: 1168537 NR Description: Aspartic proteinase precursor
  misc_feature (19)..(402): Homolog of NCBI NO: 1168536 NR Description: Phytepsin precursor (Aspartic proteinase)
  misc_feature (20)..(402): Homolog of NCBI NO: 2499819 NR Description: Aspartic proteinase oryzasin 1 precursor
  misc_feature (40)..(428): Homolog of NCBI NO: 21616051 NR Description: aspartic proteinase [Theobroma cacao]
  misc_feature (39)..(397): Homolog of NCBI NO: 1354272 NR Description: aspartic proteinase [Arabidopsis thaliana]
  misc_feature (39)..(397): Homolog of NCBI NO: 15221141 NR Description: putative aspartic proteinase; protein id: supported by cDNA: 8972., supported by cDNA: gi_15912218, by cDNA: gi_15912250, supported by cDNA: gi_17381035 [Arabidopsis
  misc_feature (13)..(397): Homolog of NCBI NO: 7435839 NR Description: aspartic proteinase precursor, wound-induced - >gi|951449|gb|AAB18280.1| aspartic protease precursor
  misc_feature (44)..(402): Homolog of NCBI NO: 5822248 NR Description: Chain A, Crystal Structure Of Prophytepsin, A Of A Barley Vacuolar Aspartic Proteinase. >gi|5822249|pdb|1QDM|B B, Crystal Structure Of Prophytepsin, A Zymogen Of A Barley
  misc_feature (39)..(428): Homolog of NCBI NO: 22330379 NR Description: aspartic protease, putative; protein id: supported by cDNA: gi_17979427 [Arabidopsis thaliana] putative aspartic protease [Arabidopsis thaliana]
  misc_feature (19)..(428): Homolog of NCBI NO: 2811025 NR Description: Aspartic proteinase precursor
  misc_feature (75)..(75): Xaa is any aa, unknown or other
  misc_feature (323)..(323): Xaa is any aa, unknown or other
  misc_feature (328)..(328): Xaa is any aa, unknown or other
  misc_feature (405)..(405): Xaa is any aa, unknown or other
MGRGRGHLLLPAAAACLWALSCALLLRASPHRAGAGAGGLLRVGLSRRGGGLDQRALAAAKAARQQEASRLGASXGGDVPLVDYLNTQYYGVVGIGTPPQNFTVIFDTGSSNLWVPSSRCYFSIACYLHHRYKSAKSSTYKADGETCKITYGSGSIAGFFSDDDVLVGDLTVKNQKFIETTRESSVTFIIGKFDGILGLGYPEISVGKAPPIWQSMQEQELLAEDVFSFWLNRSPDADAASGGELVFGGVDPAHFSGNHTYVPVSRKGYWQFDMGDLLIDGHSTGFCAKGCAAIVDSGTSLLAGPTAIIAQVNEAIGADGIIXTECKXVVSQYGEMILDMLIAQTDPQRVCSQVGLCVFDGARSVSEGIESVVGKENLGSDVMCSACQMAVVWIENQSAKTRPRXSYCSTLTSCVSVCRAPTESQQSAARRSPRCPALRSPSQTRPSP

SEQ ID NO: 7597 - protein, 233 aa, Zea mays subsp. mays
  peptide (1)..(233): Ceres Seq. ID no. 12406207
  misc_feature (1)..(150): Pfam Name: Eukaryotic aspartyl protease Pfam Description: Eukaryotic aspartyl protease
  misc_feature (1)..(189): Homolog of NCBI NO: 1168537 NR Description: Aspartic proteinase precursor
  misc_feature (1)..(187): Homolog of NCBI NO: 1168536 NR Description: Phytepsin precursor (Aspartic proteinase)
  misc_feature (1)..(187): Homolog of NCBI NO: 2499819 NR Description: Aspartic proteinase oryzasin 1 precursor
  misc_feature (1)..(213): Homolog of NCBI NO: 21616051 NR Description: aspartic proteinase [Theobroma cacao]
  misc_feature (1)..(182): Homolog of NCBI NO: 1354272 NR Description: aspartic proteinase [Arabidopsis thaliana]
  misc_feature (1)..(182): Homolog of NCBI NO: 15221141 NR Description: putative aspartic proteinase; protein id: supported by cDNA: 8972., supported by cDNA: gi_15912218, by cDNA: gi_15912250, supported by cDNA: gi_17381035 [Arabidopsis
  misc_feature (1)..(182): Homolog of NCBI NO: 7435839 NR Description: aspartic proteinase precursor, wound-induced - >gi|951449|gb|AAB18280.1| aspartic protease precursor
  misc_feature (1)..(187): Homolog of NCBI NO: 5822248 NR Description: Chain A, Crystal Structure Of Prophytepsin, A Of A Barley Vacuolar Aspartic Proteinase. >gi|5822249|pdb|1QDM|B B, Crystal Structure Of Prophytepsin, A Zymogen Of A Barley
  misc_feature (1)..(213): Homolog of NCBI NO: 22330379 NR Description: aspartic protease, putative; protein id: supported by cDNA: gi_17979427 [Arabidopsis thaliana] putative aspartic protease [Arabidopsis thaliana]
  misc_feature (1)..(213): Homolog of NCBI NO: 2811025 NR Description: Aspartic proteinase precursor
  misc_feature (108)..(108): Xaa is any aa, unknown or other
  misc_feature (113)..(113): Xaa is any aa, unknown or other
  misc_feature (190)..(190): Xaa is any aa, unknown or other
MQEQELLAEDVFSFWLNRSPDADAASGGELVFGGVDPAHFSGNHTYVPVSRKGYWQFDMGDLLIDGHSTGFCAKGCAAIVDSGTSLLAGPTAIIAQVNEAIGADGIIXTECKXVVSQYGEMILDMLIAQTDPQRVCSQVGLCVFDGARSVSEGIESVVGKENLGSDVMCSACQMAVVWIENQSAKTRPRXSYCSTLTSCVSVCRAPTESQQSAARRSPRCPALRSPSQTRPSP

SEQ ID NO: 7598 - DNA, 1732 bp, Zea mays subsp. mays
  misc_feature (1)..(1732): Ceres Seq. ID no. 12373520
  misc_feature: MA Experiment ID: 108689 Result: Up-regulated in Transcription
  misc_feature: MA Experiment 108689 PARAMETER Experiment Name: Zm_Drought_Roots_P Parameter: Age (day) Value: 9
  misc_feature: MA Experiment 108689 PARAMETER Experiment Name: Zm_Drought_Roots_P Parameter: Organism Value: Zea mays
  misc_feature: MA Experiment 108689 PARAMETER Experiment Name: Zm_Drought_Roots_P Parameter: Plant Line Value: 35A19
  misc_feature: MA Experiment 108689 PARAMETER Experiment Name: Zm_Drought_Roots_P Parameter: Timepoint (hr) Value: 24
  misc_feature: MA Experiment 108689 PARAMETER Experiment Name: Zm_Drought_Roots_P Parameter: Tissue Value: Roots
  misc_feature: MA Experiment 108689 PARAMETER Experiment Name: Zm_Drought_Roots_P Parameter: Treatment Value: Drought vs. No Drought
aaaatcaaacagaaccggagtgtcagattcagaaacaataggcagcagctagagcaagcagcatcgcagcatcgcagcagacgccaccgtcacgccaccgcgccgagagagaaaagccgagcggtggcaggcgaggggacgcctgccgcggtgggttggtgggtgccgcctccgcatccggtgccgctgctctgttcctcagtccgcccccatttacctcgcatggattcctgcttgcttctccccaactccacgcgccgatcctccaacctccaggagagcgcgacgcgatccaattgaggtccaggaggtggagggtgcctgcgctgtccgtgtgttcccctttgtttccatcccaagcctggccgcgccgccgctggacgccatcgcgcgcctgcacagcgtcttggtgaggtggtcgaagcagcggcggcggccgcagctcgggagacccggcgcgaggaagcggtggccgagccggcggagcgcgatgctgtgggtggcgcgcctgtccggcttgttatccgccgccatggtggtggtggtgctgtcgccgtcgctccagtccttcccgcccgccgaggccatccggtcgtcgcagttcgacggcagcgtccgcttcccgggacagatcgcagggggcgccaggggggtcgccttccgccgcgccccgccgttccgcaatgccgccgactgcggcgccggcgcggacaacggcaccggcgccaatgtctgctacccatggctcgtccacatcgcgattacgctcgacaacgaatacctgaggggctccgtcgccgcggtccactcggtggtgcagcacgccaggtgccccgagagcgtcttcttccacttcctcgtctccgacccggggctcggggacctcgtccgcgcggtgttcccgcagctccggttcaaggtctactacctggaccccgggcgcgtccgcgggctcatctccacgtcggtgcggcaggcgctggagcagccgctgaactacgcgcgcaactacctggccgagctcctggagccgtgcgtgcgccgcgccatctacctggactccgacctcgtcgtcgtggacgacgtcgccaagctgtggcgcaccgacctcggcgggcgcaccgtgggcgcgcccgagtactgccacgccaacttcaccaagtacttcacggggcggttctggtcggaccagcggttcgccgggacgttcgcggggcggcggccgtgctacttcaacacgggcgtcatggtggtcgacctggagcggtggcggcaggcgggctacacgcagcgcatcgagcggtggatggaggtacagaagtcggcggcggggcgcatctacgagctggggtcgctgccgcccttcctgctggtgttcgcggggcacgtggcgccgatcgagcaccggtggaaccagcacggcctcggcggcgacaatgtcctgggcagctgccgcgacctgcacccggggcccgtgagcctgctgcattggtccgggtccggcaagccgtgggcgcggctgggcgccgggcggccgtgcccgctcgatgcgctctgggcacccttcgacctgtacggccccggccccggcggcggcgccgaggaggacctacatgtttttttattcgcaaaaaacaaactatatgttctccatcttttttttcttcttcttttcccctttgggctgttggattaaatgttttgtgttagattgttcatgttcgttctcggc

SEQ ID NO: 7599 - protein, 401 aa, Zea mays subsp. mays
  peptide (1)..(401): Ceres Seq. ID no. 12373521
  misc_feature (1)..(363): Homolog of NCBI NO: 22331906 NR Description: putative protein; protein id: At3g62660.1, by cDNA: gi_20465548 [Arabidopsis thaliana] unknown protein [Arabidopsis thaliana]
  misc_feature (6)..(363): Homolog of NCBI NO: 11281926 NR Description: hypothetical protein F26K9.90 - Arabidopsis >gi|7362746|emb|CAB83116.1| putative protein [Arabidopsis
  misc_feature (57)..(362): Homolog of NCBI NO: 15235247 NR Description: predicted glycosyl transferase; protein id: supported by cDNA: 21952. [Arabidopsis thaliana]
  misc_feature (1)..(36): Homolog of NCBI NO: 15235247 NR Description: predicted glycosyl transferase; protein id: supported by cDNA: 21952. [Arabidopsis thaliana]
  misc_feature (57)..(362): Homolog of NCBI NO: 21554300 NR Description: putative glycosyl transferase [Arabidopsis
  misc_feature (1)..(36): Homolog of NCBI NO: 21554300 NR Description: putative glycosyl transferase [Arabidopsis
  misc_feature (1)..(362): Homolog of NCBI NO: 15217851 NR Description: hypothetical protein; protein id: At1g02720.1
  misc_feature (57)..(333): Homolog of NCBI NO: 20258800 NR Description: putative glycosyl transferase [Arabidopsis
  misc_feature (1)..(36): Homolog of NCBI NO: 20258800 NR Description: putative glycosyl transferase [Arabidopsis
  misc_feature (56)..(362): Homolog of NCBI NO: 18409445 NR Description: expressed protein; protein id: At1g70090.1, by cDNA: gi_13878002, supported by cDNA: gi_17104732 [Arabidopsis
MLWVARLSGLLSAAMVVVVLSPSLQSFPPAEAIRSSQFDGSVRFPGQIAGGARGVAFRRAPPFRNAADCGAGADNGTGANVCYPWLVHIAITLDNEYLRGSVAAVHSVVQHARCPESVFFHFLVSDPGLGDLVRAVFPQLRFKVYYLDPGRVRGLISTSVRQALEQPLNYARNYLAELLEPCVRRAIYLDSDLVVVDDVAKLWRTDLGGRTVGAPEYCHANFTKYFTGRFWSDQRFAGTFAGRRPCYFNTGVMVVDLERWRQAGYTQRIERWMEVQKSAAGRIYELGSLPPFLLVFAGHVAPIEHRWNQHGLGGDNVLGSCRDLHPGPVSLLHWSGSGKPWARLGAGRPCPLDALWAPFDLYGPGPGGGAEEDLHVFLFAKNKLYVLHLFFLLLFPFGLLD

SEQ ID NO: 7600 - protein, 387 aa, Zea mays subsp. mays
  peptide (1)..(387): Ceres Seq. ID no. 12373522
  misc_feature (1)..(349): Homolog of NCBI NO: 22331906 NR Description: putative protein; protein id: At3g62660.1, by cDNA: gi_20465548 [Arabidopsis thaliana] unknown protein [Arabidopsis thaliana]
  misc_feature (1)..(349): Homolog of NCBI NO: 11281926 NR Description: hypothetical protein F26K9.90 - Arabidopsis >gi|7362746|emb|CAB83116.1| putative protein [Arabidopsis
  misc_feature (43)..(348): Homolog of NCBI NO: 15235247 NR Description: predicted glycosyl transferase; protein id: supported by cDNA: 21952. [Arabidopsis thaliana]
  misc_feature (1)..(22): Homolog of NCBI NO: 15235247 NR Description: predicted glycosyl transferase; protein id: supported by cDNA: 21952. [Arabidopsis thaliana]
  misc_feature (43)..(348): Homolog of NCBI NO: 21554300 NR Description: putative glycosyl transferase [Arabidopsis
  misc_feature (1)..(22): Homolog of NCBI NO: 21554300 NR Description: putative glycosyl transferase [Arabidopsis
  misc_feature (1)..(348): Homolog of NCBI NO: 15217851 NR Description: hypothetical protein; protein id: At1g02720.1
  misc_feature (43)..(319): Homolog of NCBI NO: 20258800 NR Description: putative glycosyl transferase [Arabidopsis
  misc_feature (1)..(22): Homolog of NCBI NO: 20258800 NR Description: putative glycosyl transferase [Arabidopsis
  misc_feature (42)..(348): Homolog of NCBI NO: 18409445 NR Description: expressed protein; protein id: At1g70090.1, by cDNA: gi_13878002, supported by cDNA: gi_17104732 [Arabidopsis
MVVVVLSPSLQSFPPAEAIRSSQFDGSVRFPGQIAGGARGVAFRRAPPFRNAADCGAGADNGTGANVCYPWLVHIAITLDNEYLRGSVAAVHSVVQHARCPESVFFHFLVSDPGLGDLVRAVFPQLRFKVYYLDPGRVRGLISTSVRQALEQPLNYARNYLAELLEPCVRRAIYLDSDLVVVDDVAKLWRTDLGGRTVGAPEYCHANFTKYFTGRFWSDQRFAGTFAGRRPCYFNTGVMVVDLERWRQAGYTQRIERWMEVQKSAAGRIYELGSLPPFLLVFAGHVAPIEHRWNQHGLGGDNVLGSCRDLHPGPVSLLHWSGSGKPWARLGAGRPCPLDALWAPFDLYGPGPGGGAEEDLHVFLFAKNKLYVLHLFFLLLFPFGLLD

SEQ ID NO: 7601 - protein, 322 aa, Zea mays subsp. mays
  peptide (1)..(322): Ceres Seq. ID no. 12373523
MARPHRDYARQRIPEGLRRRGPLGGAARQVPRERLLPLPRLRPGARGPRPRGVPAAPVQGLLPGPRARPRAHLHVGAAGAGAAAELRAQLPGRAPGAVRAPRHLPGLRPRRRGRRRQAVAHRPRRAHRGRARVLPRQLHQVLHGAVLVGPAVRRDVRGAAAVLLQHGRHGGRPGAVAAGGLHAAHRAVDGGTEVGGGAHLRAGVAAALPAGVRGARGADRAPVEPARPRRRQCPGQLPRPAPGAREPAALVRVRQAVGAAGRRAAVPARCALGTLRPVRPRPRRRRRGGPTCFFIRKKQTICSPSFFSSSFPLWAVGLNVLC

SEQ ID NO: 7602 - DNA, 1901 bp, Zea mays subsp. mays
  misc_feature (1)..(1901): Ceres Seq. ID no. 12372730
  misc_feature: MA Experiment ID: 108536 Result: Up-regulated in Transcription
  misc_feature: MA Experiment 108536 PARAMETER Experiment Name: Zm_Meristem_P Parameter: Age (day) Value: 8
  misc_feature: MA Experiment 108536 PARAMETER Experiment Name: Zm_Meristem_P Parameter: Organism Value: Zea mays
  misc_feature: MA Experiment 108536 PARAMETER Experiment Name: Zm_Meristem_P Parameter: Plant Line Value: 35A19
  misc_feature: MA Experiment 108536 PARAMETER Experiment Name: Zm_Meristem_P Parameter: Tissue Value: Shoot Meristem vs. Above Shoot Meristem
  misc_feature: MA Experiment ID: 108559 Result: Down-regulated in Transcription
  misc_feature: MA Experiment 108559 PARAMETER Experiment Name: Zm_5mM_NO_P Parameter: Age (day) Value: 8
  misc_feature: MA Experiment 108559 PARAMETER Experiment Name: Zm_5mM_NO_P Parameter: Organism Value: Zea mays
  misc_feature: MA Experiment 108559 PARAMETER Experiment Name: Zm_5mM_NO_P Parameter: Plant Line Value: 35A19
  misc_feature: MA Experiment 108559 PARAMETER Experiment Name: Zm_5mM_NO_P Parameter: Timepoint (hr) Value: 12
  misc_feature: MA Experiment 108559 PARAMETER Experiment Name: Zm_5mM_NO_P Parameter: Tissue Value: Aerial
  misc_feature: MA Experiment 108559 PARAMETER Experiment Name: Zm_5mM_NO_P Parameter: Treatment Value: 5mM NO vs. No Treatment
gcacgagaccattacctagaacatcctaatcgaaaaatcgatacgatgcatgaaaaaggcttaaagagcgcatgcaagctaagcagccatgcccatgccaagatctttccttctccacctcctccttgtcgccagcggcatcgccaatgccggcggcgccgatgacgccctctcgaaggagcccacgccctcctcattccagggagaatggcagctcctccacgcgagcatcggcgtctcggcgatgcacatgcagctgctcccgggagacttggttctcatgttcgaccgcaccgacacgggactctccaacatctcgctcgccgcgctggcgccgtgcgcggcgacccccgacagcgccgactgcacggcgcactcggtgctcctcgacctccgctccaacgtgctgcacccgtacccgctcgccaccaacccgtggtgctcctcgggcgcgctcctccccaacggcacgctcctccagaccggcggcttctccaacggcgaccgcgtcgcgcggctcttctccccggccacggggctgggtcgagctcccgtcgttcctcgccgcgcggaggtggtacgccaccgacatgatccttcccgacgggcgcgtgctcatcctcggcgggcggcgacagttcaacctcgagtacttcccgcacgacggcgcggcgccggcgctgacgttcttcccgttcctggacgagaccacagagccggacgccgagaacaacctgtacccgttcctccacctcctccccgacggcaccgtcttcgtcttcgccaacgaccgcgccgtcgtcttcgacccctacaaccgcgccccgctccggtggctccccgccgtcccgggcggcgtgccgaggaactacccgtcgtccggctcgtccgtgctcctcccgctccgcccggacgcgcccgagcacgccgaggtgctggtctgcggcggcgcgccgcgcggcgcgtaccagctggcgctgcggaacggcacgttcgtgcccgccgaccggacctgcgcccgcgtcgcgccgacggacccggacccagtgtgggcgatcgaggagatgccgctggccagggtgatgggcgacatggtgctgctccccacgggcgacgtgctgatcgtgaacggcgcgncggcggggaccgccgggtgggagctgggccgggagcccgtcacgcggccggtgctgtacaggcccgacgcgccactgggcgcgcggttcgaggcgtcgctggcggcgtcggtggtcccgcgcatgtaccactcgtcggccgcgctggacacgtacggccgcgtgctcgtgggcggcagcaacccgcacgtcgggtacgtgttcaccaacgtgacgcaccccacggagctgagcctggaggcgttcctgccgccgtacatggacccacggcacgacggcgcgcggccgcgggtgctggcggcgccggcagaggtcgggtacggcgaggccacggccgtgcggttcgggatacccgcgggggcggcggatggcgcggctacgggcgaagaggtgcgggtggccgcggtggctccggcgtttgcgacgcactcgttcgggatgaaccagcgcgtggtggagctcgcggtggtgaggatcgcgcagctggacgtcggtgtttacgaggtcgaggtcgccgcgccaccgacgcccggggtggcgccgcccgggtactacatgtggttcgtagtgcacgccggcgtgcccagcagcgccgcgtgggtgcgcatgcggccgctaggaacaggcgcctgagtagctcagactgagggctgatttggtcctcgttggtcaccaaaccagccccgagactttttgcgttctccatgtgtgttttgacttcagtaggacagattcaggttcaactgcacatcaaggtttgcaatg

SEQ ID NO: 7603 - protein, 565 aa, Zea mays subsp. mays
  peptide (1)..(565): Ceres Seq. ID no. 12372731
  misc_feature (15)..(147): Pfam Name: Equine herpesvirus glycoprotein gp2 Pfam Description: Equine herpesvirus glycoprotein gp2
  misc_feature (157)..(558): Homolog of NCBI NO: 25352602 NR Description: F14L17.20 protein - Arabidopsis thaliana Weak similarity to glyoxal oxidase (glx2) from Phanerochaete
  misc_feature (157)..(555): Homolog of NCBI NO: 15223754 NR Description: hypothetical protein; protein id: At1g14430.1
  misc_feature (157)..(558): Homolog of NCBI NO: 15230360 NR Description: putative protein; protein id: At3g57620.1 thaliana] >gi|7485502|pir||T06758 probable galactose oxidase (EC
  misc_feature (157)..(559): Homolog of NCBI NO: 15222300 NR Description: unknown protein; protein id: At1g75620.1 thaliana] >gi|9369366|gb|AAF87115.1|AC006434_11 F10A5.18
  misc_feature (157)..(558): Homolog of NCBI NO: 15223699 NR Description: unknown protein; protein id: At1g19900.1, by cDNA: gi_16604506 [Arabidopsis thaliana]
  misc_feature (157)..(558): Homolog of NCBI NO: 25352604 NR Description: hypothetical protein F6F9.4 [imported] - thaliana >gi|10086483|gb|AAG12543.1|AC007797_3 Unknown Protein
  misc_feature (157)..(558): Homolog of NCBI NO: 34911116 NR Description: putative glyoxal oxidase [Oryza sativa (japonica group)] >gi|20161084|dbj|BAB90014.1| putative glyoxal oxidase
  misc_feature (157)..(558): Homolog of NCBI NO: 15241135 NR Description: putative protein; protein id: At5g19580.1,
  misc_feature (157)..(558): Homolog of NCBI NO: 19310437 NR Description: AT5g19580/T20D1_100 [Arabidopsis thaliana]
  misc_feature (157)..(558): Homolog of NCBI NO: 15232379 NR Description: putative protein; protein id: At3g53950.1, by cDNA: gi_15809875 [Arabidopsis thaliana]
  misc_feature (356)..(356): Xaa is any aa, unknown or other
MQAKQPCPCQDLSFSTSSLSPAASPMPAAPMTPSRRSPRPPHSRENGSSSTRASASRRCTCSCSRETWFSCSTAPTRDSPTSRSPRWRRARRPPTAPTARRTRCSSTSAPTCCTRTRSPPTRGAPRARSSPTARSSRPAASPTATASRGSSPRPRGWVELPSFLAARRWYATDMILPDGRVLILGGRRQFNLEYFPHDGAAPALTFFPFLDETTEPDAENNLYPFLHLLPDGTVFVFANDRAVVFDPYNRAPLRWLPAVPGGVPRNYPSSGSSVLLPLRPDAPEHAEVLVCGGAPRGAYQLALRNGTFVPADRTCARVAPTDPDPVWAIEEMPLARVMGDMVLLPTGDVLIVNGAXAGTAGWELGREPVTRPVLYRPDAPLGARFEASLAASVVPRMYHSSAALDTYGRVLVGGSNPHVGYVFTNVTHPTELSLEAFLPPYMDPRHDGARPRVLAAPAEVGYGEATAVRFGIPAGAADGAATGEEVRVAAVAPAFATHSFGMNQRVVELAVVRIAQLDVGVYEVEVAAPPTPGVAPPGYYMWFVVHAGVPSSAAWVRMRPLGTGA

SEQ ID NO: 7604 - protein, 564 aa, Zea mays subsp. mays
  peptide (1)..(564): Ceres Seq. ID no. 12372732
  misc_feature (41)..(147): Homolog of NCBI NO: 15230360 NR Description: putative protein; protein id: At3g57620.1 thaliana] >gi|7485502|pir||T06758 probable galactose oxidase (EC
  misc_feature (35)..(147): Homolog of NCBI NO: 15222300 NR Description: unknown protein; protein id: At1g75620.1 thaliana] >gi|9369366|gb|AAF87115.1|AC006434_11 F10A5.18
  misc_feature (35)..(147): Homolog of NCBI NO: 15223699 NR Description: unknown protein; protein id: At1g19900.1, by cDNA: gi_16604506 [Arabidopsis thaliana]
  misc_feature (53)..(147): Homolog of NCBI NO: 25352604 NR Description: hypothetical protein F6F9.4 [imported] - thaliana >gi|10086483|gb|AAG12543.1|AC007797_3 Unknown Protein
  misc_feature (33)..(146): Homolog of NCBI NO: 34911116 NR Description: putative glyoxal oxidase [Oryza sativa (japonica group)] >gi|20161084|dbj|BAB90014.1| putative glyoxal oxidase
  misc_feature (35)..(146): Homolog of NCBI NO: 15241135 NR Description: putative protein; protein id: At5g19580.1,
  misc_feature (35)..(146): Homolog of NCBI NO: 19310437 NR Description: AT5g19580/T20D1_100 [Arabidopsis thaliana]
  misc_feature (39)..(147): Homolog of NCBI NO: 15232379 NR Description: putative protein; protein id: At3g53950.1, by cDNA: gi_15809875 [Arabidopsis thaliana]
  misc_feature (24)..(150): Homolog of NCBI NO: 25352602 NR Description: F14L17.20 protein - Arabidopsis thaliana Weak similarity to glyoxal oxidase (glx2) from Phanerochaete
  misc_feature (24)..(150): Homolog of NCBI NO: 15223754 NR Description: hypothetical protein; protein id: At1g14430.1
  misc_feature (350)..(350): Xaa is any aa, unknown or other
MPMPRSFLLHLLLVASGIANAGGADDALSKEPTPSSFQGEWQLLHASIGVSAMHMQLLPGDLVLMFDRTDTGLSNISLAALAPCAATPDSADCTAHSVLLDLRSNVLHPYPLATNPWCSSGALLPNGTLLQTGGFSNGDRVARLFSPATGLGRAPVVPRRAEVVRHRHDPSRRARAHPRRAATVQPRVLPARRRGAGADVLPVPGRDHRAGRREQPVPVPPPPPRRHRLRLRQRPRRRLRPLQPRPAPVAPRRPGRRAEELPVVRLVRAPPAPPGRARARRGAGLRRRAARRVPAGAAERHVRARRPDLRPRRADGPGPSVGDRGDAAGQGDGRHGAAPHGRRADRERRXGGDRRVGAGPGARHAAGAVQARRATGRAVRGVAGGVGGPAHVPLVGRAGHVRPRARGRQQPARRVRVHQRDAPHGAEPGGVPAAVHGPTARRRAAAGAGGAGRGRVRRGHGRAVRDTRGGGGWRGYGRRGAGGRGGSGVCDALVRDEPARGGARGGEDRAAGRRCLRGRGRRATDARGGAARVLHVVRSARRRAQQRRVGAHAAARNRRLSSSD

SEQ ID NO: 7605 - protein, 562 aa, Zea mays subsp. mays
  peptide (1)..(562): Ceres Seq. ID no. 12372733
  misc_feature (22)..(148): Homolog of NCBI NO: 25352602 NR Description: F14L17.20 protein - Arabidopsis thaliana Weak similarity to glyoxal oxidase (glx2) from Phanerochaete
  misc_feature (22)..(148): Homolog of NCBI NO: 15223754 NR Description: hypothetical protein; protein id: At1g14430.1
  misc_feature (39)..(145): Homolog of NCBI NO: 15230360 NR Description: putative protein; protein id: At3g57620.1 thaliana] >gi|7485502|pir||T06758 probable galactose oxidase (EC
  misc_feature (33)..(145): Homolog of NCBI NO: 15222300 NR Description: unknown protein; protein id: At1g75620.1 thaliana] >gi|9369366|gb|AAF87115.1|AC006434_11 F10A5.18
  misc_feature (33)..(145): Homolog of NCBI NO: 15223699 NR Description: unknown protein; protein id: At1g19900.1, by cDNA: gi_16604506 [Arabidopsis thaliana]
  misc_feature (51)..(145): Homolog of NCBI NO: 25352604 NR Description: hypothetical protein F6F9.4 [imported] - thaliana >gi|10086483|gb|AAG12543.1|AC007797_3 Unknown Protein
  misc_feature (31)..(144): Homolog of NCBI NO: 34911116 NR Description: putative glyoxal oxidase [Oryza sativa (japonica group)] >gi|20161084|dbj|BAB90014.1| putative glyoxal oxidase
  misc_feature (33)..(144): Homolog of NCBI NO: 15241135 NR Description: putative protein; protein id: At5g19580.1,
  misc_feature (33)..(144): Homolog of NCBI NO: 19310437 NR Description: AT5g19580/T20D1_100 [Arabidopsis thaliana]
  misc_feature (37)..(145): Homolog of NCBI NO: 15232379 NR Description: putative protein; protein id: At3g53950.1, by cDNA: gi_15809875 [Arabidopsis thaliana]
  misc_feature (348)..(348): Xaa is any aa, unknown or other
MPRSFLLHLLLVASGIANAGGADDALSKEPTPSSFQGEWQLLHASIGVSAMHMQLLPGDLVLMFDRTDTGLSNISLAALAPCAATPDSADCTAHSVLLDLRSNVLHPYPLATNPWCSSGALLPNGTLLQTGGFSNGDRVARLFSPATGLGRAPVVPRRAEVVRHRHDPSRRARAHPRRAATVQPRVLPARRRGAGADVLPVPGRDHRAGRREQPVPVPPPPPRRHRLRLRQRPRRRLRPLQPRPAPVAPRRPGRRAEELPVVRLVRAPPAPPGRARARRGAGLRRRAARRVPAGAAERHVRARRPDLRPRRADGPGPSVGDRGDAAGQGDGRHGAAPHGRRADRERRXGGDRRVGAGPGARHAAGAVQARRATGRAVRGVAGGVGGPAHVPLVGRAGHVRPRARGRQQPARRVRVHQRDAPHGAEPGGVPAAVHGPTARRRAAAGAGGAGRGRVRRGHGRAVRDTRGGGGWRGYGRRGAGGRGGSGVCDALVRDEPARGGARGGEDRAAGRRCLRGRGRRATDARGGAARVLHVVRSARRRAQQRRVGAHAAARNRRLSSSD

SEQ ID NO: 7606 - DNA, 1279 bp, Zea mays subsp. mays
  misc_feature (1)..(1279): Ceres Seq. ID no. 12355346
  misc_feature: MA Experiment ID: 20000534 Result: Down-regulated in Transcription
  misc_feature: MA Experiment 20000534 PARAMETER Experiment Name: Zm_Hybrid_Pollen_P Parameter: Age (day) Value: 8
  misc_feature: MA Experiment 20000534 PARAMETER Experiment Name: Zm_Hybrid_Pollen_P Parameter: Organism Value: Zea mays
  misc_feature: MA Experiment 20000534 PARAMETER Experiment Name: Zm_Hybrid_Pollen_P Parameter: Plant Line Value: 35A19
  misc_feature: MA Experiment 20000534 PARAMETER Experiment Name: Zm_Hybrid_Pollen_P Parameter: Tissue Value: Pollen vs. Aerial
aaaaatactcccgtgttcttcgaccggcggcggtggtgcgaagcgaggcggtaagggagacgagatgagggggacgaagcggccgctcggcgtggtgacgtcgtgggtgcggcggcagccgcccaaggtgaaggccttccttgccgttgtcaccggcatggccgcgctcgtcttcatccgcttcatcgtccacgaccacgacaacctcttcgtcgctgccgaggctgcgcacgcgctcggcataggcgtcctcatctacaagctaaccaaggagaagacctgcgccggactatccctcaagtctcaggatttaactgcattatttctagctgttagactgtactgcagctttgtcatggagtatgacatccatacaattctggacactgctacacttgtagccacactgtttgttatttatatgatacggttcaaactgaggtcaacttatatggtggataaggataactttgcgttgtattatgtggtgttaccgtgtgctggactggcactacttattcatccgtcaacatctcataacattgtgaaccggatctcctgggggttctgtgtttacttggaagctgtttcagtgcttccgcagttacacttgatgcaaaatactaagattgttgaaccctttacagctcactatgtatttgcattgggagttgcaaggtttcttagctgcgcccactgggttctacaggttttggacacgcgtggtcgtctgttgacagctcttggctatggtttgtggccgtctatggtgcttttatcagaaatcgtgcagacattcatccttgcagatttctgctactactatgtgaagagtcttgttggtgggcaactggtgctacggcttccctcaggggtggtgtaagaagtgcagaaggatactttgaataacagttatgctctagtgcccaacctgggagccttttttttagctgatgatgttgcaagtaatgactatgtattacaaaattgctgcaagggtcctcttaaaacatagtttgtcattgagacttcatagctgcgccgtttcttgatgcccaatctccgagtactagcttcgtgtgactgtcgtggtggtcttagaatcaggtggttagtgatctcattggattatagtagtataattatataatgctttcatatgaaacagattgatcttgatgtatcagcagaactagccacgtgaaaatggttggaccaaggtcatcaggtttgtatttacttaacattgggattatcaataggggttcctttctggtcc

SEQ ID NO: 7607 - protein, 293 aa, Zea mays subsp. mays
  peptide (1)..(293): Ceres Seq. ID no. 12355347
  misc_feature (68)..(279): Pfam Name: ER lumen protein retaining receptor Pfam Description: ER lumen protein retaining receptor
  misc_feature (22)..(293): Homolog of NCBI NO: 15222871 NR Description: ER lumen protein retaining receptor, putative; id: At1g75760.1 [Arabidopsis thaliana]
  misc_feature (25)..(293): Homolog of NCBI NO: 18420309 NR Description: expressed protein; protein id: At4g38790.1, by cDNA: 21759. [Arabidopsis thaliana] putative ER lumen protein retaining receptor [Arabidopsis
  misc_feature (26)..(293): Homolog of NCBI NO: 18399619 NR Description: putative ER lumen protein retaining receptor; id: At2g21190.1, supported by cDNA: 126278., supported by cDNA:
  misc_feature (22)..(293): Homolog of NCBI NO: 9369358 NR Description: F10A5.5 [Arabidopsis thaliana]
  misc_feature (26)..(293): Homolog of NCBI NO: 13430654 NR Description: putative ER lumen protein retaining receptor
  misc_feature (26)..(293): Homolog of NCBI NO: 21537286 NR Description: putative ER lumen protein retaining receptor
  misc_feature (22)..(293): Homolog of NCBI NO: 15223724 NR Description: ER lumen protein-retaining receptor; protein id:
  misc_feature (22)..(278): Homolog of NCBI NO: 25518365 NR Description: hypothetical protein T20H2.24 - Arabidopsis >gi|8779000|gb|AAF79915.1|AC022472_24 Contains similarity to ER protein retaining receptor from Caenorhabditis elegans gi|6686285
  misc_feature (26)..(277): Homolog of NCBI NO: 25412019 NR Description: probable ER lumen protein retaining receptor
  misc_feature (23)..(289): Homolog of NCBI NO: 15230808 NR Description: ER lumen protein retaining receptor, putative;
KILPCSSTGGGGAKRGGKGDEMRGTKRPLGVVTSWVRRQPPKVKAFLAVVTGMAALVFIRFIVHDHDNLFVAAEAAHALGIGVLIYKLTKEKTCAGLSLKSQDLTALFLAVRLYCSFVMEYDIHTILDTATLVATLFVIYMIRFKLRSTYMVDKDNFALYYVVLPCAGLALLIHPSTSHNIVNRISWGFCVYLEAVSVLPQLHLMQNTKIVEPFTAHYVFALGVARFLSCAHWVLQVLDTRGRLLTALGYGLWPSMVLLSEIVQTFILADFCYYYVKSLVGGQLVLRLPSGVV

SEQ ID NO: 7608 - protein, 272 aa, Zea mays subsp. mays
  peptide (1)..(272): Ceres Seq. ID no. 12355348
  misc_feature (47)..(258): Pfam Name: ER lumen protein retaining receptor Pfam Description: ER lumen protein retaining receptor
  misc_feature (1)..(272): Homolog of NCBI NO: 15222871 NR Description: ER lumen protein retaining receptor, putative; id: At1g75760.1 [Arabidopsis thaliana]
  misc_feature (4)..(272): Homolog of NCBI NO: 18420309 NR Description: expressed protein; protein id: At4g38790.1, by cDNA: 21759. [Arabidopsis thaliana] putative ER lumen protein retaining receptor [Arabidopsis
  misc_feature (5)..(272): Homolog of NCBI NO: 18399619 NR Description: putative ER lumen protein retaining receptor; id: At2g21190.1, supported by cDNA: 126278., supported by cDNA:
  misc_feature (1)..(272): Homolog of NCBI NO: 9369358 NR Description: F10A5.5 [Arabidopsis thaliana]
  misc_feature (5)..(272): Homolog of NCBI NO: 13430654 NR Description: putative ER lumen protein retaining receptor
  misc_feature (5)..(272): Homolog of NCBI NO: 21537286 NR Description: putative ER lumen protein retaining receptor
  misc_feature (1)..(272): Homolog of NCBI NO: 15223724 NR Description: ER lumen protein-retaining receptor; protein id:
  misc_feature (1)..(257): Homolog of NCBI NO: 25518365 NR Description: hypothetical protein T20H2.24 - Arabidopsis >gi|8779000|gb|AAF79915.1|AC022472_24 Contains similarity to ER protein retaining receptor from Caenorhabditis elegans gi|6686285
  misc_feature (5)..(256): Homolog of NCBI NO: 25412019 NR Description: probable ER lumen protein retaining receptor
  misc_feature (2)..(268): Homolog of NCBI NO: 15230808 NR Description: ER lumen protein retaining receptor, putative;
MRGTKRPLGVVTSWVRRQPPKVKAFLAVVTGMAALVFIRFIVHDHDNLFVAAEAAHALGIGVLIYKLTKEKTCAGLSLKSQDLTALFLAVRLYCSFVMEYDIHTILDTATLVATLFVIYMIRFKLRSTYMVDKDNFALYYVVLPCAGLALLIHPSTSHNIVNRISWGFCVYLEAVSVLPQLHLMQNTKIVEPFTAHYVFALGVARFLSCAHWVLQVLDTRGRLLTALGYGLWPSMVLLSEIVQTFILADFCYYYVKSLVGGQLVLRLPSGVV

SEQ ID NO: 7609 - protein, 241 aa, Zea mays subsp. mays
  peptide (1)..(241): Ceres Seq. ID no. 12355349
  misc_feature (16)..(227): Pfam Name: ER lumen protein retaining receptor Pfam Description: ER lumen protein retaining receptor
  misc_feature (1)..(241): Homolog of NCBI NO: 15222871 NR Description: ER lumen protein retaining receptor, putative; id: At1g75760.1 [Arabidopsis thaliana]
  misc_feature (1)..(241): Homolog of NCBI NO: 18420309 NR Description: expressed protein; protein id: At4g38790.1, by cDNA: 21759. [Arabidopsis thaliana] putative ER lumen protein retaining receptor [Arabidopsis
  misc_feature (1)..(241): Homolog of NCBI NO: 18399619 NR Description: putative ER lumen protein retaining receptor; id: At2g21190.1, supported by cDNA: 126278., supported by cDNA:
  misc_feature (1)..(241): Homolog of NCBI NO: 9369358 NR Description: F10A5.5 [Arabidopsis thaliana]
  misc_feature (1)..(241): Homolog of NCBI NO: 13430654 NR Description: putative ER lumen protein retaining receptor
  misc_feature (1)..(241): Homolog of NCBI NO: 21537286 NR Description: putative ER lumen protein retaining receptor
  misc_feature (1)..(241): Homolog of NCBI NO: 15223724 NR Description: ER lumen protein-retaining receptor; protein id:
  misc_feature (1)..(226): Homolog of NCBI NO: 25518365 NR Description: hypothetical protein T20H2.24 - Arabidopsis >gi|8779000|gb|AAF79915.1|AC022472_24 Contains similarity to ER protein retaining receptor from Caenorhabditis elegans gi|6686285
  misc_feature (1)..(225): Homolog of NCBI NO: 25412019 NR Description: probable ER lumen protein retaining receptor
  misc_feature (1)..(237): Homolog of NCBI NO: 15230808 NR Description: ER lumen protein retaining receptor, putative;
MAALVFIRFIVHDHDNLFVAAEAAHALGIGVLIYKLTKEKTCAGLSLKSQDLTALFLAVRLYCSFVMEYDIHTILDTATLVATLFVIYMIRFKLRSTYMVDKDNFALYYVVLPCAGLALLIHPSTSHNIVNRISWGFCVYLEAVSVLPQLHLMQNTKIVEPFTAHYVFALGVARFLSCAHWVLQVLDTRGRLLTALGYGLWPSMVLLSEIVQTFILADFCYYYVKSLVGGQLVLRLPSGVV

SEQ ID NO: 7610 - DNA, 1567 bp, Zea mays subsp. mays
  misc_feature (1)..(1567): Ceres Seq. ID no. 12405983
  misc_feature: MA Experiment ID: 108522 Result: Down-regulated in Transcription
  misc_feature: MA Experiment 108522 PARAMETER Experiment Name: Zm_42deg_Heat_P Parameter: Age (day) Value: 8
  misc_feature: MA Experiment 108522 PARAMETER Experiment Name: Zm_42deg_Heat_P Parameter: Organism Value: Zea mays
  misc_feature: MA Experiment 108522 PARAMETER Experiment Name: Zm_42deg_Heat_P Parameter: Plant Line Value: 35A19
  misc_feature: MA Experiment 108522 PARAMETER Experiment Name: Zm_42deg_Heat_P Parameter: Temperature (deg C) Value: 42 vs. 22
  misc_feature: MA Experiment 108522 PARAMETER Experiment Name: Zm_42deg_Heat_P Parameter: Timepoint (hr) Value: 1
  misc_feature: MA Experiment 108522 PARAMETER Experiment Name: Zm_42deg_Heat_P Parameter: Tissue Value: Aerial
  misc_feature: MA Experiment ID: 108535 Result: Up-regulated in Transcription
  misc_feature: MA Experiment 108535 PARAMETER Experiment Name: Zm_Meristem_P Parameter: Age (day) Value: 8
  misc_feature: MA Experiment 108535 PARAMETER Experiment Name: Zm_Meristem_P Parameter: Organism Value: Zea mays
  misc_feature: MA Experiment 108535 PARAMETER Experiment Name: Zm_Meristem_P Parameter: Plant Line Value: 35A19
  misc_feature: MA Experiment 108535 PARAMETER Experiment Name: Zm_Meristem_P Parameter: Tissue Value: Root Meristem vs. Above Root Meristem
  misc_feature: MA Experiment ID: 108687 Result: Up-regulated in Transcription
  misc_feature: MA Experiment 108687 PARAMETER Experiment Name: Zm_Embryos-Flowers__P Parameter: Tissue Value: Embryo vs. Aerial+
aactctatacagaaaccctggtctgaaagccctcactccaaatctcgcgcactgtcagctgacgccaccgcctgcgccagccctcgccaagccggtgaaaacctcgtgccctccgccgcctccgcccgcctcttccagagtaccgcggtctcatctcctcccgggacgggcatgcagagcacggctgccatcggtctcgttcggccatgcgccgcgcggccactccccacctaccctagcccacggcgcggcgccggcgcgtgcagcggcgccgcacagccgatcctcgcgccccgcggcctctgcctctccgcccgcgccagcctactgccggactcgccgctggaggaggagtaccggagatgcagggccggccggcacgtggccgcggccgggaaggtggcggcggctgatggggccgtagaggaagcggggggagggctcgtcaagacgctgcagctggggtcgctcttcgggctctggtacctcttcaacatctacttcaacatctacaacaagcaggttctgaaggttctgccataccctataaacatcaccacagtgcagtttgccgttggaagtgcccattgctttgtttatgtggatcaccggtatccttaaaaggccaaagatttctggtgcccagctttttgctatccttcctctagctatcgttcataccatgggcaatcttttcacaaacatgagccttggaaaggttgcggtgtcatttacacatactatcaaggccatggaacctttcttctcagttctcctttcagcaattttccttggtgagttgcctacgccttgggttgtgttgtctcttcttccgatcgttggtggtgtggcattggcatcccttactgaggcctcctttaactgggctggattttggagtgcaatggcttcaaatgtaaccttccagtcaaggaatgtgctaagcaagaaacttatggtgaagaaagaggaatctctcgacaacattaatctattttcgataattacagtcatgtcattcttcctgttggccccggtaaccttacttacagaaggtgttaaagttagtccagcagttttgcagtctgctggtttgaacttgaaacagatatacacaaggtcattgattgctgcatgctgcttccatgcataccaacaggtgtcatacatgatcctcgccagggtatccccagtcacacattcagtgggcaattgcgtcaagcgtgtggtggtcattgtgacctcggttctgttcttcaggacccctgtttctcccatcaactcactcggtaccgggatcgctcttgctggagttttcctatactcgcaattgaagaggcttaagcccaagcccaaggctgcttgatcatagacctttgcaggtccatccaatagaacttttgaagttatgctatgccattggaatgattagtgagtgccgtagttagaatgatgtttaaagaagagctaccacttcagcagataatttgtgacttgcttgcattttttggacggatttgttcgtgtattaataattttgcagtgacgatacttctgttgtgctgct

SEQ ID NO: 7611 - protein, 255 aa, Zea mays subsp. mays; identical to SEQ ID NO: 3242
  peptide (1)..(255): Ceres Seq. ID no. 12405984
  misc_feature (1)..(89): Pfam Name: Integral membrane protein DUF6 Pfam Description: Integral membrane protein DUF6
  misc_feature (1)..(255): Homolog of NCBI NO: 7489743 NR Description: glucose-6-phosphate/phosphate-translocator
  misc_feature (1)..(255): Homolog of NCBI NO: 7489742 NR Description: glucose-6-phosphate/phosphate-translocator
  misc_feature (1)..(255): Homolog of NCBI NO: 13991929 NR Description: phosphoenolpyruvate/phosphate translocator [Oryza
  misc_feature (1)..(255): Homolog of NCBI NO: 29647427 NR Description: putative phosphoenolpyruvate/phosphate
  misc_feature (1)..(253): Homolog of NCBI NO: 7489171 NR Description: phosphate/phosphoenolpyruvate translocator
  misc_feature (1)..(255): Homolog of NCBI NO: 7489170 NR Description: phosphate/phosphoenolpyruvate translocator
  misc_feature (1)..(255): Homolog of NCBI NO: 1706110 NR Description: Triose phosphate/phosphate translocator,
  misc_feature (1)..(255): Homolog of NCBI NO: 7546829 NR Description: phosphate/phosphoenolpyruvate translocator
  misc_feature (1)..(255): Homolog of NCBI NO: 15242801 NR Description: phosphate/phosphoenolpyruvate translocator protein id: At5g33320.1, supported by cDNA: 21316., supported by
  misc_feature (1)..(255): Homolog of NCBI NO: 1778141 NR Description: phosphate/phosphoenolpyruvate translocator

SEQ ID NO: 7612 - protein, 227 aa, Zea mays subsp. mays; identical to SEQ ID NO: 3243
  peptide (1)..(227): Ceres Seq. ID no. 12405985
  misc_feature (1)..(61): Pfam Name: Integral membrane protein DUF6 Pfam Description: Integral membrane protein DUF6
  misc_feature (1)..(227): Homolog of NCBI NO: 7489743 NR Description: glucose-6-phosphate/phosphate-translocator
  misc_feature (1)..(227): Homolog of NCBI NO: 7489742 NR Description: glucose-6-phosphate/phosphate-translocator
  misc_feature (1)..(227): Homolog of NCBI NO: 13991929 NR Description: phosphoenolpyruvate/phosphate translocator [Oryza
  misc_feature (1)..(227): Homolog of NCBI NO: 29647427 NR Description: putative phosphoenolpyruvate/phosphate
  misc_feature (1)..(225): Homolog of NCBI NO: 7489171 NR Description: phosphate/phosphoenolpyruvate translocator
  misc_feature (1)..(227): Homolog of NCBI NO: 7489170 NR Description: phosphate/phosphoenolpyruvate translocator
  misc_feature (1)..(227): Homolog of NCBI NO: 1706110 NR Description: Triose phosphate/phosphate translocator,
  misc_feature (1)..(227): Homolog of NCBI NO: 7546829 NR Description: phosphate/phosphoenolpyruvate translocator
  misc_feature (1)..(227): Homolog of NCBI NO: 15242801 NR Description: phosphate/phosphoenolpyruvate translocator protein id: At5g33320.1, supported by cDNA: 21316., supported by
  misc_feature (1)..(227): Homolog of NCBI NO: 1778141 NR Description: phosphate/phosphoenolpyruvate translocator

SEQ ID NO: 7613 - protein, 220 aa, Zea mays subsp. mays; identical to SEQ ID NO: 3244
  peptide (1)..(220): Ceres Seq. ID no. 12405986
  misc_feature (1)..(54): Pfam Name: Integral membrane protein DUF6 Pfam Description: Integral membrane protein DUF6
  misc_feature (1)..(220): Homolog of NCBI NO: 7489743 NR Description: glucose-6-phosphate/phosphate-translocator
  misc_feature (1)..(220): Homolog of NCBI NO: 7489742 NR Description: glucose-6-phosphate/phosphate-translocator
  misc_feature (1)..(220): Homolog of NCBI NO: 13991929 NR Description: phosphoenolpyruvate/phosphate translocator [Oryza
  misc_feature (1)..(220): Homolog of NCBI NO: 29647427 NR Description: putative phosphoenolpyruvate/phosphate
  misc_feature (1)..(218): Homolog of NCBI NO: 7489171 NR Description: phosphate/phosphoenolpyruvate translocator
  misc_feature (1)..(220): Homolog of NCBI NO: 7489170 NR Description: phosphate/phosphoenolpyruvate translocator
  misc_feature (1)..(220): Homolog of NCBI NO: 1706110 NR Description: Triose phosphate/phosphate translocator,
  misc_feature (1)..(220): Homolog of NCBI NO: 7546829 NR Description: phosphate/phosphoenolpyruvate translocator
  misc_feature (1)..(220): Homolog of NCBI NO: 15242801 NR Description: phosphate/phosphoenolpyruvate translocator protein id: At5g33320.1, supported by cDNA: 21316., supported by
  misc_feature (1)..(220): Homolog of NCBI NO: 1778141 NR Description: phosphate/phosphoenolpyruvate translocator

SEQ ID NO: 7614 - DNA, 1555 bp, Zea mays subsp. mays
  misc_feature (1)..(1555): Ceres Seq. ID no. 12352532
  misc_feature: MA Experiment ID: 108535 Result: Up-regulated in Transcription
  misc_feature: MA Experiment 108535 PARAMETER Experiment Name: Zm_Meristem_P Parameter: Age (day) Value: 8
  misc_feature: MA Experiment 108535 PARAMETER Experiment Name: Zm_Meristem_P Parameter: Organism Value: Zea mays
  misc_feature: MA Experiment 108535 PARAMETER Experiment Name: Zm_Meristem_P Parameter: Plant Line Value: 35A19
  misc_feature: MA Experiment 108535 PARAMETER Experiment Name: Zm_Meristem_P Parameter: Tissue Value: Root Meristem vs. Above Root Meristem
  misc_feature: MA Experiment ID: 20000108 Result: Up-regulated in Transcription
  misc_feature: MA Experiment 20000108 PARAMETER Experiment Name: Zm_Root-Tips_P Parameter: Age (day) Value: 12
  misc_feature: MA Experiment 20000108 PARAMETER Experiment Name: Zm_Root-Tips_P Parameter: Organism Value: Zea mays
  misc_feature: MA Experiment 20000108 PARAMETER Experiment Name: Zm_Root-Tips_P Parameter: Tissue Value: Root tips vs. Root mid region    35
  misc_feature: MA Experiment 20000108 PARAMETER Experiment Name: Zm_Root-Tips_P Parameter: Tissue Value: Root tips vs. Root mid region   Sequence Listing-Misc Features (4)
ctcttcgccttttcctcccctactttttcctgctactgttcacgctctacagtacggaggctcctacgtgcaggtagctcccaggaccagatccgaaccctaaccctagccaatttggtcggtgatggaagagcacgtgcctcgaggcggcggcggcgggaggcccccgatcccggcggcggcggcgaggaagccggcgctcgcgcggcactcctcttttgtgaggagtcctgcaaacaatacaaagcctgcaactgagagagcttttgaaggcatggacactgaatttatccctattgtacgatctggtgggtgggctgatattggctccaggcacacaatggaggatgtctttatctgctttgataatttcatgcaagattttggaattgaaagttttgaagaaggacccagtgccttttatgggatttttgatgggcatggtggaaagcatgcagctgattttgtgtgcagtaatttaccaaggtttattgtcgaggatgaggattttcctagggagatagtgaaagcaatgtcctctgcattcttgcaggctgatgcttcttttgcagatgcttgttctctgaactgctctctttcttctggtacaactgctcttgcagcacttgtggttgggagatcacttctggtcgcgaatgctggtgactgccgagcagtactttgtcgtcgtggaaaggcaattgagatgtccagggatcacaaaccatcttgcaacagggagaagatacgtattgaggcattgggtggatatgtcgatgatggctacctgaatgggcagcttaatgtcgctcgagcaattggggactggcatatggaaggcatgaaggcatgtggtggtcttggtcctcttactgccgagcctgaggtaatgacaatggatctaactgatgaggacgaattcctgatcatgggctgtgatgggatctgggatgtattcctcagccaaaatgcagtagattttgctcgccgtaagctccaagaacacaatgacccggctgcctgctgtaaagaactagttgatgaggccattaagaggaagagtggtgataacctttctgtggttgtcgtctgcttcaactctaggccgcctcctgttctaacaactcctaggcctcgtgtacagaggagcatatctgcagaaggcctgagagagctgcagagcttccttgatagtttggccgattgacatggggttctagcagccccactataagttttgacattttccatagcttagcttggaaaataggtttagcatgtgctgtctcataacttcgctgagatggctgctgttgagtaatctagagttgtaaaatatgctgcggctaactgtgtcagcagttgagagcgtttatcagttgagagtatttatcagcatgttgactttgtgagtcctgaatgattagtcggcatttcttaggtctccataaatcggtggttcatcgttgtaaaaggctgttaatgcccttggatattttcctgtattgttcgctttggacaagttattaactgggaaaactgctgtttttgctgc

SEQ ID NO: 7615 - protein, 360 aa, Zea mays subsp. mays
  peptide (1)..(360): Ceres Seq. ID no. 12352533
  misc_feature (59)..(317): Pfam Name: Protein phosphatase 2C Pfam Description: Protein phosphatase 2C
  misc_feature (12)..(358): Homolog of NCBI NO: 20146108 NR Description: protein phosphatase 2C [Mesembryanthemum
  misc_feature (19)..(360): Homolog of NCBI NO: 15224766 NR Description: protein phosphatase 2C (PP2C); protein id: supported by cDNA: gi_12642917, supported by cDNA: gi_14517519, by cDNA: gi_16323271 [Arabidopsis thaliana]
  misc_feature (25)..(356): Homolog of NCBI NO: 21693562 NR Description: DNA-binding protein phosphatase 2C [Nicotiana
  misc_feature (1)..(359): Homolog of NCBI NO: 37536524 NR Description: putative protein phosphatase-2C [Oryza sativa
  misc_feature (55)..(359): Homolog of NCBI NO: 10140768 NR Description: putative protein phosphatase-2C [Oryza sativa]
  misc_feature (27)..(355): Homolog of NCBI NO: 24413992 NR Description: putative DNA-binding protein phosphatase 2C
  misc_feature (53)..(356): Homolog of NCBI NO: 15226152 NR Description: protein phosphatase 2C (PP2C); protein id: supported by cDNA: gi_17979441, supported by cDNA: gi_20259092
  misc_feature (49)..(358): Homolog of NCBI NO: 15230495 NR Description: protein phosphatase 2C (PP2C); protein id:
  misc_feature (54)..(356): Homolog of NCBI NO: 25352221 NR Description: phosphoprotein phosphatase (EC 3.1.3.16) 2C
  misc_feature (18)..(356): Homolog of NCBI NO: 15228717 NR Description: protein phosphatase 2C (PP2C); protein id: supported by cDNA: 20050. [Arabidopsis thaliana]
MEEHVPRGGGGGRPPIPAAAARKPALARHSSFVRSPANNTKPATERAFEGMDTEFIPIVRSGGWADIGSRHTMEDVFICFDNFMQDFGIESFEEGPSAFYGIFDGHGGKHAADFVCSNLPRFIVEDEDFPREIVKAMSSAFLQADASFADACSLNCSLSSGTTALAALVVGRSLLVANAGDCRAVLCRRGKAIEMSRDHKPSCNREKIRIEALGGYVDDGYLNGQLNVARAIGDWHMEGMKACGGLGPLTAEPEVMTMDLTDEDEFLIMGCDGIWDVFLSQNAVDFARRKLQEHNDPAACCKELVDEAIKRKSGDNLSVVVVCFNSRPPPVLTTPRPRVQRSISAEGLRELQSFLDSLAD

SEQ ID NO: 7616 - protein, 310 aa, Zea mays subsp. mays
  peptide (1)..(310): Ceres Seq. ID no. 12352534
  misc_feature (9)..(267): Pfam Name: Protein phosphatase 2C Pfam Description: Protein phosphatase 2C
  misc_feature (1)..(308): Homolog of NCBI NO: 20146108 NR Description: protein phosphatase 2C [Mesembryanthemum
  misc_feature (1)..(310): Homolog of NCBI NO: 15224766 NR Description: protein phosphatase 2C (PP2C); protein id: supported by cDNA: gi_12642917, supported by cDNA: gi_14517519, by cDNA: gi_16323271 [Arabidopsis thaliana]
  misc_feature (1)..(306): Homolog of NCBI NO: 21693562 NR Description: DNA-binding protein phosphatase 2C [Nicotiana
  misc_feature (1)..(309): Homolog of NCBI NO: 37536524 NR Description: putative protein phosphatase-2C [Oryza sativa
  misc_feature (5)..(309): Homolog of NCBI NO: 10140768 NR Description: putative protein phosphatase-2C [Oryza sativa]
  misc_feature (1)..(305): Homolog of NCBI NO: 24413992 NR Description: putative DNA-binding protein phosphatase 2C
  misc_feature (3)..(306): Homolog of NCBI NO: 15226152 NR Description: protein phosphatase 2C (PP2C); protein id: supported by cDNA: gi_17979441, supported by cDNA: gi_20259092
  misc_feature (1)..(308): Homolog of NCBI NO: 15230495 NR Description: protein phosphatase 2C (PP2C); protein id:
  misc_feature (4)..(306): Homolog of NCBI NO: 25352221 NR Description: phosphoprotein phosphatase (EC 3.1.3.16) 2C
  misc_feature (1)..(306): Homolog of NCBI NO: 15228717 NR Description: protein phosphatase 2C (PP2C); protein id: supported by cDNA: 20050. [Arabidopsis thaliana]
MDTEFIPIVRSGGWADIGSRHTMEDVFICFDNFMQDFGIESFEEGPSAFYGIFDGHGGKHAADFVCSNLPRFIVEDEDFPREIVKAMSSAFLQADASFADACSLNCSLSSGTTALAALVVGRSLLVANAGDCRAVLCRRGKAIEMSRDHKPSCNREKIRIEALGGYVDDGYLNGQLNVARAIGDWHMEGMKACGGLGPLTAEPEVMTMDLTDEDEFLIMGCDGIWDVFLSQNAVDFARRKLQEHNDPAACCKELVDEAIKRKSGDNLSVVVVCFNSRPPPVLTTPRPRVQRSISAEGLRELQSFLDSLAD

SEQ ID NO: 7617 - protein, 288 aa, Zea mays subsp. mays
  peptide (1)..(288): Ceres Seq. ID no. 12352535
  misc_feature (1)..(245): Pfam Name: Protein phosphatase 2C Pfam Description: Protein phosphatase 2C
  misc_feature (1)..(288): Homolog of NCBI NO: 15224766 NR Description: protein phosphatase 2C (PP2C); protein id: supported by cDNA: gi_12642917, supported by cDNA: gi_14517519, by cDNA: gi_16323271 [Arabidopsis thaliana]
  misc_feature (1)..(284): Homolog of NCBI NO: 21693562 NR Description: DNA-binding protein phosphatase 2C [Nicotiana
  misc_feature (1)..(287): Homolog of NCBI NO: 37536524 NR Description: putative protein phosphatase-2C [Oryza sativa
  misc_feature (1)..(287): Homolog of NCBI NO: 10140768 NR Description: putative protein phosphatase-2C [Oryza sativa]
  misc_feature (1)..(283): Homolog of NCBI NO: 24413992 NR Description: putative DNA-binding protein phosphatase 2C
  misc_feature (1)..(286): Homolog of NCBI NO: 20146108 NR Description: protein phosphatase 2C [Mesembryanthemum
  misc_feature (1)..(284): Homolog of NCBI NO: 15226152 NR Description: protein phosphatase 2C (PP2C); protein id: supported by cDNA: gi_17979441, supported by cDNA: gi_20259092
  misc_feature (1)..(286): Homolog of NCBI NO: 15230495 NR Description: protein phosphatase 2C (PP2C); protein id:
  misc_feature (1)..(284): Homolog of NCBI NO: 25352221 NR Description: phosphoprotein phosphatase (EC 3.1.3.16) 2C
  misc_feature (1)..(284): Homolog of NCBI NO: 15228717 NR Description: protein phosphatase 2C (PP2C); protein id: supported by cDNA: 20050. [Arabidopsis thaliana]
MEDVFICFDNFMQDFGIESFEEGPSAFYGIFDGHGGKHAADFVCSNLPRFIVEDEDFPREIVKAMSSAFLQADASFADACSLNCSLSSGTTALAALVVGRSLLVANAGDCRAVLCRRGKAIEMSRDHKPSCNREKIRIEALGGYVDDGYLNGQLNVARAIGDWHMEGMKACGGLGPLTAEPEVMTMDLTDEDEFLIMGCDGIWDVFLSQNAVDFARRKLQEHNDPAACCKELVDEAIKRKSGDNLSVVVVCFNSRPPPVLTTPRPRVQRSISAEGLRELQSFLDSLAD

SEQ ID NO: 7618 - DNA, 1603 bp, Zea mays subsp. mays
  misc_feature (1)..(1603): Ceres Seq. ID no. 13498922
  misc_feature: MA Experiment ID: 108526 Result: Up-regulated in Transcription
  misc_feature: MA Experiment 108526 PARAMETER Experiment Name: Zm_5mM_NO_P Parameter: Age (day) Value: 8
  misc_feature: MA Experiment 108526 PARAMETER Experiment Name: Zm_5mM_NO_P Parameter: Organism Value: Zea mays
  misc_feature: MA Experiment 108526 PARAMETER Experiment Name: Zm_5mM_NO_P Parameter: Plant Line Value: 35A19
  misc_feature: MA Experiment 108526 PARAMETER Experiment Name: Zm_5mM_NO_P Parameter: Timepoint (hr) Value: 1
  misc_feature: MA Experiment 108526 PARAMETER Experiment Name: Zm_5mM_NO_P Parameter: Tissue Value: Aerial
  misc_feature: MA Experiment 108526 PARAMETER Experiment Name: Zm_5mM_NO_P Parameter: Treatment Value: 5mM NO vs. No Treatment
  misc_feature: MA Experiment ID: 108527 Result: Up-regulated in Transcription
  misc_feature: MA Experiment 108527 PARAMETER Experiment Name: Zm_5mM_NO_P Parameter: Age (day) Value: 8
  misc_feature: MA Experiment 108527 PARAMETER Experiment Name: Zm_5mM_NO_P Parameter: Organism Value: Zea mays
  misc_feature: MA Experiment 108527 PARAMETER Experiment Name: Zm_5mM_NO_P Parameter: Plant Line Value: 35A19
  misc_feature: MA Experiment 108527 PARAMETER Experiment Name: Zm_5mM_NO_P Parameter: Timepoint (hr) Value: 6
  misc_feature: MA Experiment 108527 PARAMETER Experiment Name: Zm_5mM_NO_P Parameter: Tissue Value: Aerial
  misc_feature: MA Experiment 108527 PARAMETER Experiment Name: Zm_5mM_NO_P Parameter: Treatment Value: 5mM NO vs. No Treatment
  misc_feature: MA Experiment ID: 108535 Result: Down-regulated in Transcription
  misc_feature: MA Experiment 108535 PARAMETER Experiment Name: Zm_Meristem_P Parameter: Age (day) Value: 8
  misc_feature: MA Experiment 108535 PARAMETER Experiment Name: Zm_Meristem_P Parameter: Organism Value: Zea mays
  misc_feature: MA Experiment 108535 PARAMETER Experiment Name: Zm_Meristem_P Parameter: Plant Line Value: 35A19
  misc_feature: MA Experiment 108535 PARAMETER Experiment Name: Zm_Meristem_P Parameter: Tissue Value: Root Meristem vs. Above Root Meristem
  misc_feature: MA Experiment ID: 108559 Result: Up-regulated in Transcription
  misc_feature: MA Experiment 108559 PARAMETER Experiment Name: Zm_5mM_NO_P Parameter: Age (day) Value: 8
  misc_feature: MA Experiment 108559 PARAMETER Experiment Name: Zm_5mM_NO_P Parameter: Organism Value: Zea mays
  misc_feature: MA Experiment 108559 PARAMETER Experiment Name: Zm_5mM_NO_P Parameter: Plant Line Value: 35A19
  misc_feature: MA Experiment 108559 PARAMETER Experiment Name: Zm_5mM_NO_P Parameter: Timepoint (hr) Value: 12
  misc_feature: MA Experiment 108559 PARAMETER Experiment Name: Zm_5mM_NO_P Parameter: Tissue Value: Aerial
  misc_feature: MA Experiment 108559 PARAMETER Experiment Name: Zm_5mM_NO_P Parameter: Treatment Value: 5mM NO vs. No Treatment
  misc_feature: MA Experiment ID: 20000477 Result: Up-regulated in Transcription
  misc_feature: MA Experiment 20000477 PARAMETER Experiment Name: Zm_5mM_SA_P Parameter: Age (day) Value: 10
  misc_feature: MA Experiment 20000477 PARAMETER Experiment Name: Zm_5mM_SA_P Parameter: Organism Value: Zea mays
  misc_feature: MA Experiment 20000477 PARAMETER Experiment Name: Zm_5mM_SA_P Parameter: Plant Line Value: 35A19
  misc_feature: MA Experiment 20000477 PARAMETER Experiment Name: Zm_5mM_SA_P Parameter: Timepoint (hr) Value: 48
  misc_feature: MA Experiment 20000477 PARAMETER Experiment Name: Zm_5mM_SA_P Parameter: Tissue Value: Aerial
  misc_feature: MA Experiment 20000477 PARAMETER Experiment Name: Zm_5mM_SA_P Parameter: Treatment Value: 5mM SA vs. No Treatment
  misc_feature: MA Experiment ID: 20000478 Result: Up-regulated in Transcription
  misc_feature: MA Experiment 20000478 PARAMETER Experiment Name: Zm_5mM_SA_P Parameter: Age (day) Value: 11
  misc_feature: MA Experiment 20000478 PARAMETER Experiment Name: Zm_5mM_SA_P Parameter: Organism Value: Zea mays
  misc_feature: MA Experiment 20000478 PARAMETER Experiment Name: Zm_5mM_SA_P Parameter: Plant Line Value: 35A19
  misc_feature: MA Experiment 20000478 PARAMETER Experiment Name: Zm_5mM_SA_P Parameter: Timepoint (hr) Value: 72
  misc_feature: MA Experiment 20000478 PARAMETER Experiment Name: Zm_5mM_SA_P Parameter: Tissue Value: Aerial
  misc_feature: MA Experiment 20000478 PARAMETER Experiment Name: Zm_5mM_SA_P Parameter: Treatment Value: 5mM SA vs. No Treatment
  misc_feature: MA Experiment ID: 20000479 Result: Up-regulated in Transcription
  misc_feature: MA Experiment 20000479 PARAMETER Experiment Name: Zm_Drought_P Parameter: Age (day) Value: 10
  misc_feature: MA Experiment 20000479 PARAMETER Experiment Name: Zm_Drought_P Parameter: Organism Value: Zea mays
  misc_feature: MA Experiment 20000479 PARAMETER Experiment Name: Zm_Drought_P Parameter: Plant Line Value: 35A19
  misc_feature: MA Experiment 20000479 PARAMETER Experiment Name: Zm_Drought_P Parameter: Timepoint (hr) Value: 48
  misc_feature: MA Experiment 20000479 PARAMETER Experiment Name: Zm_Drought_P Parameter: Tissue Value: Aerial
  misc_feature: MA Experiment 20000479 PARAMETER Experiment Name: Zm_Drought_P Parameter: Treatment Value: Drought vs. No Drought
  misc_feature: MA Experiment ID: 20000480 Result: Up-regulated in Transcription
  misc_feature: MA Experiment 20000480 PARAMETER Experiment Name: Zm_Drought_P Parameter: Age (day) Value: 11
  misc_feature: MA Experiment 20000480 PARAMETER Experiment Name: Zm_Drought_P Parameter: Organism Value: Zea mays
  misc_feature: MA Experiment 20000480 PARAMETER Experiment Name: Zm_Drought_P Parameter: Plant Line Value: 35A19
  misc_feature: MA Experiment 20000480 PARAMETER Experiment Name: Zm_Drought_P Parameter: Timepoint (hr) Value: 72
  misc_feature: MA Experiment 20000480 PARAMETER Experiment Name: Zm_Drought_P Parameter: Tissue Value: Aerial
  misc_feature: MA Experiment 20000480 PARAMETER Experiment Name: Zm_Drought_P Parameter: Treatment Value: Drought vs. No Drought
  misc_feature: MA Experiment ID: 20000534 Result: Down-regulated in Transcription
  misc_feature: MA Experiment 20000534 PARAMETER Experiment Name: Zm_Hybrid_Pollen_P Parameter: Age (day) Value: 8
  misc_feature: MA Experiment 20000534 PARAMETER Experiment Name: Zm_Hybrid_Pollen_P Parameter: Organism Value: Zea mays
  misc_feature: MA Experiment 20000534 PARAMETER Experiment Name: Zm_Hybrid_Pollen_P Parameter: Plant Line Value: 35A19
  misc_feature: MA Experiment 20000534 PARAMETER Experiment Name: Zm_Hybrid_Pollen_P Parameter: Tissue Value: Pollen vs. Aerial
acaggtcgcaacaaccccaacgagcaaaccccccatttgccaccaaccccgacgaccggcgatgaccggcacggtgtctaagctggcggcgccccgtccggcggcaccgccgctccggccggcgtccctccgcaccgccgccctcgccttcgccccctccgcgcgccgggtccgcgtctccgtcgccgggcgagccaggagccccatcattgcgatggcttcggccaaggaaggaaatggtgcaccgaccaagaggactgcgcttcatgatctctacgagctccagggcctgtccccgtggtacgacaacctatgccgccctgtcacagacttgctgcccattatcgccagcggcgtccgtggagtcaccagcaacccaacgattttccaaaaggccatttcatcgtccagcgcatatgatgatcagttcaagcagctcatttcggctggaaaggacgcggagagcgcttactgggaactcgttataaaggatatccaagatgcgtgcaaactttttgagcccatctacgatgagactgatggggctgatgggtatgtctccgtagaggtgtctcctaggttggcaaatgacactcaaggaactgttgaagcggcaaagtggttacacaaagtggtcaaccgccccaatgtctacataaagatcccagctactgcagaatgtgttccttccatccaggaagttatcgctaatggcattagcgtcaacgtcacgcttattttctcaattgcaagatatgaggctgtgattgatgcttacctcgatgggctagaggcttctggcttgagtgacttatcccgagttactagcgttgcatccttctttgtcagccgagtggacacccttattgacaaaatgcttgacaagattggaacacctgaggcccttgccttgagaggaaaggctgcagtagcacaggccaaactagcaaatcggctctaccagaagaaattctctggcccaaggtgggaggcgttggccaagaaaggtgccaagaaacaaaggttgttgtgggcatccaccggtgtcaagaacccagcttatcctgacactctttatgtggacagtctcatcggacctgacacggtcaacacgatgcccgaccaagctttgcaagcattcatagaccacggcaccgtttcaaggacagttgatgcgaacgtgtctgaggcggaaggtgtatacagtgccttggagaagcttggcatcgactgggaagaggttggaaagcagcttgagctggaaggcgtggactccttcaagaagagctttgacagcctactcgtgagcctgcaggagaagggcaacagcctcaagatggcgagtgtgtaaagctgagaagattgggtacctgcgagtgaacgattttactaaataaaatgctagcttgctggctctcctcttagtttttacgctgtacctttgctctcaattttctgagtcggctttgtatcccaggcttgccagaacgtcattgtgtagccactgttcatggcttgtaattgctacggggtatccgataacgtcattgtggatgaggcctgtttgccctgactcttgaactcaatgtcgccatggtttgct

SEQ ID NO: 7619 - protein, 449 aa, Zea mays subsp. mays
  peptide (1)..(449): Ceres Seq. ID no. 13498923
  misc_feature (98)..(437): Pfam Name: Transaldolase Pfam Description: Transaldolase
  misc_feature (128)..(445): Homolog of NCBI NO: 34907042 NR Description: putative transaldolase [Oryza sativa (japonica group)] >gi|20160725|dbj|BAB89667.1| putative transaldolase
  misc_feature (71)..(128): Homolog of NCBI NO: 34907042 NR Description: putative transaldolase [Oryza sativa (japonica group)] >gi|20160725|dbj|BAB89667.1| putative transaldolase
  misc_feature (21)..(75): Homolog of NCBI NO: 34907042 NR Description: putative transaldolase [Oryza sativa (japonica group)] >gi|20160725|dbj|BAB89667.1| putative transaldolase
  misc_feature (32)..(449): Homolog of NCBI NO: 7489279 NR Description: transaldolase (EC 2.2.1.2) - potato
  misc_feature (32)..(449): Homolog of NCBI NO: 10441272 NR Description: transaldolase [Lycopersicon esculentum]
  misc_feature (32)..(449): Homolog of NCBI NO: 32481059 NR Description: transaldolase [Lycopersicon esculentum]
  misc_feature (58)..(448): Homolog of NCBI NO: 15240625 NR Description: transaldolase - like protein [Arabidopsis
  misc_feature (95)..(438): Homolog of NCBI NO: 29832856 NR Description: putative transaldolase [Streptomyces avermitilis >gi|29609977|dbj|BAC74025.1| putative transaldolase [Streptomyces
  misc_feature (95)..(441): Homolog of NCBI NO: 29828309 NR Description: putative transaldolase [Streptomyces avermitilis >gi|29605412|dbj|BAC69478.1| putative transaldolase [Streptomyces
  misc_feature (95)..(438): Homolog of NCBI NO: 21220422 NR Description: putative transaldolase [Streptomyces coelicolor >gi|23822265|sp|Q9XAC0|TAL2_STRCO Transaldolase 2
QVATTPTSKPPICHQPRRPAMTGTVSKLAAPRPAAPPLRPASLRTAALAFAPSARRVRVSVAGRARSPIIAMASAKEGNGAPTKRTALHDLYELQGLSPWYDNLCRPVTDLLPIIASGVRGVTSNPTIFQKAISSSSAYDDQFKQLISAGKDAESAYWELVIKDIQDACKLFEPIYDETDGADGYVSVEVSPRLANDTQGTVEAAKWLHKVVNRPNVYIKIPATAECVPSIQEVIANGISVNVTLIFSIARYEAVIDAYLDGLEASGLSDLSRVTSVASFFVSRVDTLIDKMLDKIGTPEALALRGKAAVAQAKLANRLYQKKFSGPRWEALAKKGAKKQRLLWASTGVKNPAYPDTLYVDSLIGPDTVNTMPDQALQAFIDHGTVSRTVDANVSEAEGVYSALEKLGIDWEEVGKQLELEGVDSFKKSFDSLLVSLQEKGNSLKMASV

SEQ ID NO: 7620 - protein, 429 aa, Zea mays subsp. mays
  peptide (1)..(429): Ceres Seq. ID no. 13498924
  misc_feature (78)..(417): Pfam Name: Transaldolase Pfam Description: Transaldolase
  misc_feature (108)..(425): Homolog of NCBI NO: 34907042 NR Description: putative transaldolase [Oryza sativa (japonica group)] >gi|20160725|dbj|BAB89667.1| putative transaldolase
  misc_feature (51)..(108): Homolog of NCBI NO: 34907042 NR Description: putative transaldolase [Oryza sativa (japonica group)] >gi|20160725|dbj|BAB89667.1| putative transaldolase
  misc_feature (1)..(55): Homolog of NCBI NO: 34907042 NR Description: putative transaldolase [Oryza sativa (japonica group)] >gi|20160725|dbj|BAB89667.1| putative transaldolase
  misc_feature (12)..(429): Homolog of NCBI NO: 7489279 NR Description: transaldolase (EC 2.2.1.2) - potato
  misc_feature (12)..(429): Homolog of NCBI NO: 10441272 NR Description: transaldolase [Lycopersicon esculentum]
  misc_feature (12)..(429): Homolog of NCBI NO: 32481059 NR Description: transaldolase [Lycopersicon esculentum]
  misc_feature (38)..(428): Homolog of NCBI NO: 15240625 NR Description: transaldolase - like protein [Arabidopsis
  misc_feature (75)..(418): Homolog of NCBI NO: 29832856 NR Description: putative transaldolase [Streptomyces avermitilis >gi|29609977|dbj|BAC74025.1| putative transaldolase [Streptomyces
  misc_feature (75)..(421): Homolog of NCBI NO: 29828309 NR Description: putative transaldolase [Streptomyces avermitilis >gi|29605412|dbj|BAC69478.1| putative transaldolase [Streptomyces
  misc_feature (75)..(418): Homolog of NCBI NO: 21220422 NR Description: putative transaldolase [Streptomyces coelicolor >gi|23822265|sp|Q9XAC0|TAL2_STRCO Transaldolase 2
MTGTVSKLAAPRPAAPPLRPASLRTAALAFAPSARRVRVSVAGRARSPIIAMASAKEGNGAPTKRTALHDLYELQGLSPWYDNLCRPVTDLLPIIASGVRGVTSNPTIFQKAISSSSAYDDQFKQLISAGKDAESAYWELVIKDIQDACKLFEPIYDETDGADGYVSVEVSPRLANDTQGTVEAAKWLHKVVNRPNVYIKIPATAECVPSIQEVIANGISVNVTLIFSIARYEAVIDAYLDGLEASGLSDLSRVTSVASFFVSRVDTLIDKMLDKIGTPEALALRGKAAVAQAKLANRLYQKKFSGPRWEALAKKGAKKQRLLWASTGVKNPAYPDTLYVDSLIGPDTVNTMPDQALQAFIDHGTVSRTVDANVSEAEGVYSALEKLGIDWEEVGKQLELEGVDSFKKSFDSLLVSLQEKGNSLKMASV

SEQ ID NO: 7621 - protein, 378 aa, Zea mays subsp. mays
  peptide (1)..(378): Ceres Seq. ID no. 13498925
  misc_feature (27)..(366): Pfam Name: Transaldolase Pfam Description: Transaldolase
  misc_feature (57)..(374): Homolog of NCBI NO: 34907042 NR Description: putative transaldolase [Oryza sativa (japonica group)] >gi|20160725|dbj|BAB89667.1| putative transaldolase
  misc_feature (1)..(57): Homolog of NCBI NO: 34907042 NR Description: putative transaldolase [Oryza sativa (japonica group)] >gi|20160725|dbj|BAB89667.1| putative transaldolase
  misc_feature (1)..(378): Homolog of NCBI NO: 7489279 NR Description: transaldolase (EC 2.2.1.2) - potato
  misc_feature (1)..(378): Homolog of NCBI NO: 10441272 NR Description: transaldolase [Lycopersicon esculentum]
  misc_feature (1)..(378): Homolog of NCBI NO: 32481059 NR Description: transaldolase [Lycopersicon esculentum]
  misc_feature (1)..(377): Homolog of NCBI NO: 15240625 NR Description: transaldolase - like protein [Arabidopsis
  misc_feature (24)..(367): Homolog of NCBI NO: 29832856 NR Description: putative transaldolase [Streptomyces avermitilis >gi|29609977|dbj|BAC74025.1| putative transaldolase [Streptomyces
  misc_feature (24)..(370): Homolog of NCBI NO: 29828309 NR Description: putative transaldolase [Streptomyces avermitilis >gi|29605412|dbj|BAC69478.1| putative transaldolase [Streptomyces
  misc_feature (24)..(367): Homolog of NCBI NO: 21220422 NR Description: putative transaldolase [Streptomyces coelicolor >gi|23822265|sp|Q9XAC0|TAL2_STRCO Transaldolase 2
  misc_feature (25)..(363): Homolog of NCBI NO: 23019683 NR Description: hypothetical protein [Thermobifida fusca]
MASAKEGNGAPTKRTALHDLYELQGLSPWYDNLCRPVTDLLPIIASGVRGVTSNPTIFQKAISSSSAYDDQFKQLISAGKDAESAYWELVIKDIQDACKLFEPIYDETDGADGYVSVEVSPRLANDTQGTVEAAKWLHKVVNRPNVYIKIPATAECVPSIQEVIANGISVNVTLIFSIARYEAVIDAYLDGLEASGLSDLSRVTSVASFFVSRVDTLIDKMLDKIGTPEALALRGKAAVAQAKLANRLYQKKFSGPRWEALAKKGAKKQRLLWASTGVKNPAYPDTLYVDSLIGPDTVNTMPDQALQAFIDHGTVSRTVDANVSEAEGVYSALEKLGIDWEEVGKQLELEGVDSFKKSFDSLLVSLQEKGNSLKMASV

SEQ ID NO: 7622 - DNA, 1725 bp, Zea mays subsp. mays
  misc_feature (1)..(1725): Ceres Seq. ID no. 12408676
  misc_feature: MA Experiment ID: 20000492 Result: Up-regulated in Transcription
  misc_feature: MA Experiment 20000492 PARAMETER Experiment Name: Zm_Hybrid_Seed_Dev_P Parameter: DAP Value: 12
  misc_feature: MA Experiment 20000492 PARAMETER Experiment Name: Zm_Hybrid_Seed_Dev_P Parameter: Organism Value: Zea mays
  misc_feature: MA Experiment 20000492 PARAMETER Experiment Name: Zm_Hybrid_Seed_Dev_P Parameter: Plant Line Value: 35A19
  misc_feature: MA Experiment 20000492 PARAMETER Experiment Name: Zm_Hybrid_Seed_Dev_P Parameter: Tissue Value: Fert Kernel vs. Unfert Floret
gagatttcgcgctccgttcacccaaaatttccccatctccgacctcccccttcctctccccctgccgctccccgcgccgagaaggagaaccccagccgccgcgcagcgcgccgcccatggcctcctcgtcggagaacgcggctgtgccgccggaggaggagccccaggccccgccgccgccggacacagagcctaccgaggcggcgcccggcgaggcggaggatgagccgcaaaccctagagcgggcgcaggagctcttcgacaggggttccaaggccatcgaggatgaggacttcgtcgacgccgtagactgtctcagccgagcgctcgagatcagggcttcacattatggagagctcgcaccggagtgtgccagcacatacttcaaatatggatgtgccctgctatacaaagctcaggaggagagtgatgttttgggaaatgttcccaagagcttgccaaatgaagactcagtgaagagtacagctactaaagatgacagtggaacctcaaaggtctctggtaccgatgcggaggatgctgcgtcatcagaaaaagttgatgctgaagaaggtcacaactcaaatggcaaaaatcaggagaatgggaatggtgaagttgagaaagatgatgacgacgtcgacgatgatgagaagatgggagatgaagaggataatgatttggatctttcttggaaaatgttggacattgctagggcaatagttgagaagagccaagataacactatggagaaagtaaaaatatattctgctcttgctgaagtggcaacggaaagagaggacatggacaactcactcagtgactatatgaaagctttatccatgttggagcatttggttgagcctgaccatcgtcgagttgtggaattaaacttccgcatttgtttggtttatgaactagtttccaagatcggagaagcaatttcatactgtgcaaaagcaatttcgctatgcaagtcacgcatacagagcctgaaaagttccaaggatgctttgttggctggtatagatggtgatgcatctgctgctgaagctgaaggaggctcagaaaaatctgccattgaaaaagagctagagcagcttactagcatattgcctgatcttgagaagaagcttgaggacctgtctgaagcaaacccaagcgctgacatggatgagatggtgaaggcaatcgtgtccagggtaactgatgtgatgccaaaagctgcatcttttacttcttcccagatggcaacctcaagcaatggattcgactcctcggttatgtctacggcagcgacaaccggaagctctggaagcaccgtgactgaccttggggttgtaggcagaggcgtcaaacgagctagcatcaagccgatctctgctgaacctgctgctaagaaacctgcacttgattcaccatctcaacaaggtgacagcagcatcaactctgaggttgttcctgcaacgcagactggagacgagtcagtatctaagtaaattacaatttcattagccctactgtaatgttaacttgctggaacatattagctgctatgtaaacgcttaagaagggactgctggggccatagactcatcgtgagctgaccattgaaatgttaaattgctgagatcatcatggcggtaaatcatgtctgctatatcaaatatgcttggtgagatgtgtactttctgatttttttgatgtatctgaccgtagtagctc

SEQ ID NO: 7623 - protein, 498 aa, Zea mays subsp. mays
  peptide (1)..(498): Ceres Seq. ID no. 12408677
  misc_feature (82)..(115): Pfam Name: TPR Domain Pfam Description: TPR Domain
  misc_feature (82)..(115): Pfam Name: TPR Domain Pfam Description: TPR Domain
  misc_feature (39)..(498): Homolog of NCBI NO: 38175649 NR Description: tetratricopeptide repeat-containing protein-like
  misc_feature (147)..(498): Homolog of NCBI NO: 32352192 NR Description: hypothetical protein [Oryza sativa (japonica
  misc_feature (61)..(439): Homolog of NCBI NO: 18419996 NR Description: putative protein; protein id: At4g37210.1 thaliana] >gi|13877853|gb|AAK44004.1|AF370189_1 unknown protein thaliana] >gi|17065596|gb|AAL33778.1| unknown protein
  misc_feature (61)..(382): Homolog of NCBI NO: 25407799 NR Description: hypothetical protein AT4g37210 [imported] - thaliana >gi|4006859|emb|CAB16777.1| putative protein thaliana] >gi|7270704|emb|CAB80387.1| putative protein
  misc_feature (68)..(337): Homolog of NCBI NO: 4104353 NR Description: nuclear autoantigenic sperm protein autosomal
  misc_feature (147)..(498): Homolog of NCBI NO: 32352192 NR Description: hypothetical protein [Oryza sativa (japonica
  misc_feature (61)..(382): Homolog of NCBI NO: 25407799 NR Description: hypothetical protein AT4g37210 [imported] - thaliana >gi|4006859|emb|CAB16777.1| putative protein thaliana] >gi|7270704|emb|CAB80387.1| putative protein
  misc_feature (68)..(337): Homolog of NCBI NO: 30584691 NR Description: Homo sapiens nuclear autoantigenic sperm protein
  misc_feature (68)..(337): Homolog of NCBI NO: 27262630 NR Description: nuclear autoantigenic sperm protein isoform 3;
  misc_feature (39)..(337): Homolog of NCBI NO: 13435642 NR Description: Unknown (protein for MGC:5829) [Mus musculus]
  misc_feature (59)..(489): Homolog of NCBI NO: 123127 NR Description: HISTONE-BINDING PROTEIN N1/N2
  misc_feature (66)..(143): Homolog of NCBI NO: 18129310 NR Description: hypothetical protein [Pinus pinaster]
  misc_feature (68)..(337): Homolog of NCBI NO: 4104353 NR Description: nuclear autoantigenic sperm protein autosomal
  misc_feature (61)..(439): Homolog of NCBI NO: 18419996 NR Description: putative protein; protein id: At4g37210.1 thaliana] >gi|13877853|gb|AAK44004.1|AF370189_1 unknown protein thaliana] >gi|17065596|gb|AAL33778.1| unknown protein
  misc_feature (39)..(498): Homolog of NCBI NO: 38175649 NR Description: tetratricopeptide repeat-containing protein-like
  misc_feature (66)..(143): Homolog of NCBI NO: 18129310 NR Description: hypothetical protein [Pinus pinaster]
  misc_feature (59)..(489): Homolog of NCBI NO: 123127 NR Description: HISTONE-BINDING PROTEIN N1/N2
  misc_feature (39)..(337): Homolog of NCBI NO: 13435642 NR Description: Unknown (protein for MGC:5829) [Mus musculus]
  misc_feature (68)..(337): Homolog of NCBI NO: 27262630 NR Description: nuclear autoantigenic sperm protein isoform 3;
  misc_feature (68)..(337): Homolog of NCBI NO: 30584691 NR Description: Homo sapiens nuclear autoantigenic sperm protein
DFALRSPKISPSPTSPFLSPCRSPRREGEPQPPRSAPPMASSSENAAVPPEEEPQAPPPPDTEPTEAAPGEAEDEPQTLERAQELFDRGSKAIEDEDFVDAVDCLSRALEIRASHYGELAPECASTYFKYGCALLYKAQEESDVLGNVPKSLPNEDSVKSTATKDDSGTSKVSGTDAEDAASSEKVDAEEGHNSNGKNQENGNGEVEKDDDDVDDDEKMGDEEDNDLDLSWKMLDIARAIVEKSQDNTMEKVKIYSALAEVATEREDMDNSLSDYMKALSMLEHLVEPDHRRVVELNFRICLVYELVSKIGEAISYCAKAISLCKSRIQSLKSSKDALLAGIDGDASAAEAEGGSEKSAIEKELEQLTSILPDLEKKLEDLSEANPSADMDEMVKAIVSRVTDVMPKAASFTSSQMATSSNGFDSSVMSTAATTGSSGSTVTDLGVVGRGVKRASIKPISAEPAAKKPALDSPSQQGDSSINSEVVPATQTGDESVSK

SEQ ID NO: 7624 - protein, 460 aa, Zea mays subsp. mays; identical to SEQ ID NO: 3042
  peptide (1)..(460): Ceres Seq. ID no. 12408678
  misc_feature (44)..(77): Pfam Name: TPR Domain Pfam Description: TPR Domain
  misc_feature (44)..(77): Pfam Name: TPR Domain Pfam Description: TPR Domain
  misc_feature (1)..(460): Homolog of NCBI NO: 38175649 NR Description: tetratricopeptide repeat-containing protein-like
  misc_feature (109)..(460): Homolog of NCBI NO: 32352192 NR Description: hypothetical protein [Oryza sativa (japonica
  misc_feature (23)..(401): Homolog of NCBI NO: 18419996 NR Description: putative protein; protein id: At4g37210.1 thaliana] >gi|13877853|gb|AAK44004.1|AF370189_1 unknown protein thaliana] >gi|17065596|gb|AAL33778.1| unknown protein
  misc_feature (23)..(344): Homolog of NCBI NO: 25407799 NR Description: hypothetical protein AT4g37210 [imported] - thaliana >gi|4006859|emb|CAB16777.1| putative protein thaliana] >gi|7270704|emb|CAB80387.1| putative protein
  misc_feature (30)..(299): Homolog of NCBI NO: 4104353 NR Description: nuclear autoantigenic sperm protein autosomal
  misc_feature (109)..(460): Homolog of NCBI NO: 32352192 NR Description: hypothetical protein [Oryza sativa (japonica
  misc_feature (23)..(344): Homolog of NCBI NO: 25407799 NR Description: hypothetical protein AT4g37210 [imported] - thaliana >gi|4006859|emb|CAB16777.1| putative protein thaliana] >gi|7270704|emb|CAB80387.1| putative protein
  misc_feature (30)..(299): Homolog of NCBI NO: 30584691 NR Description: Homo sapiens nuclear autoantigenic sperm protein
  misc_feature (30)..(299): Homolog of NCBI NO: 27262630 NR Description: nuclear autoantigenic sperm protein isoform 3;
  misc_feature (1)..(299): Homolog of NCBI NO: 13435642 NR Description: Unknown (protein for MGC:5829) [Mus musculus]
  misc_feature (21)..(451): Homolog of NCBI NO: 123127 NR Description: HISTONE-BINDING PROTEIN N1/N2
  misc_feature (28)..(105): Homolog of NCBI NO: 18129310 NR Description: hypothetical protein [Pinus pinaster]
  misc_feature (30)..(299): Homolog of NCBI NO: 4104353 NR Description: nuclear autoantigenic sperm protein autosomal
  misc_feature (23)..(401): Homolog of NCBI NO: 18419996 NR Description: putative protein; protein id: At4g37210.1 thaliana] >gi|13877853|gb|AAK44004.1|AF370189_1 unknown protein thaliana] >gi|17065596|gb|AAL33778.1| unknown protein
  misc_feature (1)..(460): Homolog of NCBI NO: 38175649 NR Description: tetratricopeptide repeat-containing protein-like
  misc_feature (28)..(105): Homolog of NCBI NO: 18129310 NR Description: hypothetical protein [Pinus pinaster]
  misc_feature (21)..(451): Homolog of NCBI NO: 123127 NR Description: HISTONE-BINDING PROTEIN N1/N2
  misc_feature (1)..(299): Homolog of NCBI NO: 13435642 NR Description: Unknown (protein for MGC:5829) [Mus musculus]
  misc_feature (30)..(299): Homolog of NCBI NO: 27262630 NR Description: nuclear autoantigenic sperm protein isoform 3;
  misc_feature (30)..(299): Homolog of NCBI NO: 30584691 NR Description: Homo sapiens nuclear autoantigenic sperm protein

SEQ ID NO: 7625 - protein, 280 aa, Zea mays subsp. mays; identical to SEQ ID NO: 2639
  peptide (1)..(280): Ceres Seq. ID no. 12408679
  misc_feature (1)..(221): Homolog of NCBI NO: 18419996 NR Description: putative protein; protein id: At4g37210.1 thaliana] >gi|13877853|gb|AAK44004.1|AF370189_1 unknown protein thaliana] >gi|17065596|gb|AAL33778.1| unknown protein
  misc_feature (1)..(164): Homolog of NCBI NO: 25407799 NR Description: hypothetical protein AT4g37210 [imported] - thaliana >gi|4006859|emb|CAB16777.1| putative protein thaliana] >gi|7270704|emb|CAB80387.1| putative protein
  misc_feature (1)..(119): Homolog of NCBI NO: 4104353 NR Description: nuclear autoantigenic sperm protein autosomal
  misc_feature (1)..(271): Homolog of NCBI NO: 123127 NR Description: HISTONE-BINDING PROTEIN N1/N2
  misc_feature (1)..(119): Homolog of NCBI NO: 13435642 NR Description: Unknown (protein for MGC:5829) [Mus musculus]
  misc_feature (1)..(119): Homolog of NCBI NO: 27262630 NR Description: nuclear autoantigenic sperm protein isoform 3;
  misc_feature (1)..(119): Homolog of NCBI NO: 30584691 NR Description: Homo sapiens nuclear autoantigenic sperm protein
  misc_feature (1)..(268): Homolog of NCBI NO: 28277791 NR Description: Unknown (protein for MGC:56007) [Danio rerio]
  misc_feature (1)..(280): Homolog of NCBI NO: 38175649 NR Description: tetratricopeptide repeat-containing protein-like
  misc_feature (1)..(280): Homolog of NCBI NO: 32352192 NR Description: hypothetical protein [Oryza sativa (japonica
  misc_feature (1)..(280): Homolog of NCBI NO: 38175649 NR Description: tetratricopeptide repeat-containing protein-like
  misc_feature (1)..(280): Homolog of NCBI NO: 32352192 NR Description: hypothetical protein [Oryza sativa (japonica
  misc_feature (1)..(221): Homolog of NCBI NO: 18419996 NR Description: putative protein; protein id: At4g37210.1 thaliana] >gi|13877853|gb|AAK44004.1|AF370189_1 unknown protein thaliana] >gi|17065596|gb|AAL33778.1| unknown protein
  misc_feature (1)..(164): Homolog of NCBI NO: 25407799 NR Description: hypothetical protein AT4g37210 [imported] - thaliana >gi|4006859|emb|CAB16777.1| putative protein thaliana] >gi|7270704|emb|CAB80387.1| putative protein
  misc_feature (1)..(119): Homolog of NCBI NO: 4104353 NR Description: nuclear autoantigenic sperm protein autosomal
  misc_feature (1)..(271): Homolog of NCBI NO: 123127 NR Description: HISTONE-BINDING PROTEIN N1/N2
  misc_feature (1)..(119): Homolog of NCBI NO: 13435642 NR Description: Unknown (protein for MGC:5829) [Mus musculus]
  misc_feature (1)..(119): Homolog of NCBI NO: 27262630 NR Description: nuclear autoantigenic sperm protein isoform 3;
  misc_feature (1)..(119): Homolog of NCBI NO: 30584691 NR Description: Homo sapiens nuclear autoantigenic sperm protein
  misc_feature (1)..(268): Homolog of NCBI NO: 28277791 NR Description: Unknown (protein for MGC:56007) [Danio rerio]

SEQ ID NO: 7626 - DNA, 1277 bp, Zea mays subsp. mays
  misc_feature (1)..(1277): Ceres Seq. ID no. 12408673
  misc_feature: MA Experiment ID: 108535 Result: Up-regulated in Transcription
  misc_feature: MA Experiment 108535 PARAMETER Experiment Name: Zm_Meristem_P Parameter: Age (day) Value: 8
  misc_feature: MA Experiment 108535 PARAMETER Experiment Name: Zm_Meristem_P Parameter: Organism Value: Zea mays
  misc_feature: MA Experiment 108535 PARAMETER Experiment Name: Zm_Meristem_P Parameter: Plant Line Value: 35A19
  misc_feature: MA Experiment 108535 PARAMETER Experiment Name: Zm_Meristem_P Parameter: Tissue Value: Root Meristem vs. Above Root Meristem
gcacgagaccattacctagaacatcctaatcgaaaagcaaaatagcaaatttctcggcaaacccgcaattcgcaaacccgcccccaagcccatccctcccgcccgccaggtcccgcgagatctctcacagccccctcagatccgcctcccctcgccgccggcgcgctcgcgcgctttccgcacgcccgccgccatgtcgcacaaccacggcgacacgatcccgctccacccctcgtcggcgcagtccgacatggacgagatcgagagcctcatccacgccgcgccatccccggccaccgtgctccccgcgcggccaccgtctcctacgcgggcctccatccccgtatcctcctctccggccccggcgcccgtccccacgaagccgcctttccccgccgcttccatcccgatctccgtctcccccgttcccgttcccgcgtccgtctccgtccccatcggcgccgacgggtttgggtctccgcccaacacgctcacggagcctgtatgggacaccatcaagcgagacttagcacgcatcgtcagcaatctcaagctcgtcgtcttccccaatccctaccgcgaggaccccggcaaggcgcttagggactgggacctgtggggtcccttcttcttcatcgtcttcctaggcctcacgctctcctggtcggcttccgtgaagaagtctgaagtatttgctgttgcattcgcggtcctggcagctggtgctataattctgaccttgaatgttctgcttctgggggggcacatcatcttcttccaaagcctgagtcttcttggctattgcctatttccattggatgttggtgctctagtttgcatgctgaaggacaatgtcatacttaagattgtcgtggtgacaatcacattggcttggagctcctgggctgcgtatccattcatgagcgctgctgttaacccaaggagaaaagctctggccctatatcctgtcttcctcatgtatatctcagttgggttcctcataattgccattgattaacggggttgagctttgtagtaacatctgaagagttgagagtttccttggatggttgaaccaccagaatacatacaagtttgagtagacaatgcttctatccttgtaccctcgtggagtctttgtgaattgcctcgtaggaattttggtttttacatgatcttgaggcataaggttgtaaaattagtcgaaaatatgtatctgttgtaaagggcatggactttggaccactgaaatggctgtcaagctttcgtatactgcg

SEQ ID NO: 7627 - protein, 274 aa, Zea mays subsp. mays
  peptide (1)..(274): Ceres Seq. ID no. 12408674
  misc_feature (108)..(255): Pfam Name: Yip1 domain Pfam Description: Yip1 domain
  misc_feature (1)..(262): Homolog of NCBI NO: 34908612 NR Description: P0677H08.6 [Oryza sativa (japonica
  misc_feature (1)..(274): Homolog of NCBI NO: 7486761 NR Description: hypothetical protein F9N11.110 - Arabidopsis >gi|5730136|emb|CAB52470.1| putative protein [Arabidopsis >gi|7269926|emb|CAB81019.1| putative protein [Arabidopsis
  misc_feature (1)..(274): Homolog of NCBI NO: 18417560 NR Description: hypothetical protein common family; protein id: supported by cDNA: gi_15010747, supported by cDNA: gi_15810090, by cDNA: gi_20260559 [Arabidopsis thaliana]
  misc_feature (4)..(274): Homolog of NCBI NO: 18398861 NR Description: Expressed protein; protein id: At2g18840.1, by cDNA: 150205. [Arabidopsis thaliana] >gi|7485786|pir||T01612
  misc_feature (4)..(274): Homolog of NCBI NO: 21553537 NR Description: unknown [Arabidopsis thaliana]
  misc_feature (68)..(272): Homolog of NCBI NO: 39580726 NR Description: Hypothetical protein CBG08721 [Caenorhabditis
  misc_feature (98)..(272): Homolog of NCBI NO: 17509487 NR Description: Yeast YIP1 protein like [Caenorhabditis elegans]
  misc_feature (62)..(271): Homolog of NCBI NO: 26337383 NR Description: unnamed protein product [Mus musculus]
  misc_feature (54)..(271): Homolog of NCBI NO: 28603852 NR Description: hypothetical protein MGC21416 [Homo sapiens]
  misc_feature (94)..(272): Homolog of NCBI NO: 24581631 NR Description: CG3652-PA [Drosophila melanogaster]
MSHNHGDTIPLHPSSAQSDMDEIESLIHAAPSPATVLPARPPSPTRASIPVSSSPAPAPVPTKPPFPAASIPISVSPVPVPASVSVPIGADGFGSPPNTLTEPVWDTIKRDLARIVSNLKLVVFPNPYREDPGKALRDWDLWGPFFFIVFLGLTLSWSASVKKSEVFAVAFAVLAAGAIILTLNVLLLGGHIIFFQSLSLLGYCLFPLDVGALVCMLKDNVILKIVVVTITLAWSSWAAYPFMSAAVNPRRKALALYPVFLMYISVGFLIIAID

SEQ ID NO: 7628 - protein, 255 aa, Zea mays subsp. mays
  peptide (1)..(255): Ceres Seq. ID no. 12408675
  misc_feature (89)..(236): Pfam Name: Yip1 domain Pfam Description: Yip1 domain
  misc_feature (1)..(243): Homolog of NCBI NO: 34908612 NR Description: P0677H08.6 [Oryza sativa (japonica
  misc_feature (1)..(255): Homolog of NCBI NO: 7486761 NR Description: hypothetical protein F9N11.110 - Arabidopsis >gi|5730136|emb|CAB52470.1| putative protein [Arabidopsis >gi|7269926|emb|CAB81019.1| putative protein [Arabidopsis
  misc_feature (1)..(255): Homolog of NCBI NO: 18417560 NR Description: hypothetical protein common family; protein id: supported by cDNA: gi_15010747, supported by cDNA: gi_15810090, by cDNA: gi_20260559 [Arabidopsis thaliana]
  misc_feature (1)..(255): Homolog of NCBI NO: 18398861 NR Description: Expressed protein; protein id: At2g18840.1, by cDNA: 150205. [Arabidopsis thaliana] >gi|7485786|pir||T01612
  misc_feature (1)..(255): Homolog of NCBI NO: 21553537 NR Description: unknown [Arabidopsis thaliana]
  misc_feature (49)..(253): Homolog of NCBI NO: 39580726 NR Description: Hypothetical protein CBG08721 [Caenorhabditis
  misc_feature (79)..(253): Homolog of NCBI NO: 17509487 NR Description: Yeast YIP1 protein like [Caenorhabditis elegans]
  misc_feature (43)..(252): Homolog of NCBI NO: 26337383 NR Description: unnamed protein product [Mus musculus]
  misc_feature (35)..(252): Homolog of NCBI NO: 28603852 NR Description: hypothetical protein MGC21416 [Homo sapiens]
  misc_feature (75)..(253): Homolog of NCBI NO: 24581631 NR Description: CG3652-PA [Drosophila melanogaster]
MDEIESLIHAAPSPATVLPARPPSPTRASIPVSSSPAPAPVPTKPPFPAASIPISVSPVPVPASVSVPIGADGFGSPPNTLTEPVWDTIKRDLARIVSNLKLVVFPNPYREDPGKALRDWDLWGPFFFIVFLGLTLSWSASVKKSEVFAVAFAVLAAGAIILTLNVLLLGGHIIFFQSLSLLGYCLFPLDVGALVCMLKDNVILKIVVVTITLAWSSWAAYPFMSAAVNPRRKALALYPVFLMYISVGFLIIAID

SEQ ID NO: 7629 - DNA, 803 bp, Zea mays subsp. mays
  misc_feature (1)..(803): Ceres Seq. ID no. 12381210
  misc_feature: MA Experiment ID: 108535 Result: Down-regulated in Transcription
  misc_feature: MA Experiment 108535 PARAMETER Experiment Name: Zm_Meristem_P Parameter: Age (day) Value: 8
  misc_feature: MA Experiment 108535 PARAMETER Experiment Name: Zm_Meristem_P Parameter: Organism Value: Zea mays
  misc_feature: MA Experiment 108535 PARAMETER Experiment Name: Zm_Meristem_P Parameter: Plant Line Value: 35A19
  misc_feature: MA Experiment 108535 PARAMETER Experiment Name: Zm_Meristem_P Parameter: Tissue Value: Root Meristem vs. Above Root Meristem
aatttctcccgaaaaagggtgaagagcagaacgacgaggagattgcttggtgagaggagttggtgaggagaggtcgcgaccatggagaaccttgctctgctttggggcatcatcggcccgggcgtgtccggcgccatcttcggggccggatggtggttctgggtggacgcggtcgtttgcagcgcggtccaggtctccttcctccactaccttccagggatcttcgcttcgctggcggcgctcatgttcaattgcgtgaacaaggatgagatcggatacgactattactcaccctacggggacgattcagagtggagagtgaagctctggctttttgtggcatatgtcgtttcttttgtctgtttagctggatccgtgggtttattggtgcaagatgcactgacgaacaagggcccttctgtctggactggtgttgctggcgttctgcaatgtgttcttgtgttgataagcggcctggtgtattggacatgccactcagaagattaagggcgtaatgtcatgagcagacttgcaaggttggtcacagttgtgtgaaggaaattatttctggcaacatatgattttgtgtgatggaaatgacggacactgttcactgctgaatgggatgactagatgtttcatctgtgcatatctgacttttggaaaatgatgtttcttaacaccggtgcatgtgttagccccagcttcttgtgagttgccaatctgtgatgcggtcgtgatcatgcaaatcttttggctaaagctgaaaccggctgcagcaacaagctagtgctactatttac

SEQ ID NO: 7630 - protein, 141 aa, Zea mays subsp. mays
  peptide (1)..(141): Ceres Seq. ID no. 12381211
  misc_feature (3)..(139): Pfam Name: Uncharacterised protein family (UPF0220) Pfam Description: Uncharacterised protein family (UPF0220)
  misc_feature (3)..(140): Homolog of NCBI NO: 18400231 NR Description: expressed protein; protein id: At1g36980.1, by cDNA: gi_15292702, supported by cDNA: gi_19310688 [Arabidopsis >gi|15292703|gb|AAK92720.1| unknown protein [Arabidopsis
  misc_feature (3)..(85): Homolog of NCBI NO: 25373092 NR Description: protein T32E20.29 [imported] - Arabidopsis >gi|8778790|gb|AAF79798.1|AC020646_21 T32E20.29 [Arabidopsis
  misc_feature (15)..(134): Homolog of NCBI NO: 24657484 NR Description: CG15012-PB [Drosophila melanogaster]
  misc_feature (16)..(141): Homolog of NCBI NO: 7657595 NR Description: small membrane protein 1 [Homo sapiens] Small membrane protein 1 >gi|4336325|gb|AAD17754.1| small protein 1 [Homo sapiens] >gi|12052780|emb|CAB66562.1|
  misc_feature (12)..(141): Homolog of NCBI NO: 40738694 NR Description: hypothetical protein AN6544.2 [Aspergillus
  misc_feature (16)..(141): Homolog of NCBI NO: 27732805 NR Description: similar to Small membrane protein 1 [Rattus
  misc_feature (16)..(141): Homolog of NCBI NO: 34610239 NR Description: small membrane protein 1 [Mus musculus] Small membrane protein 1 >gi|12852025|dbj|BAB29242.1| unnamed
  misc_feature (37)..(134): Homolog of NCBI NO: 38047947 NR Description: similar to Drosophila melanogaster CG15012
MENLALLWGIIGPGVSGAIFGAGWWFWVDAVVCSAVQVSFLHYLPGIFASLAALMFNCVNKDEIGYDYYSPYGDDSEWRVKLWLFVAYVVSFVCLAGSVGLLVQDALTNKGPSVWTGVAGVLQCVLVLISGLVYWTCHSED

SEQ ID NO: 7631 - protein, 87 aa, Zea mays subsp. mays
  peptide (1)..(87): Ceres Seq. ID no. 12381212
  misc_feature (1)..(85): Pfam Name: Uncharacterised protein family (UPF0220) Pfam Description: Uncharacterised protein family (UPF0220)
  misc_feature (1)..(87): Homolog of NCBI NO: 7657595 NR Description: small membrane protein 1 [Homo sapiens] Small membrane protein 1 >gi|4336325|gb|AAD17754.1| small protein 1 [Homo sapiens] >gi|12052780|emb|CAB66562.1|
  misc_feature (1)..(87): Homolog of NCBI NO: 40738694 NR Description: hypothetical protein AN6544.2 [Aspergillus
  misc_feature (1)..(87): Homolog of NCBI NO: 27732805 NR Description: similar to Small membrane protein 1 [Rattus
  misc_feature (1)..(31): Homolog of NCBI NO: 25373092 NR Description: protein T32E20.29 [imported] - Arabidopsis >gi|8778790|gb|AAF79798.1|AC020646_21 T32E20.29 [Arabidopsis
  misc_feature (1)..(80): Homolog of NCBI NO: 24657484 NR Description: CG15012-PB [Drosophila melanogaster]
  misc_feature (1)..(86): Homolog of NCBI NO: 18400231 NR Description: expressed protein; protein id: At1g36980.1, by cDNA: gi_15292702, supported by cDNA: gi_19310688 [Arabidopsis >gi|15292703|gb|AAK92720.1| unknown protein [Arabidopsis
  misc_feature (1)..(87): Homolog of NCBI NO: 34610239 NR Description: small membrane protein 1 [Mus musculus] Small membrane protein 1 >gi|12852025|dbj|BAB29242.1| unnamed
  misc_feature (1)..(80): Homolog of NCBI NO: 38047947 NR Description: similar to Drosophila melanogaster CG15012
MFNCVNKDEIGYDYYSPYGDDSEWRVKLWLFVAYVVSFVCLAGSVGLLVQDALTNKGPSVWTGVAGVLQCVLVLISGLVYWTCHSED

SEQ ID NO: 7632 - DNA, 1175 bp, Zea mays subsp. mays
  misc_feature (1)..(1175): Ceres Seq. ID no. 12408185
  misc_feature: MA Experiment ID: 108522 Result: Up-regulated in Transcription
  misc_feature: MA Experiment 108522 PARAMETER Experiment Name: Zm_42deg_Heat_P Parameter: Age (day) Value: 8
  misc_feature: MA Experiment 108522 PARAMETER Experiment Name: Zm_42deg_Heat_P Parameter: Organism Value: Zea mays
  misc_feature: MA Experiment 108522 PARAMETER Experiment Name: Zm_42deg_Heat_P Parameter: Plant Line Value: 35A19
  misc_feature: MA Experiment 108522 PARAMETER Experiment Name: Zm_42deg_Heat_P Parameter: Temperature (deg C) Value: 42 vs. 22
  misc_feature: MA Experiment 108522 PARAMETER Experiment Name: Zm_42deg_Heat_P Parameter: Timepoint (hr) Value: 1
  misc_feature: MA Experiment 108522 PARAMETER Experiment Name: Zm_42deg_Heat_P Parameter: Tissue Value: Aerial
  misc_feature: MA Experiment ID: 108528 Result: Up-regulated in Transcription
  misc_feature: MA Experiment 108528 PARAMETER Experiment Name: Zm_Imbibed_Seeds_P Parameter: Age (day) Value: 5 vs. 2
  misc_feature: MA Experiment 108528 PARAMETER Experiment Name: Zm_Imbibed_Seeds_P Parameter: Organism Value: Zea mays
  misc_feature: MA Experiment 108528 PARAMETER Experiment Name: Zm_Imbibed_Seeds_P Parameter: Plant Line Value: 35A19
  misc_feature: MA Experiment 108528 PARAMETER Experiment Name: Zm_Imbibed_Seeds_P Parameter: Tissue Value: Aerial vs. Embryo
  misc_feature: MA Experiment ID: 108529 Result: Down-regulated in Transcription
  misc_feature: MA Experiment 108529 PARAMETER Experiment Name: Zm_Imbibed_Seeds_P Parameter: Age (day) Value: 5 vs. 2
  misc_feature: MA Experiment 108529 PARAMETER Experiment Name: Zm_Imbibed_Seeds_P Parameter: Organism Value: Zea mays
  misc_feature: MA Experiment 108529 PARAMETER Experiment Name: Zm_Imbibed_Seeds_P Parameter: Plant Line Value: 35A19
  misc_feature: MA Experiment 108529 PARAMETER Experiment Name: Zm_Imbibed_Seeds_P Parameter: Tissue Value: Roots vs. Embryo
  misc_feature: MA Experiment ID: 108530 Result: Up-regulated in Transcription
  misc_feature: MA Experiment 108530 PARAMETER Experiment Name: Zm_Imbibed_Seeds_P Parameter: Age (day) Value: 6 vs. 2
  misc_feature: MA Experiment 108530 PARAMETER Experiment Name: Zm_Imbibed_Seeds_P Parameter: Organism Value: Zea mays
  misc_feature: MA Experiment 108530 PARAMETER Experiment Name: Zm_Imbibed_Seeds_P Parameter: Plant Line Value: 35A19
  misc_feature: MA Experiment 108530 PARAMETER Experiment Name: Zm_Imbibed_Seeds_P Parameter: Tissue Value: Aerial vs. Embryo
  misc_feature: MA Experiment ID: 108536 Result: Down-regulated in Transcription
  misc_feature: MA Experiment 108536 PARAMETER Experiment Name: Zm_Meristem_P Parameter: Age (day) Value: 8
  misc_feature: MA Experiment 108536 PARAMETER Experiment Name: Zm_Meristem_P Parameter: Organism Value: Zea mays
  misc_feature: MA Experiment 108536 PARAMETER Experiment Name: Zm_Meristem_P Parameter: Plant Line Value: 35A19
  misc_feature: MA Experiment 108536 PARAMETER Experiment Name: Zm_Meristem_P Parameter: Tissue Value: Shoot Meristem vs. Above Shoot Meristem
  misc_feature: MA Experiment ID: 108543 Result: Up-regulated in Transcription
  misc_feature: MA Experiment ID: 108545 Result: Up-regulated in Transcription
  misc_feature: MA Experiment 108545 PARAMETER Experiment Name: Zm_Imbibed_Seeds_P Parameter: Age (day) Value: 3 vs. 2
  misc_feature: MA Experiment 108545 PARAMETER Experiment Name: Zm_Imbibed_Seeds_P Parameter: Organism Value: Zea mays
  misc_feature: MA Experiment 108545 PARAMETER Experiment Name: Zm_Imbibed_Seeds_P Parameter: Plant Line Value: 35A19
  misc_feature: MA Experiment 108545 PARAMETER Experiment Name: Zm_Imbibed_Seeds_P Parameter: Tissue Value: Aerial vs. Embryo
  misc_feature: MA Experiment ID: 108546 Result: Down-regulated in Transcription
  misc_feature: MA Experiment 108546 PARAMETER Experiment Name: Zm_Imbibed_Seeds_P Parameter: Age (day) Value: 3 vs. 2
  misc_feature: MA Experiment 108546 PARAMETER Experiment Name: Zm_Imbibed_Seeds_P Parameter: Organism Value: Zea mays
  misc_feature: MA Experiment 108546 PARAMETER Experiment Name: Zm_Imbibed_Seeds_P Parameter: Plant Line Value: 35A19
  misc_feature: MA Experiment 108546 PARAMETER Experiment Name: Zm_Imbibed_Seeds_P Parameter: Tissue Value: Roots vs. Embryo
  misc_feature: MA Experiment ID: 108547 Result: Up-regulated in Transcription
  misc_feature: MA Experiment 108547 PARAMETER Experiment Name: Zm_Imbibed_Seeds_P Parameter: Age (day) Value: 4 vs. 2
  misc_feature: MA Experiment 108547 PARAMETER Experiment Name: Zm_Imbibed_Seeds_P Parameter: Organism Value: Zea mays
  misc_feature: MA Experiment 108547 PARAMETER Experiment Name: Zm_Imbibed_Seeds_P Parameter: Plant Line Value: 35A19
  misc_feature: MA Experiment 108547 PARAMETER Experiment Name: Zm_Imbibed_Seeds_P Parameter: Tissue Value: Aerial vs. Embryo
  misc_feature: MA Experiment ID: 108559 Result: Down-regulated in Transcription
  misc_feature: MA Experiment 108559 PARAMETER Experiment Name: Zm_5mM_NO_P Parameter: Age (day) Value: 8
  misc_feature: MA Experiment 108559 PARAMETER Experiment Name: Zm_5mM_NO_P Parameter: Organism Value: Zea mays
  misc_feature: MA Experiment 108559 PARAMETER Experiment Name: Zm_5mM_NO_P Parameter: Plant Line Value: 35A19
  misc_feature: MA Experiment 108559 PARAMETER Experiment Name: Zm_5mM_NO_P Parameter: Timepoint (hr) Value: 12
  misc_feature: MA Experiment 108559 PARAMETER Experiment Name: Zm_5mM_NO_P Parameter: Tissue Value: Aerial
  misc_feature: MA Experiment 108559 PARAMETER Experiment Name: Zm_5mM_NO_P Parameter: Treatment Value: 5mM NO vs. No Treatment
  misc_feature: MA Experiment ID: 108687 Result: Down-regulated in Transcription
  misc_feature: MA Experiment 108687 PARAMETER Experiment Name: Zm_Embryos-Flowers__P Parameter: Tissue Value: Embryo vs. Aerial+
  misc_feature: MA Experiment ID: 20000478 Result: Down-regulated in Transcription
  misc_feature: MA Experiment 20000478 PARAMETER Experiment Name: Zm_5mM_SA_P Parameter: Age (day) Value: 11
  misc_feature: MA Experiment 20000478 PARAMETER Experiment Name: Zm_5mM_SA_P Parameter: Organism Value: Zea mays
  misc_feature: MA Experiment 20000478 PARAMETER Experiment Name: Zm_5mM_SA_P Parameter: Plant Line Value: 35A19
  misc_feature: MA Experiment 20000478 PARAMETER Experiment Name: Zm_5mM_SA_P Parameter: Timepoint (hr) Value: 72
  misc_feature: MA Experiment 20000478 PARAMETER Experiment Name: Zm_5mM_SA_P Parameter: Tissue Value: Aerial
  misc_feature: MA Experiment 20000478 PARAMETER Experiment Name: Zm_5mM_SA_P Parameter: Treatment Value: 5mM SA vs. No Treatment
  misc_feature: MA Experiment ID: 20000535 Result: Down-regulated in Transcription
  misc_feature: MA Experiment 20000535 PARAMETER Experiment Name: Zm_Hybrid_Seed_Dev_P Parameter: DAP Value: 30 vs. 12
  misc_feature: MA Experiment 20000535 PARAMETER Experiment Name: Zm_Hybrid_Seed_Dev_P Parameter: Organism Value: Zea mays
  misc_feature: MA Experiment 20000535 PARAMETER Experiment Name: Zm_Hybrid_Seed_Dev_P Parameter: Plant Line Value: 35A19
  misc_feature: MA Experiment 20000535 PARAMETER Experiment Name: Zm_Hybrid_Seed_Dev_P Parameter: Tissue Value: Embryo vs. Unfert Floret
  misc_feature: MA Experiment ID: 20000626 Result: Down-regulated in Transcription
  misc_feature: MA Experiment 20000626 PARAMETER Experiment Name: Zm_Herbicide-Treatments_P Parameter: Timepoint (hr) Value: 12
  misc_feature: MA Experiment 20000626 PARAMETER Experiment Name: Zm_Herbicide-Treatments_P Parameter: Tissue Value: Aerial
  misc_feature: MA Experiment 20000626 PARAMETER Experiment Name: Zm_Herbicide-Treatments_P Parameter: Treatment Value: Roundup vs. No Treatment
aacaccaacctcagcacaccaaggagagtacgtggaggagcagccatggcttcatcggtggccgccgcggcgagcacattcctgggcacccgcctggcggacccggcgccacagaacgggcgcatcgtggcccggttcgggttcgggttgggcggcaaggcgaagcctgctccgaagaaggtggcgaagacatcgacctcctctgaccggccgctgtggttccccggcgccgtggcgcccgactacctggacggctcgctggtcggcgactacgggttcgacccgttcggtctcgggaagcccgtggagtacctgcagttcgagttggactcgctggaccagaacctggccaagaatgaggccggcggcatcatcggcacccggttcgagtcctccgaagtcaagtccaccccgttgcagccctacagcgaggtgttcggcctccagcggttccgcgagtgcgagctcatccacggccgctgggccatgctcgccaccctcggcgccctctccgtcgagtggctcaccggcgtcacctggcaggacgccggcaaggtggagctggtggacgggtcctcctacctgggccagccgctgccgttctccatctcgacgctcatctggatcgaggtgctcgtgatcggctacatcgagttccagcgcaacgccgagctcgacccggagaagaggctgtaccccggcggctcctacttcgacccgctcggcctggcggccgaccctgagaagaaggagcggctgcagctggcggagatcaagcacgcgcgcctcgccatggtcgccttcctcggcttcgccgtgcaggccgccgccaccggcaaggggccgctcaacaactgggccacccacctgagcgacccgctccacactaccatcttcgacacgttcggagggtcctcttaagcccgccattgctccgccccgtccatcgaccggaacgtgttcttggattaattaactacgatctctatgagcctggggatggatcaacccgtcgtgcgtggtctcgttttgtgatgagtgggagagagaggatgacaagatcgatcctttgttaatggagatctcgttaattaggagagctaccgctgggacttggtggtttgtaatatatgatccaaccagtgatgaatcaatgcattcacttgtgtacacat

SEQ ID NO: 7633 - protein, 306 aa, Zea mays subsp. mays
  peptide (1)..(306): Ceres Seq. ID no. 12408186
  misc_feature (78)..(276): Pfam Name: Chlorophyll A-B binding protein Pfam Description: Chlorophyll A-B binding protein
  misc_feature (16)..(306): Homolog of NCBI NO: 7443231 NR Description: chlorophyll a/b-binding protein CP29 precursor -
  misc_feature (16)..(306): Homolog of NCBI NO: 7443230 NR Description: probable chlorophyll a/b-binding protein - rice
  misc_feature (16)..(305): Homolog of NCBI NO: 445116 NR Description: light-harvesting complex IIa protein;
  misc_feature (15)..(306): Homolog of NCBI NO: 4689382 NR Description: chlorophyll a/b binding protein CP29 [Vigna
  misc_feature (15)..(305): Homolog of NCBI NO: 15241005 NR Description: light-harvesting chlorophyll a/b binding protein; id: At5g01530.1, supported by cDNA: gi_13877546, supported by gi_15081738, supported by cDNA: gi_15081814, supported by cDNA:
  misc_feature (15)..(305): Homolog of NCBI NO: 20260162 NR Description: chlorophyll a/b-binding protein CP29 [Arabidopsis
  misc_feature (15)..(305): Homolog of NCBI NO: 13877547 NR Description: chlorophyll a/b-binding protein CP29 [Arabidopsis
  misc_feature (15)..(305): Homolog of NCBI NO: 15081739 NR Description: AT5g01530/F7A7_50 [Arabidopsis thaliana]
  misc_feature (17)..(305): Homolog of NCBI NO: 15231990 NR Description: putative chlorophyll a/b-binding protein; protein At3g08940.1, supported by cDNA: gi_17473744, supported by cDNA:
  misc_feature (16)..(288): Homolog of NCBI NO: 15225630 NR Description: light-harvesting chlorophyll a/b binding protein; id: At2g40100.1, supported by cDNA: 6454., supported by cDNA: supported by cDNA: gi_20465760, supported by cDNA: gi_4741955
NTNLSTPRRVRGGAAMASSVAAAASTFLGTRLADPAPQNGRIVARFGFGLGGKAKPAPKKVAKTSTSSDRPLWFPGAVAPDYLDGSLVGDYGFDPFGLGKPVEYLQFELDSLDQNLAKNEAGGIIGTRFESSEVKSTPLQPYSEVFGLQRFRECELIHGRWAMLATLGALSVEWLTGVTWQDAGKVELVDGSSYLGQPLPFSISTLIWIEVLVIGYIEFQRNAELDPEKRLYPGGSYFDPLGLAADPEKKERLQLAEIKHARLAMVAFLGFAVQAAATGKGPLNNWATHLSDPLHTTIFDTFGGSS

SEQ ID NO: 7634 - protein, 291 aa, Zea mays subsp. mays
  peptide (1)..(291): Ceres Seq. ID no. 12408187
  misc_feature (63)..(261): Pfam Name: Chlorophyll A-B binding protein Pfam Description: Chlorophyll A-B binding protein
  misc_feature (1)..(291): Homolog of NCBI NO: 7443231 NR Description: chlorophyll a/b-binding protein CP29 precursor -
  misc_feature (1)..(291): Homolog of NCBI NO: 7443230 NR Description: probable chlorophyll a/b-binding protein - rice
  misc_feature (1)..(290): Homolog of NCBI NO: 445116 NR Description: light-harvesting complex IIa protein;
  misc_feature (1)..(291): Homolog of NCBI NO: 4689382 NR Description: chlorophyll a/b binding protein CP29 [Vigna
  misc_feature (1)..(290): Homolog of NCBI NO: 15241005 NR Description: light-harvesting chlorophyll a/b binding protein; id: At5g01530.1, supported by cDNA: gi_13877546, supported by gi_15081738, supported by cDNA: gi_15081814, supported by cDNA:
  misc_feature (1)..(290): Homolog of NCBI NO: 20260162 NR Description: chlorophyll a/b-binding protein CP29 [Arabidopsis
  misc_feature (1)..(290): Homolog of NCBI NO: 13877547 NR Description: chlorophyll a/b-binding protein CP29 [Arabidopsis
  misc_feature (1)..(290): Homolog of NCBI NO: 15081739 NR Description: AT5g01530/F7A7_50 [Arabidopsis thaliana]
  misc_feature (2)..(290): Homolog of NCBI NO: 15231990 NR Description: putative chlorophyll a/b-binding protein; protein At3g08940.1, supported by cDNA: gi_17473744, supported by cDNA:
  misc_feature (1)..(273): Homolog of NCBI NO: 15225630 NR Description: light-harvesting chlorophyll a/b binding protein; id: At2g40100.1, supported by cDNA: 6454., supported by cDNA: supported by cDNA: gi_20465760, supported by cDNA: gi_4741955
MASSVAAAASTFLGTRLADPAPQNGRIVARFGFGLGGKAKPAPKKVAKTSTSSDRPLWFPGAVAPDYLDGSLVGDYGFDPFGLGKPVEYLQFELDSLDQNLAKNEAGGIIGTRFESSEVKSTPLQPYSEVFGLQRFRECELIHGRWAMLATLGALSVEWLTGVTWQDAGKVELVDGSSYLGQPLPFSISTLIWIEVLVIGYIEFQRNAELDPEKRLYPGGSYFDPLGLAADPEKKERLQLAEIKHARLAMVAFLGFAVQAAATGKGPLNNWATHLSDPLHTTIFDTFGGSS

SEQ ID NO: 7635 - protein, 212 aa, Zea mays subsp. mays
  peptide (1)..(212): Ceres Seq. ID no. 12408188
  misc_feature (90)..(212): Pfam Name: Equine herpesvirus glycoprotein gp2 Pfam Description: Equine herpesvirus glycoprotein gp2
  misc_feature (66)..(212): Homolog of NCBI NO: 23017082 NR Description: hypothetical protein [Thermobifida fusca]
  misc_feature (74)..(212): Homolog of NCBI NO: 23017082 NR Description: hypothetical protein [Thermobifida fusca]
  misc_feature (103)..(212): Homolog of NCBI NO: 23510008 NR Description: hypothetical protein [Plasmodium falciparum 3D7]
  misc_feature (130)..(212): Homolog of NCBI NO: 23017082 NR Description: hypothetical protein [Thermobifida fusca]
  misc_feature (76)..(212): Homolog of NCBI NO: 23510008 NR Description: hypothetical protein [Plasmodium falciparum 3D7]
TPTSAHQGEYVEEQPWLHRWPPRRAHSWAPAWRTRRHRTGASWPGSGSGWAARRSLLRRRWRRHRPPLTGRCGSPAPWRPTTWTARWSATTGSTRSVSGSPWSTCSSSWTRWTRTWPRMRPAASSAPGSSPPKSSPPRCSPTARCSASSGSASASSSTAAGPCSPPSAPSPSSGSPASPGRTPARWSWWTGPPTWASRCRSPSRRSSGSRCS

SEQ ID NO: 7636 - DNA, 1163 bp, Zea mays subsp. mays
  misc_feature (1)..(1163): Ceres Seq. ID no. 12483001
  misc_feature: MA Experiment ID: 108523 Result: Down-regulated in Transcription
  misc_feature: MA Experiment 108523 PARAMETER Experiment Name: Zm_42deg_Heat_P Parameter: Age (day) Value: 8
  misc_feature: MA Experiment 108523 PARAMETER Experiment Name: Zm_42deg_Heat_P Parameter: Organism Value: Zea mays
  misc_feature: MA Experiment 108523 PARAMETER Experiment Name: Zm_42deg_Heat_P Parameter: Plant Line Value: 35A19
  misc_feature: MA Experiment 108523 PARAMETER Experiment Name: Zm_42deg_Heat_P Parameter: Temperature (deg C) Value: 42 vs. 22
  misc_feature: MA Experiment 108523 PARAMETER Experiment Name: Zm_42deg_Heat_P Parameter: Timepoint (hr) Value: 6
  misc_feature: MA Experiment 108523 PARAMETER Experiment Name: Zm_42deg_Heat_P Parameter: Tissue Value: Aerial
  misc_feature: MA Experiment ID: 108527 Result: Up-regulated in Transcription
  misc_feature: MA Experiment 108527 PARAMETER Experiment Name: Zm_5mM_NO_P Parameter: Age (day) Value: 8
  misc_feature: MA Experiment 108527 PARAMETER Experiment Name: Zm_5mM_NO_P Parameter: Organism Value: Zea mays
  misc_feature: MA Experiment 108527 PARAMETER Experiment Name: Zm_5mM_NO_P Parameter: Plant Line Value: 35A19
  misc_feature: MA Experiment 108527 PARAMETER Experiment Name: Zm_5mM_NO_P Parameter: Timepoint (hr) Value: 6
  misc_feature: MA Experiment 108527 PARAMETER Experiment Name: Zm_5mM_NO_P Parameter: Tissue Value: Aerial
  misc_feature: MA Experiment 108527 PARAMETER Experiment Name: Zm_5mM_NO_P Parameter: Treatment Value: 5mM NO vs. No Treatment
  misc_feature: MA Experiment ID: 108534 Result: Up-regulated in Transcription
  misc_feature: MA Experiment 108534 PARAMETER Experiment Name: Zm_4deg_Cold_P Parameter: Age (hr) Value: 8
  misc_feature: MA Experiment 108534 PARAMETER Experiment Name: Zm_4deg_Cold_P Parameter: Organism Value: Zea mays
  misc_feature: MA Experiment 108534 PARAMETER Experiment Name: Zm_4deg_Cold_P Parameter: Plant Line Value: 35A19
  misc_feature: MA Experiment 108534 PARAMETER Experiment Name: Zm_4deg_Cold_P Parameter: Temperature (deg C) Value: 4 vs. 22
  misc_feature: MA Experiment 108534 PARAMETER Experiment Name: Zm_4deg_Cold_P Parameter: Timepoint (hr) Value: 6
  misc_feature: MA Experiment 108534 PARAMETER Experiment Name: Zm_4deg_Cold_P Parameter: Tissue Value: Aerial
  misc_feature: MA Experiment ID: 108535 Result: Up-regulated in Transcription
  misc_feature: MA Experiment 108535 PARAMETER Experiment Name: Zm_Meristem_P Parameter: Age (day) Value: 8
  misc_feature: MA Experiment 108535 PARAMETER Experiment Name: Zm_Meristem_P Parameter: Organism Value: Zea mays
  misc_feature: MA Experiment 108535 PARAMETER Experiment Name: Zm_Meristem_P Parameter: Plant Line Value: 35A19
  misc_feature: MA Experiment 108535 PARAMETER Experiment Name: Zm_Meristem_P Parameter: Tissue Value: Root Meristem vs. Above Root Meristem
  misc_feature: MA Experiment ID: 108543 Result: Up-regulated in Transcription
  misc_feature: MA Experiment ID: 108559 Result: Up-regulated in Transcription
  misc_feature: MA Experiment 108559 PARAMETER Experiment Name: Zm_5mM_NO_P Parameter: Age (day) Value: 8
  misc_feature: MA Experiment 108559 PARAMETER Experiment Name: Zm_5mM_NO_P Parameter: Organism Value: Zea mays
  misc_feature: MA Experiment 108559 PARAMETER Experiment Name: Zm_5mM_NO_P Parameter: Plant Line Value: 35A19
  misc_feature: MA Experiment 108559 PARAMETER Experiment Name: Zm_5mM_NO_P Parameter: Timepoint (hr) Value: 12
  misc_feature: MA Experiment 108559 PARAMETER Experiment Name: Zm_5mM_NO_P Parameter: Tissue Value: Aerial
  misc_feature: MA Experiment 108559 PARAMETER Experiment Name: Zm_5mM_NO_P Parameter: Treatment Value: 5mM NO vs. No Treatment
  misc_feature: MA Experiment ID: 108689 Result: Up-regulated in Transcription
  misc_feature: MA Experiment 108689 PARAMETER Experiment Name: Zm_Drought_Roots_P Parameter: Age (day) Value: 9
  misc_feature: MA Experiment 108689 PARAMETER Experiment Name: Zm_Drought_Roots_P Parameter: Organism Value: Zea mays
  misc_feature: MA Experiment 108689 PARAMETER Experiment Name: Zm_Drought_Roots_P Parameter: Plant Line Value: 35A19
  misc_feature: MA Experiment 108689 PARAMETER Experiment Name: Zm_Drought_Roots_P Parameter: Timepoint (hr) Value: 24
  misc_feature: MA Experiment 108689 PARAMETER Experiment Name: Zm_Drought_Roots_P Parameter: Tissue Value: Roots
  misc_feature: MA Experiment 108689 PARAMETER Experiment Name: Zm_Drought_Roots_P Parameter: Treatment Value: Drought vs. No Drought
  misc_feature: MA Experiment ID: 20000488 Result: Down-regulated in Transcription
  misc_feature: MA Experiment 20000488 PARAMETER Experiment Name: Zm_50mM_NH4NO3_L_to_H_P Parameter: Organism Value: Zea mays
  misc_feature: MA Experiment 20000488 PARAMETER Experiment Name: Zm_50mM_NH4NO3_L_to_H_P Parameter: Timepoint (hr) Value: 8
  misc_feature: MA Experiment 20000488 PARAMETER Experiment Name: Zm_50mM_NH4NO3_L_to_H_P Parameter: Tissue Value: Leaves
  misc_feature: MA Experiment 20000488 PARAMETER Experiment Name: Zm_50mM_NH4NO3_L_to_H_P Parameter: Treatment Value: 50mM NH4NO3 vs. 100mM Mannitol
aaaagtagaaaaagcgaaaagcctagtagcacaaggctacaagcctacaagcaaccgcgtccgcgtgtggagcaaggaaggcgaggggagccgagcgggcaaccggcggcgacagacatggcggagcagcacaaggaggagtcgggcgtgacagtgctggacaagatctccgacaagctccacgggcgcgggggcggctcgtcttcgtcgtcggactcggacgacgagcgctcgtcggcgacggccgccgtgaaggccaagatctaccgcatcttcgggcgcgagaagcccgtgcactccgtcctcggcggcggcaagccggccgatctgtttctatggaggaacaagaggatctctggtggggtgctcgcaggcgcaactgccttctggctgctgtttgaggtcatggattaccacctcctcaccctgctatgccactgcctcatcctcaccctggccatcctgttcctctggtccaatgccacgactttcatcaacaagtctcctcctaacatccccgaggtgaagatcccagatgacctggctgtgaatgttgcacgttccctgagatatgagatcaacaggggttttgctaccttgagggagattggccaaggccatgacctcaagaaatttctgattgtgattgcaggactgtggatcctttctgttcttgggagctgctgcaatttcctcaccttgtcttacatagtttttatggtactgtacactgtaccggtcctgtatgagaaacatgaggataaggttgatgcttttggtgagaaggccatggtcgagctgaagaggtactacgccatcttcgacgagaaatgcctatcaaagattccgaagggcccattaaaagacaagaagcaacattagaagcttagaatcagataagggtctgcggtgatttatcatctcttttgaccattattcgtcggttttggtggatggatgtgattccatgtctaaatacctggacgtgctctagtgttttagtgtggtcagtagcaatgttctaaattatctgagattacgctgaatcatgttctgaagtccacgtttaacgttgctctccctatcctttggaagtggcaatttcctcaatgtctgtaatatatctagtctagtgctatttcttaatctgacctagcgtcatg

SEQ ID NO: 7637 - protein, 293 aa, Zea mays subsp. mays
  peptide (1)..(293): Ceres Seq. ID no. 12483002
  misc_feature (40)..(291): Homolog of NCBI NO: 34909318 NR Description: OSJNBb0021A09.5 [Oryza sativa (japonica
  misc_feature (75)..(291): Homolog of NCBI NO: 34904202 NR Description: P0492F05.25 [Oryza sativa (japonica
  misc_feature (46)..(86): Homolog of NCBI NO: 34904202 NR Description: P0492F05.25 [Oryza sativa (japonica
  misc_feature (51)..(292): Homolog of NCBI NO: 15236556 NR Description: putative protein; protein id: At4g23630.1, by cDNA: 39185., supported by cDNA: gi_15215585 [Arabidopsis
  misc_feature (51)..(292): Homolog of NCBI NO: 15237093 NR Description: putative protein; protein id: At4g11220.1, by cDNA: 23536., supported by cDNA: gi_14334419, supported by gi_15081760, supported by cDNA: gi_16209686 [Arabidopsis
  misc_feature (40)..(291): Homolog of NCBI NO: 15238125 NR Description: putative protein; protein id: At5g41600.1, by cDNA: gi_14334529, supported by cDNA: gi_16323068 [Arabidopsis >gi|10178014|dbj|BAB11466.1| contains similarity to 24 kDa seed
  misc_feature (40)..(285): Homolog of NCBI NO: 15222616 NR Description: hypothetical protein; protein id: At1g64090.1, by cDNA: gi_17381217 [Arabidopsis thaliana] F22C12.15 [Arabidopsis thaliana] >gi|17381218|gb|AAL36421.1|
  misc_feature (40)..(290): Homolog of NCBI NO: 18406991 NR Description: expressed protein; protein id: At2g46170.1, by cDNA: gi_15450758, supported by cDNA: gi_18491130 [Arabidopsis >gi|25408969|pir||E84899 hypothetical protein At2g46170
  misc_feature (44)..(290): Homolog of NCBI NO: 15233147 NR Description: putative protein; protein id: At3g61560.1
  misc_feature (64)..(283): Homolog of NCBI NO: 15234108 NR Description: hypothetical protein; protein id: At4g01230.1
KSRKSEKPSSTRLQAYKQPRPRVEQGRRGEPSGQPAATDMAEQHKEESGVTVLDKISDKLHGRGGGSSSSSDSDDERSSATAAVKAKIYRIFGREKPVHSVLGGGKPADLFLWRNKRISGGVLAGATAFWLLFEVMDYHLLTLLCHCLILTLAILFLWSNATTFINKSPPNIPEVKIPDDLAVNVARSLRYEINRGFATLREIGQGHDLKKFLIVIAGLWILSVLGSCCNFLTLSYIVFMVLYTVPVLYEKHEDKVDAFGEKAMVELKRYYAIFDEKCLSKIPKGPLKDKKQH

SEQ ID NO: 7638 - protein, 254 aa, Zea mays subsp. mays
  peptide (1)..(254): Ceres Seq. ID no. 12483003
  misc_feature (1)..(252): Homolog of NCBI NO: 34909318 NR Description: OSJNBb0021A09.5 [Oryza sativa (japonica
  misc_feature (36)..(252): Homolog of NCBI NO: 34904202 NR Description: P0492F05.25 [Oryza sativa (japonica
  misc_feature (7)..(47): Homolog of NCBI NO: 34904202 NR Description: P0492F05.25 [Oryza sativa (japonica
  misc_feature (12)..(253): Homolog of NCBI NO: 15236556 NR Description: putative protein; protein id: At4g23630.1, by cDNA: 39185., supported by cDNA: gi_15215585 [Arabidopsis
  misc_feature (12)..(253): Homolog of NCBI NO: 15237093 NR Description: putative protein; protein id: At4g11220.1, by cDNA: 23536., supported by cDNA: gi_14334419, supported by gi_15081760, supported by cDNA: gi_16209686 [Arabidopsis
  misc_feature (1)..(252): Homolog of NCBI NO: 15238125 NR Description: putative protein; protein id: At5g41600.1, by cDNA: gi_14334529, supported by cDNA: gi_16323068 [Arabidopsis >gi|10178014|dbj|BAB11466.1| contains similarity to 24 kDa seed
  misc_feature (1)..(246): Homolog of NCBI NO: 15222616 NR Description: hypothetical protein; protein id: At1g64090.1, by cDNA: gi_17381217 [Arabidopsis thaliana] F22C12.15 [Arabidopsis thaliana] >gi|17381218|gb|AAL36421.1|
  misc_feature (1)..(251): Homolog of NCBI NO: 18406991 NR Description: expressed protein; protein id: At2g46170.1, by cDNA: gi_15450758, supported by cDNA: gi_18491130 [Arabidopsis >gi|25408969|pir||E84899 hypothetical protein At2g46170
  misc_feature (5)..(251): Homolog of NCBI NO: 15233147 NR Description: putative protein; protein id: At3g61560.1
  misc_feature (25)..(244): Homolog of NCBI NO: 15234108 NR Description: hypothetical protein; protein id: At4g01230.1
MAEQHKEESGVTVLDKISDKLHGRGGGSSSSSDSDDERSSATAAVKAKIYRIFGREKPVHSVLGGGKPADLFLWRNKRISGGVLAGATAFWLLFEVMDYHLLTLLCHCLILTLAILFLWSNATTFINKSPPNIPEVKIPDDLAVNVARSLRYEINRGFATLREIGQGHDLKKFLIVIAGLWILSVLGSCCNFLTLSYIVFMVLYTVPVLYEKHEDKVDAFGEKAMVELKRYYAIFDEKCLSKIPKGPLKDKKQH

SEQ ID NO: 7639 - protein, 158 aa, Zea mays subsp. mays
  peptide (1)..(158): Ceres Seq. ID no. 12483004
  misc_feature (1)..(156): Homolog of NCBI NO: 34909318 NR Description: OSJNBb0021A09.5 [Oryza sativa (japonica
  misc_feature (1)..(156): Homolog of NCBI NO: 34904202 NR Description: P0492F05.25 [Oryza sativa (japonica
  misc_feature (1)..(157): Homolog of NCBI NO: 15236556 NR Description: putative protein; protein id: At4g23630.1, by cDNA: 39185., supported by cDNA: gi_15215585 [Arabidopsis
  misc_feature (1)..(157): Homolog of NCBI NO: 15237093 NR Description: putative protein; protein id: At4g11220.1, by cDNA: 23536., supported by cDNA: gi_14334419, supported by gi_15081760, supported by cDNA: gi_16209686 [Arabidopsis
  misc_feature (1)..(156): Homolog of NCBI NO: 15238125 NR Description: putative protein; protein id: At5g41600.1, by cDNA: gi_14334529, supported by cDNA: gi_16323068 [Arabidopsis >gi|10178014|dbj|BAB11466.1| contains similarity to 24 kDa seed
  misc_feature (1)..(150): Homolog of NCBI NO: 15222616 NR Description: hypothetical protein; protein id: At1g64090.1, by cDNA: gi_17381217 [Arabidopsis thaliana] F22C12.15 [Arabidopsis thaliana] >gi|17381218|gb|AAL36421.1|
  misc_feature (1)..(155): Homolog of NCBI NO: 18406991 NR Description: expressed protein; protein id: At2g46170.1, by cDNA: gi_15450758, supported by cDNA: gi_18491130 [Arabidopsis >gi|25408969|pir||E84899 hypothetical protein At2g46170
  misc_feature (1)..(155): Homolog of NCBI NO: 15233147 NR Description: putative protein; protein id: At3g61560.1
  misc_feature (1)..(148): Homolog of NCBI NO: 15234108 NR Description: hypothetical protein; protein id: At4g01230.1
  misc_feature (1)..(157): Homolog of NCBI NO: 18398810 NR Description: expressed protein; protein id: At3g10260.1, by cDNA: 15153., supported by cDNA: gi_20259182 [Arabidopsis >gi|6056199|gb|AAF02816.1|AC009400_12 unknown protein
MDYHLLTLLCHCLILTLAILFLWSNATTFINKSPPNIPEVKIPDDLAVNVARSLRYEINRGFATLREIGQGHDLKKFLIVIAGLWILSVLGSCCNFLTLSYIVFMVLYTVPVLYEKHEDKVDAFGEKAMVELKRYYAIFDEKCLSKIPKGPLKDKKQH

SEQ ID NO: 7640 - DNA, 1806 bp, Zea mays subsp. mays
  misc_feature (1)..(1806): Ceres Seq. ID no. 12373188
  misc_feature: MA Experiment ID: 108504 Result: Down-regulated in Transcription
  misc_feature: MA Experiment 108504 PARAMETER Experiment Name: Zm_Drought_P Parameter: Age (day) Value: 8
  misc_feature: MA Experiment 108504 PARAMETER Experiment Name: Zm_Drought_P Parameter: Organism Value: Zea mays
  misc_feature: MA Experiment 108504 PARAMETER Experiment Name: Zm_Drought_P Parameter: Plant Line Value: 35A19
  misc_feature: MA Experiment 108504 PARAMETER Experiment Name: Zm_Drought_P Parameter: Timepoint (hr) Value: 12
  misc_feature: MA Experiment 108504 PARAMETER Experiment Name: Zm_Drought_P Parameter: Tissue Value: Aerial
  misc_feature: MA Experiment 108504 PARAMETER Experiment Name: Zm_Drought_P Parameter: Treatment Value: Drought vs. No Drought
  misc_feature: MA Experiment ID: 108513 Result: Down-regulated in Transcription
  misc_feature: MA Experiment 108513 PARAMETER Experiment Name: Zm_100uM_ABA_P Parameter: Age (day) Value: 8
  misc_feature: MA Experiment 108513 PARAMETER Experiment Name: Zm_100uM_ABA_P Parameter: Organism Value: Zea mays
  misc_feature: MA Experiment 108513 PARAMETER Experiment Name: Zm_100uM_ABA_P Parameter: Plant Line Value: 35A19
  misc_feature: MA Experiment 108513 PARAMETER Experiment Name: Zm_100uM_ABA_P Parameter: Timepoint (hr) Value: 6
  misc_feature: MA Experiment 108513 PARAMETER Experiment Name: Zm_100uM_ABA_P Parameter: Tissue Value: Aerial
  misc_feature: MA Experiment 108513 PARAMETER Experiment Name: Zm_100uM_ABA_P Parameter: Treatment Value: 100uM ABA vs. No Treatment
  misc_feature: MA Experiment ID: 108515 Result: Down-regulated in Transcription
  misc_feature: MA Experiment 108515 PARAMETER Experiment Name: Zm_2mM_SA_P Parameter: Age (day) Value: 8
  misc_feature: MA Experiment 108515 PARAMETER Experiment Name: Zm_2mM_SA_P Parameter: Organism Value: Zea mays
  misc_feature: MA Experiment 108515 PARAMETER Experiment Name: Zm_2mM_SA_P Parameter: Plant Line Value: 35A19
  misc_feature: MA Experiment 108515 PARAMETER Experiment Name: Zm_2mM_SA_P Parameter: Timepoint (hr) Value: 12
  misc_feature: MA Experiment 108515 PARAMETER Experiment Name: Zm_2mM_SA_P Parameter: Tissue Value: Aerial
  misc_feature: MA Experiment 108515 PARAMETER Experiment Name: Zm_2mM_SA_P Parameter: Treatment Value: 2mM SA vs. No Treatment
  misc_feature: MA Experiment ID: 108527 Result: Down-regulated in Transcription
  misc_feature: MA Experiment 108527 PARAMETER Experiment Name: Zm_5mM_NO_P Parameter: Age (day) Value: 8
  misc_feature: MA Experiment 108527 PARAMETER Experiment Name: Zm_5mM_NO_P Parameter: Organism Value: Zea mays
  misc_feature: MA Experiment 108527 PARAMETER Experiment Name: Zm_5mM_NO_P Parameter: Plant Line Value: 35A19
  misc_feature: MA Experiment 108527 PARAMETER Experiment Name: Zm_5mM_NO_P Parameter: Timepoint (hr) Value: 6
  misc_feature: MA Experiment 108527 PARAMETER Experiment Name: Zm_5mM_NO_P Parameter: Tissue Value: Aerial
  misc_feature: MA Experiment 108527 PARAMETER Experiment Name: Zm_5mM_NO_P Parameter: Treatment Value: 5mM NO vs. No Treatment
  misc_feature: MA Experiment ID: 108528 Result: Up-regulated in Transcription
  misc_feature: MA Experiment 108528 PARAMETER Experiment Name: Zm_Imbibed_Seeds_P Parameter: Age (day) Value: 5 vs. 2
  misc_feature: MA Experiment 108528 PARAMETER Experiment Name: Zm_Imbibed_Seeds_P Parameter: Organism Value: Zea mays
  misc_feature: MA Experiment 108528 PARAMETER Experiment Name: Zm_Imbibed_Seeds_P Parameter: Plant Line Value: 35A19
  misc_feature: MA Experiment 108528 PARAMETER Experiment Name: Zm_Imbibed_Seeds_P Parameter: Tissue Value: Aerial vs. Embryo
  misc_feature: MA Experiment ID: 108529 Result: Up-regulated in Transcription
  misc_feature: MA Experiment 108529 PARAMETER Experiment Name: Zm_Imbibed_Seeds_P Parameter: Age (day) Value: 5 vs. 2
  misc_feature: MA Experiment 108529 PARAMETER Experiment Name: Zm_Imbibed_Seeds_P Parameter: Organism Value: Zea mays
  misc_feature: MA Experiment 108529 PARAMETER Experiment Name: Zm_Imbibed_Seeds_P Parameter: Plant Line Value: 35A19
  misc_feature: MA Experiment 108529 PARAMETER Experiment Name: Zm_Imbibed_Seeds_P Parameter: Tissue Value: Roots vs. Embryo
  misc_feature: MA Experiment ID: 108530 Result: Up-regulated in Transcription
  misc_feature: MA Experiment 108530 PARAMETER Experiment Name: Zm_Imbibed_Seeds_P Parameter: Age (day) Value: 6 vs. 2
  misc_feature: MA Experiment 108530 PARAMETER Experiment Name: Zm_Imbibed_Seeds_P Parameter: Organism Value: Zea mays
  misc_feature: MA Experiment 108530 PARAMETER Experiment Name: Zm_Imbibed_Seeds_P Parameter: Plant Line Value: 35A19
  misc_feature: MA Experiment 108530 PARAMETER Experiment Name: Zm_Imbibed_Seeds_P Parameter: Tissue Value: Aerial vs. Embryo
  misc_feature: MA Experiment ID: 108534 Result: Up-regulated in Transcription
  misc_feature: MA Experiment 108534 PARAMETER Experiment Name: Zm_4deg_Cold_P Parameter: Age (hr) Value: 8
  misc_feature: MA Experiment 108534 PARAMETER Experiment Name: Zm_4deg_Cold_P Parameter: Organism Value: Zea mays
  misc_feature: MA Experiment 108534 PARAMETER Experiment Name: Zm_4deg_Cold_P Parameter: Plant Line Value: 35A19
  misc_feature: MA Experiment 108534 PARAMETER Experiment Name: Zm_4deg_Cold_P Parameter: Temperature (deg C) Value: 4 vs. 22
  misc_feature: MA Experiment 108534 PARAMETER Experiment Name: Zm_4deg_Cold_P Parameter: Timepoint (hr) Value: 6
  misc_feature: MA Experiment 108534 PARAMETER Experiment Name: Zm_4deg_Cold_P Parameter: Tissue Value: Aerial
  misc_feature: MA Experiment ID: 108535 Result: Down-regulated in Transcription
  misc_feature: MA Experiment 108535 PARAMETER Experiment Name: Zm_Meristem_P Parameter: Age (day) Value: 8
  misc_feature: MA Experiment 108535 PARAMETER Experiment Name: Zm_Meristem_P Parameter: Organism Value: Zea mays
  misc_feature: MA Experiment 108535 PARAMETER Experiment Name: Zm_Meristem_P Parameter: Plant Line Value: 35A19
  misc_feature: MA Experiment 108535 PARAMETER Experiment Name: Zm_Meristem_P Parameter: Tissue Value: Root Meristem vs. Above Root Meristem
  misc_feature: MA Experiment ID: 108542 Result: Down-regulated in Transcription
  misc_feature: MA Experiment 108542 PARAMETER Experiment Name: Zm_150mM_NaCl_P Parameter: Age (day) Value: 8
  misc_feature: MA Experiment 108542 PARAMETER Experiment Name: Zm_150mM_NaCl_P Parameter: Organism Value: Zea mays
  misc_feature: MA Experiment 108542 PARAMETER Experiment Name: Zm_150mM_NaCl_P Parameter: Plant Line Value: 35A19
  misc_feature: MA Experiment 108542 PARAMETER Experiment Name: Zm_150mM_NaCl_P Parameter: Timepoint (hr) Value: 6
  misc_feature: MA Experiment 108542 PARAMETER Experiment Name: Zm_150mM_NaCl_P Parameter: Tissue Value: Aerial
  misc_feature: MA Experiment 108542 PARAMETER Experiment Name: Zm_150mM_NaCl_P Parameter: Treatment Value: 150mM NaCl vs. No Treatment
  misc_feature: MA Experiment ID: 108545 Result: Up-regulated in Transcription
  misc_feature: MA Experiment 108545 PARAMETER Experiment Name: Zm_Imbibed_Seeds_P Parameter: Age (day) Value: 3 vs. 2
  misc_feature: MA Experiment 108545 PARAMETER Experiment Name: Zm_Imbibed_Seeds_P Parameter: Organism Value: Zea mays
  misc_feature: MA Experiment 108545 PARAMETER Experiment Name: Zm_Imbibed_Seeds_P Parameter: Plant Line Value: 35A19
  misc_feature: MA Experiment 108545 PARAMETER Experiment Name: Zm_Imbibed_Seeds_P Parameter: Tissue Value: Aerial vs. Embryo
  misc_feature: MA Experiment ID: 108546 Result: Up-regulated in Transcription
  misc_feature: MA Experiment 108546 PARAMETER Experiment Name: Zm_Imbibed_Seeds_P Parameter: Age (day) Value: 3 vs. 2
  misc_feature: MA Experiment 108546 PARAMETER Experiment Name: Zm_Imbibed_Seeds_P Parameter: Organism Value: Zea mays
  misc_feature: MA Experiment 108546 PARAMETER Experiment Name: Zm_Imbibed_Seeds_P Parameter: Plant Line Value: 35A19
  misc_feature: MA Experiment 108546 PARAMETER Experiment Name: Zm_Imbibed_Seeds_P Parameter: Tissue Value: Roots vs. Embryo
  misc_feature: MA Experiment ID: 108547 Result: Up-regulated in Transcription
  misc_feature: MA Experiment 108547 PARAMETER Experiment Name: Zm_Imbibed_Seeds_P Parameter: Age (day) Value: 4 vs. 2
  misc_feature: MA Experiment 108547 PARAMETER Experiment Name: Zm_Imbibed_Seeds_P Parameter: Organism Value: Zea mays
  misc_feature: MA Experiment 108547 PARAMETER Experiment Name: Zm_Imbibed_Seeds_P Parameter: Plant Line Value: 35A19
  misc_feature: MA Experiment 108547 PARAMETER Experiment Name: Zm_Imbibed_Seeds_P Parameter: Tissue Value: Aerial vs. Embryo
  misc_feature: MA Experiment ID: 108556 Result: Down-regulated in Transcription
  misc_feature: MA Experiment 108556 PARAMETER Experiment Name: Zm_Drought_P Parameter: Age (day) Value: 9
  misc_feature: MA Experiment 108556 PARAMETER Experiment Name: Zm_Drought_P Parameter: Organism Value: Zea mays
  misc_feature: MA Experiment 108556 PARAMETER Experiment Name: Zm_Drought_P Parameter: Plant Line Value: 35A19
  misc_feature: MA Experiment 108556 PARAMETER Experiment Name: Zm_Drought_P Parameter: Timepoint (hr) Value: 24
  misc_feature: MA Experiment 108556 PARAMETER Experiment Name: Zm_Drought_P Parameter: Tissue Value: Aerial
  misc_feature: MA Experiment 108556 PARAMETER Experiment Name: Zm_Drought_P Parameter: Treatment Value: Drought vs. No Drought
  misc_feature: MA Experiment ID: 108559 Result: Down-regulated in Transcription
  misc_feature: MA Experiment 108559 PARAMETER Experiment Name: Zm_5mM_NO_P Parameter: Age (day) Value: 8
  misc_feature: MA Experiment 108559 PARAMETER Experiment Name: Zm_5mM_NO_P Parameter: Organism Value: Zea mays
  misc_feature: MA Experiment 108559 PARAMETER Experiment Name: Zm_5mM_NO_P Parameter: Plant Line Value: 35A19
  misc_feature: MA Experiment 108559 PARAMETER Experiment Name: Zm_5mM_NO_P Parameter: Timepoint (hr) Value: 12
  misc_feature: MA Experiment 108559 PARAMETER Experiment Name: Zm_5mM_NO_P Parameter: Tissue Value: Aerial
  misc_feature: MA Experiment 108559 PARAMETER Experiment Name: Zm_5mM_NO_P Parameter: Treatment Value: 5mM NO vs. No Treatment
  misc_feature: MA Experiment ID: 108597 Result: Down-regulated in Transcription
  misc_feature: MA Experiment 108597 PARAMETER Experiment Name: Zm_100uM_ABA_P Parameter: Age (day) Value: 9
  misc_feature: MA Experiment 108597 PARAMETER Experiment Name: Zm_100uM_ABA_P Parameter: Organism Value: Zea mays
  misc_feature: MA Experiment 108597 PARAMETER Experiment Name: Zm_100uM_ABA_P Parameter: Plant Line Value: 35A19
  misc_feature: MA Experiment 108597 PARAMETER Experiment Name: Zm_100uM_ABA_P Parameter: Timepoint (hr) Value: 24
  misc_feature: MA Experiment 108597 PARAMETER Experiment Name: Zm_100uM_ABA_P Parameter: Tissue Value: Aerial
  misc_feature: MA Experiment 108597 PARAMETER Experiment Name: Zm_100uM_ABA_P Parameter: Treatment Value: 100uM ABA vs. No Treatment
  misc_feature: MA Experiment ID: 20000108 Result: Down-regulated in Transcription
  misc_feature: MA Experiment 20000108 PARAMETER Experiment Name: Zm_Root-Tips_P Parameter: Age (day) Value: 12
  misc_feature: MA Experiment 20000108 PARAMETER Experiment Name: Zm_Root-Tips_P Parameter: Organism Value: Zea mays
  misc_feature: MA Experiment 20000108 PARAMETER Experiment Name: Zm_Root-Tips_P Parameter: Tissue Value: Root tips vs. Root mid region    35
  misc_feature: MA Experiment 20000108 PARAMETER Experiment Name: Zm_Root-Tips_P Parameter: Tissue Value: Root tips vs. Root mid region   Sequence Listing-Misc Features (4)
  misc_feature: MA Experiment ID: 20000478 Result: Down-regulated in Transcription
  misc_feature: MA Experiment 20000478 PARAMETER Experiment Name: Zm_5mM_SA_P Parameter: Age (day) Value: 11
  misc_feature: MA Experiment 20000478 PARAMETER Experiment Name: Zm_5mM_SA_P Parameter: Organism Value: Zea mays
  misc_feature: MA Experiment 20000478 PARAMETER Experiment Name: Zm_5mM_SA_P Parameter: Plant Line Value: 35A19
  misc_feature: MA Experiment 20000478 PARAMETER Experiment Name: Zm_5mM_SA_P Parameter: Timepoint (hr) Value: 72
  misc_feature: MA Experiment 20000478 PARAMETER Experiment Name: Zm_5mM_SA_P Parameter: Tissue Value: Aerial
  misc_feature: MA Experiment 20000478 PARAMETER Experiment Name: Zm_5mM_SA_P Parameter: Treatment Value: 5mM SA vs. No Treatment
  misc_feature: MA Experiment ID: 20000535 Result: Down-regulated in Transcription
  misc_feature: MA Experiment 20000535 PARAMETER Experiment Name: Zm_Hybrid_Seed_Dev_P Parameter: DAP Value: 30 vs. 12
  misc_feature: MA Experiment 20000535 PARAMETER Experiment Name: Zm_Hybrid_Seed_Dev_P Parameter: Organism Value: Zea mays
  misc_feature: MA Experiment 20000535 PARAMETER Experiment Name: Zm_Hybrid_Seed_Dev_P Parameter: Plant Line Value: 35A19
  misc_feature: MA Experiment 20000535 PARAMETER Experiment Name: Zm_Hybrid_Seed_Dev_P Parameter: Tissue Value: Embryo vs. Unfert Floret
accagtcaaacaacgccaagcgcgcctcccgtgaacccagcggcccgtcaagtcaaagcatggacgtgccgctcccgctgctgctcggctccgtggccgtttccctcgtcgtgtggtgccttctgctccgccgcggcggggccgggaaggggaagcggccgctgccgcccggtccccggggctggccggtgctgggcaacctgccgcaggtcggcgccaagccgcaccacaccatgtgtgctctggcgcgggagtacggcccgctgttccggctccggttcggcagcgccgaggtggtggtggccgcgtcggcgcgggtggcggcccagttcctgcgcgcccacgacgccaacttcagcaaccgcccgcccaactccggggccgagcacgtggcgtacaactaccaggacctggtgttcgccccgtacggctcccggtggcgcgcgctacggaagctgtgcgcgctccacctcttctccgccaaggccctggacgacctgcgcggcgtcagggagggcgaggtggcgctcatggtgagggagctcgcccggcagggagagcgagaacgggccgccgtggcgctgggccaggtggccaacgtctgcgcgaccaacacgctggcccgggcgaccgtgggccggcgcgtgttcgccgtcgacggaggggagggcgccagggagttcaaggagatggtggtggagctgatgcagctcgccggggtcttcaacgtcggggacttcgtgccggcgctcgcgtggctcgacccgcagggcgtggtcggcaggatgaagcggctgcaccgcaggtacgacgacatgatgaacgggatcatcagggagaggaaggccgccgaggaaggcaaggacctgctcagcgtgctgctggccaggatgcgggagcagcagccgctagcggagggcgacgacactaggttcaacgagactgacatcaaggcacttctcctgaacctcttcacggctgggacggacacgacatccagcacggtggagtgggcgctggccgagctgatccggcatccggacgtgctcaggaaggcccagcaggagctcgacgccgtcgtcggccgcgaccgcctcgtctccgagtcggacctcccgcgcctcacgtacctcacggcggtgatcaaggagacgttccgtctgcacccgtccacgccgctgtcgctgccccgcgtcgccgccgaggagtgcgaggtggacgggttccgcatccccgccggcaccacgctgctggtgaacgtgtgggcgatcgcccgagacccggaggcgtggcccgagcctctcgagttccggcccggccgcttcctcccgggcggctcgcacgcgggagtcgatgtcaaagggagcgacttcgagctcatcccgttcggcgccggccggagaatctgcgcgggcctcagctggggtctgcggatggtcacgctcatgacggccacgctggtgcacgccctggactgggacctcgccgacggcatgaccgcggacaagctggacatggaggaggcctacgggctcaccctgcagcgcgccgtgccgttaatggtccgcccagcacccagactgctgccgtctgcttacgcagagtagaaatcgatgctcgccggccggccatatccatgccgtccgtatgcatggatgcatggtcaaataaataagcgttgtacgtgggtatcggtgtcacaaactcacaatgtgtatcatgtattgcttcgtcagtggcgtgtgtaagcgtccgtttttttttgtattttattctttttccagaaaaaatcaccgttgaaatcgc

SEQ ID NO: 7641 - protein, 534 aa, Zea mays subsp. mays
  peptide (1)..(534): Ceres Seq. ID no. 12373189
  misc_feature (55)..(521): Pfam Name: Cytochrome P450 Pfam Description: Cytochrome P450
  misc_feature (20)..(532): Homolog of NCBI NO: 37532650 NR Description: putative flavonoid 3'-hydroxylase [Oryza sativa
  misc_feature (24)..(532): Homolog of NCBI NO: 12231880 NR Description: putative flavonoid 3'-hydroxylase [Callistephus
  misc_feature (20)..(532): Homolog of NCBI NO: 27151498 NR Description: Flavonoid 3'-monooxygenase (Flavonoid
  misc_feature (24)..(532): Homolog of NCBI NO: 15241483 NR Description: flavonoid 3'-hydroxylase (F3'H); protein id:
  misc_feature (26)..(532): Homolog of NCBI NO: 14278925 NR Description: flavonoid 3'-hydroxylase [Perilla frutescens]
  misc_feature (24)..(532): Homolog of NCBI NO: 12231886 NR Description: flavonoid 3'-hydroxylase [Matthiola incana]
QSNNAKRASREPSGPSSQSMDVPLPLLLGSVAVSLVVWCLLLRRGGAGKGKRPLPPGPRGWPVLGNLPQVGAKPHHTMCALAREYGPLFRLRFGSAEVVVAASARVAAQFLRAHDANFSNRPPNSGAEHVAYNYQDLVFAPYGSRWRALRKLCALHLFSAKALDDLRGVREGEVALMVRELARQGERERAAVALGQVANVCATNTLARATVGRRVFAVDGGEGAREFKEMVVELMQLAGVFNVGDFVPALAWLDPQGVVGRMKRLHRRYDDMMNGIIRERKAAEEGKDLLSVLLARMREQQPLAEGDDTRFNETDIKALLLNLFTAGTDTTSSTVEWALAELIRHPDVLRKAQQELDAVVGRDRLVSESDLPRLTYLTAVIKETFRLHPSTPLSLPRVAAEECEVDGFRIPAGTTLLVNVWAIARDPEAWPEPLEFRPGRFLPGGSHAGVDVKGSDFELIPFGAGRRICAGLSWGLRMVTLMTATLVHALDWDLADGMTADKLDMEEAYGLTLQRAVPLMVRPAPRLLPSAYAE

SEQ ID NO: 7642 - protein, 515 aa, Zea mays subsp. mays
  peptide (1)..(515): Ceres Seq. ID no. 12373190
  misc_feature (36)..(502): Pfam Name: Cytochrome P450 Pfam Description: Cytochrome P450
  misc_feature (1)..(513): Homolog of NCBI NO: 37532650 NR Description: putative flavonoid 3'-hydroxylase [Oryza sativa
  misc_feature (5)..(513): Homolog of NCBI NO: 12231880 NR Description: putative flavonoid 3'-hydroxylase [Callistephus
  misc_feature (1)..(513): Homolog of NCBI NO: 27151498 NR Description: Flavonoid 3'-monooxygenase (Flavonoid
  misc_feature (5)..(513): Homolog of NCBI NO: 15241483 NR Description: flavonoid 3'-hydroxylase (F3'H); protein id:
  misc_feature (7)..(513): Homolog of NCBI NO: 14278925 NR Description: flavonoid 3'-hydroxylase [Perilla frutescens]
  misc_feature (5)..(513): Homolog of NCBI NO: 12231886 NR Description: flavonoid 3'-hydroxylase [Matthiola incana]
MDVPLPLLLGSVAVSLVVWCLLLRRGGAGKGKRPLPPGPRGWPVLGNLPQVGAKPHHTMCALAREYGPLFRLRFGSAEVVVAASARVAAQFLRAHDANFSNRPPNSGAEHVAYNYQDLVFAPYGSRWRALRKLCALHLFSAKALDDLRGVREGEVALMVRELARQGERERAAVALGQVANVCATNTLARATVGRRVFAVDGGEGAREFKEMVVELMQLAGVFNVGDFVPALAWLDPQGVVGRMKRLHRRYDDMMNGIIRERKAAEEGKDLLSVLLARMREQQPLAEGDDTRFNETDIKALLLNLFTAGTDTTSSTVEWALAELIRHPDVLRKAQQELDAVVGRDRLVSESDLPRLTYLTAVIKETFRLHPSTPLSLPRVAAEECEVDGFRIPAGTTLLVNVWAIARDPEAWPEPLEFRPGRFLPGGSHAGVDVKGSDFELIPFGAGRRICAGLSWGLRMVTLMTATLVHALDWDLADGMTADKLDMEEAYGLTLQRAVPLMVRPAPRLLPSAYAE

SEQ ID NO: 7643 - protein, 457 aa, Zea mays subsp. mays
  peptide (1)..(457): Ceres Seq. ID no. 12373191
  misc_feature (1)..(444): Pfam Name: Cytochrome P450 Pfam Description: Cytochrome P450
  misc_feature (1)..(455): Homolog of NCBI NO: 37532650 NR Description: putative flavonoid 3'-hydroxylase [Oryza sativa
  misc_feature (1)..(455): Homolog of NCBI NO: 12231880 NR Description: putative flavonoid 3'-hydroxylase [Callistephus
  misc_feature (1)..(455): Homolog of NCBI NO: 27151498 NR Description: Flavonoid 3'-monooxygenase (Flavonoid
  misc_feature (1)..(455): Homolog of NCBI NO: 15241483 NR Description: flavonoid 3'-hydroxylase (F3'H); protein id:
  misc_feature (1)..(455): Homolog of NCBI NO: 14278925 NR Description: flavonoid 3'-hydroxylase [Perilla frutescens]
  misc_feature (1)..(455): Homolog of NCBI NO: 12231886 NR Description: flavonoid 3'-hydroxylase [Matthiola incana]
MCALAREYGPLFRLRFGSAEVVVAASARVAAQFLRAHDANFSNRPPNSGAEHVAYNYQDLVFAPYGSRWRALRKLCALHLFSAKALDDLRGVREGEVALMVRELARQGERERAAVALGQVANVCATNTLARATVGRRVFAVDGGEGAREFKEMVVELMQLAGVFNVGDFVPALAWLDPQGVVGRMKRLHRRYDDMMNGIIRERKAAEEGKDLLSVLLARMREQQPLAEGDDTRFNETDIKALLLNLFTAGTDTTSSTVEWALAELIRHPDVLRKAQQELDAVVGRDRLVSESDLPRLTYLTAVIKETFRLHPSTPLSLPRVAAEECEVDGFRIPAGTTLLVNVWAIARDPEAWPEPLEFRPGRFLPGGSHAGVDVKGSDFELIPFGAGRRICAGLSWGLRMVTLMTATLVHALDWDLADGMTADKLDMEEAYGLTLQRAVPLMVRPAPRLLPSAYAE

SEQ ID NO: 7644 - DNA, 1269 bp, Zea mays subsp. mays
  misc_feature (1)..(1269): Ceres Seq. ID no. 12408669
  misc_feature: MA Experiment ID: 108523 Result: Down-regulated in Transcription
  misc_feature: MA Experiment 108523 PARAMETER Experiment Name: Zm_42deg_Heat_P Parameter: Age (day) Value: 8
  misc_feature: MA Experiment 108523 PARAMETER Experiment Name: Zm_42deg_Heat_P Parameter: Organism Value: Zea mays
  misc_feature: MA Experiment 108523 PARAMETER Experiment Name: Zm_42deg_Heat_P Parameter: Plant Line Value: 35A19
  misc_feature: MA Experiment 108523 PARAMETER Experiment Name: Zm_42deg_Heat_P Parameter: Temperature (deg C) Value: 42 vs. 22
  misc_feature: MA Experiment 108523 PARAMETER Experiment Name: Zm_42deg_Heat_P Parameter: Timepoint (hr) Value: 6
  misc_feature: MA Experiment 108523 PARAMETER Experiment Name: Zm_42deg_Heat_P Parameter: Tissue Value: Aerial
  misc_feature: MA Experiment ID: 108529 Result: Down-regulated in Transcription
  misc_feature: MA Experiment 108529 PARAMETER Experiment Name: Zm_Imbibed_Seeds_P Parameter: Age (day) Value: 5 vs. 2
  misc_feature: MA Experiment 108529 PARAMETER Experiment Name: Zm_Imbibed_Seeds_P Parameter: Organism Value: Zea mays
  misc_feature: MA Experiment 108529 PARAMETER Experiment Name: Zm_Imbibed_Seeds_P Parameter: Plant Line Value: 35A19
  misc_feature: MA Experiment 108529 PARAMETER Experiment Name: Zm_Imbibed_Seeds_P Parameter: Tissue Value: Roots vs. Embryo
  misc_feature: MA Experiment ID: 108536 Result: Down-regulated in Transcription
  misc_feature: MA Experiment 108536 PARAMETER Experiment Name: Zm_Meristem_P Parameter: Age (day) Value: 8
  misc_feature: MA Experiment 108536 PARAMETER Experiment Name: Zm_Meristem_P Parameter: Organism Value: Zea mays
  misc_feature: MA Experiment 108536 PARAMETER Experiment Name: Zm_Meristem_P Parameter: Plant Line Value: 35A19
  misc_feature: MA Experiment 108536 PARAMETER Experiment Name: Zm_Meristem_P Parameter: Tissue Value: Shoot Meristem vs. Above Shoot Meristem
  misc_feature: MA Experiment ID: 108544 Result: Up-regulated in Transcription
  misc_feature: MA Experiment ID: 108545 Result: Up-regulated in Transcription
  misc_feature: MA Experiment 108545 PARAMETER Experiment Name: Zm_Imbibed_Seeds_P Parameter: Age (day) Value: 3 vs. 2
  misc_feature: MA Experiment 108545 PARAMETER Experiment Name: Zm_Imbibed_Seeds_P Parameter: Organism Value: Zea mays
  misc_feature: MA Experiment 108545 PARAMETER Experiment Name: Zm_Imbibed_Seeds_P Parameter: Plant Line Value: 35A19
  misc_feature: MA Experiment 108545 PARAMETER Experiment Name: Zm_Imbibed_Seeds_P Parameter: Tissue Value: Aerial vs. Embryo
  misc_feature: MA Experiment ID: 20000479 Result: Down-regulated in Transcription
  misc_feature: MA Experiment 20000479 PARAMETER Experiment Name: Zm_Drought_P Parameter: Age (day) Value: 10
  misc_feature: MA Experiment 20000479 PARAMETER Experiment Name: Zm_Drought_P Parameter: Organism Value: Zea mays
  misc_feature: MA Experiment 20000479 PARAMETER Experiment Name: Zm_Drought_P Parameter: Plant Line Value: 35A19
  misc_feature: MA Experiment 20000479 PARAMETER Experiment Name: Zm_Drought_P Parameter: Timepoint (hr) Value: 48
  misc_feature: MA Experiment 20000479 PARAMETER Experiment Name: Zm_Drought_P Parameter: Tissue Value: Aerial
  misc_feature: MA Experiment 20000479 PARAMETER Experiment Name: Zm_Drought_P Parameter: Treatment Value: Drought vs. No Drought
  misc_feature: MA Experiment ID: 20000480 Result: Down-regulated in Transcription
  misc_feature: MA Experiment 20000480 PARAMETER Experiment Name: Zm_Drought_P Parameter: Age (day) Value: 11
  misc_feature: MA Experiment 20000480 PARAMETER Experiment Name: Zm_Drought_P Parameter: Organism Value: Zea mays
  misc_feature: MA Experiment 20000480 PARAMETER Experiment Name: Zm_Drought_P Parameter: Plant Line Value: 35A19
  misc_feature: MA Experiment 20000480 PARAMETER Experiment Name: Zm_Drought_P Parameter: Timepoint (hr) Value: 72
  misc_feature: MA Experiment 20000480 PARAMETER Experiment Name: Zm_Drought_P Parameter: Tissue Value: Aerial
  misc_feature: MA Experiment 20000480 PARAMETER Experiment Name: Zm_Drought_P Parameter: Treatment Value: Drought vs. No Drought
  misc_feature: MA Experiment ID: 20000632 Result: Down-regulated in Transcription
  misc_feature: MA Experiment 20000632 PARAMETER Experiment Name: Zm_Herbicide-Treatments_P Parameter: Timepoint (hr) Value: 4
  misc_feature: MA Experiment 20000632 PARAMETER Experiment Name: Zm_Herbicide-Treatments_P Parameter: Tissue Value: Aerial
  misc_feature: MA Experiment 20000632 PARAMETER Experiment Name: Zm_Herbicide-Treatments_P Parameter: Treatment Value: Glean vs. No Treatment
cttgattggctcgtgaaatccatgggcgggcgcaagatgcgggcgtccatgacgacactgctgatccgcctcgtgctcaccgtcgccctcctgggcgacgaggcggcgcggcggtgcgcggcgttcaacccacgcgtgctgttcacggtgaagcccgacccgatcgtgctgcgggaccaccgcggcgcgctgctcacggggaaccacaccgtcaacctgctcttctacgggcgcttcaccgcagcgcaacgcgcgatcgtcgtcgacttcgtccgttccctctcggacgcgagcgcgcctcgcccggagccgccgggggcaccgccgtccgtggcggcgtggtggtgcaccatccggctctaccgcggcggcggcgcgcggctgcggctcggcaggcagatcatcgacgagcgcatgtcgctgggccggggccctctctctccgggcaacgtcacggcgctggcgcgggccgcggggcaccaccggggcgccatcaccgcagtgctcacggccgccgacgtccccgtggcgtccttctgcgtgtcgcgctgcggcgcccacggccacgaccgcggcggcacgcacggcagggcgcggtacacctacctgtgggcggggaatccggcgcagcagtgccccggccaatgcgcgtggccgttccacctgccgacgtacggtccccagaccccgccgctggtgccacccaacggcgacgtcggcgtcgacggcatggtcatcagcctcgccgccctcctcgccggcacggtcaccaacccgtacggggacgggtactaccagggcgacgctggcaccggcgccgggctggaggctgccacggtgtgcgccgggatcttcgggaccgggtcctaccccggctaccccgggaagctgctcacagacccggccaccggcgcgagctacaacgtcgtcgggctaggcgggaggaagtacctgctcccggcattgtgggatccggcgacctcccagtgcaagacacttgtccagacgtgacaggggtgaggggtgacgcccgcggaccgtggtgcggggagaatgtccaatgcaagggcctgcctgctgcagaagggaggaaaaataaatgcctcatttactatttccattccttattgcatgtacttgttgtctgtcctaccagcagagattgtatgatgtatttggtggatgtctatgttaatggaatttgaacgacatgcttaaatatatggtcttgaaactaaatcacatgtgtctagaatatgatttatctag

SEQ ID NO: 7645 - protein, 336 aa, Zea mays subsp. mays
  peptide (1)..(336): Ceres Seq. ID no. 12408670
  misc_feature (57)..(334): Pfam Name: Phosphate-induced protein 1 conserved region Pfam Description: Phosphate-induced protein 1 conserved region
  misc_feature (42)..(334): Homolog of NCBI NO: 31074969 NR Description: erg-1 [Solanum tuberosum]
  misc_feature (40)..(334): Homolog of NCBI NO: 15237656 NR Description: phi-1-like protein; protein id: At5g64260.1, by cDNA: 37357., supported by cDNA: gi_11908087, supported by gi_12642895, supported by cDNA: gi_14190476, supported by cDNA:
  misc_feature (17)..(334): Homolog of NCBI NO: 21593043 NR Description: putative phi-1-like phosphate-induced protein
  misc_feature (17)..(334): Homolog of NCBI NO: 15236667 NR Description: putative phi-1-like phosphate-induced protein; id: At4g08950.1, supported by cDNA: 3552., supported by cDNA: supported by cDNA: gi_20259893, supported by cDNA: gi_20271141
  misc_feature (60)..(333): Homolog of NCBI NO: 15219504 NR Description: phosphate-induced (phi-1) protein, putative; id: At1g35140.1, supported by cDNA: 118937., supported by cDNA:
  misc_feature (39)..(334): Homolog of NCBI NO: 3759184 NR Description: phi-1 [Nicotiana tabacum]
  misc_feature (65)..(334): Homolog of NCBI NO: 15242420 NR Description: putative protein; protein id: At5g09440.1, by cDNA: 38576., supported by cDNA: gi_17473690, supported by
  misc_feature (149)..(333): Homolog of NCBI NO: 13194680 NR Description: phosphate-induced protein 1-like protein
  misc_feature (99)..(336): Homolog of NCBI NO: 37533672 NR Description: putative phosphate-induced protein [Oryza sativa
  misc_feature (60)..(263): Homolog of NCBI NO: 11762144 NR Description: At1g35140 [Arabidopsis thaliana]
LDWLVKSMGGRKMRASMTTLLIRLVLTVALLGDEAARRCAAFNPRVLFTVKPDPIVLRDHRGALLTGNHTVNLLFYGRFTAAQRAIVVDFVRSLSDASAPRPEPPGAPPSVAAWWCTIRLYRGGGARLRLGRQIIDERMSLGRGPLSPGNVTALARAAGHHRGAITAVLTAADVPVASFCVSRCGAHGHDRGGTHGRARYTYLWAGNPAQQCPGQCAWPFHLPTYGPQTPPLVPPNGDVGVDGMVISLAALLAGTVTNPYGDGYYQGDAGTGAGLEAATVCAGIFGTGSYPGYPGKLLTDPATGASYNVVGLGGRKYLLPALWDPATSQCKTLVQT

SEQ ID NO: 7646 - protein, 329 aa, Zea mays subsp. mays
  peptide (1)..(329): Ceres Seq. ID no. 12408671
  misc_feature (50)..(327): Pfam Name: Phosphate-induced protein 1 conserved region Pfam Description: Phosphate-induced protein 1 conserved region
  misc_feature (53)..(256): Homolog of NCBI NO: 11762144 NR Description: At1g35140 [Arabidopsis thaliana]
  misc_feature (35)..(327): Homolog of NCBI NO: 31074969 NR Description: erg-1 [Solanum tuberosum]
  misc_feature (33)..(327): Homolog of NCBI NO: 15237656 NR Description: phi-1-like protein; protein id: At5g64260.1, by cDNA: 37357., supported by cDNA: gi_11908087, supported by gi_12642895, supported by cDNA: gi_14190476, supported by cDNA:
  misc_feature (10)..(327): Homolog of NCBI NO: 21593043 NR Description: putative phi-1-like phosphate-induced protein
  misc_feature (10)..(327): Homolog of NCBI NO: 15236667 NR Description: putative phi-1-like phosphate-induced protein; id: At4g08950.1, supported by cDNA: 3552., supported by cDNA: supported by cDNA: gi_20259893, supported by cDNA: gi_20271141
  misc_feature (53)..(326): Homolog of NCBI NO: 15219504 NR Description: phosphate-induced (phi-1) protein, putative; id: At1g35140.1, supported by cDNA: 118937., supported by cDNA:
  misc_feature (32)..(327): Homolog of NCBI NO: 3759184 NR Description: phi-1 [Nicotiana tabacum]
  misc_feature (58)..(327): Homolog of NCBI NO: 15242420 NR Description: putative protein; protein id: At5g09440.1, by cDNA: 38576., supported by cDNA: gi_17473690, supported by
  misc_feature (142)..(326): Homolog of NCBI NO: 13194680 NR Description: phosphate-induced protein 1-like protein
  misc_feature (92)..(329): Homolog of NCBI NO: 37533672 NR Description: putative phosphate-induced protein [Oryza sativa
MGGRKMRASMTTLLIRLVLTVALLGDEAARRCAAFNPRVLFTVKPDPIVLRDHRGALLTGNHTVNLLFYGRFTAAQRAIVVDFVRSLSDASAPRPEPPGAPPSVAAWWCTIRLYRGGGARLRLGRQIIDERMSLGRGPLSPGNVTALARAAGHHRGAITAVLTAADVPVASFCVSRCGAHGHDRGGTHGRARYTYLWAGNPAQQCPGQCAWPFHLPTYGPQTPPLVPPNGDVGVDGMVISLAALLAGTVTNPYGDGYYQGDAGTGAGLEAATVCAGIFGTGSYPGYPGKLLTDPATGASYNVVGLGGRKYLLPALWDPATSQCKTLVQT

SEQ ID NO: 7647 - protein, 324 aa, Zea mays subsp. mays
  peptide (1)..(324): Ceres Seq. ID no. 12408672
  misc_feature (45)..(322): Pfam Name: Phosphate-induced protein 1 conserved region Pfam Description: Phosphate-induced protein 1 conserved region
  misc_feature (30)..(322): Homolog of NCBI NO: 31074969 NR Description: erg-1 [Solanum tuberosum]
  misc_feature (28)..(322): Homolog of NCBI NO: 15237656 NR Description: phi-1-like protein; protein id: At5g64260.1, by cDNA: 37357., supported by cDNA: gi_11908087, supported by gi_12642895, supported by cDNA: gi_14190476, supported by cDNA:
  misc_feature (5)..(322): Homolog of NCBI NO: 21593043 NR Description: putative phi-1-like phosphate-induced protein
  misc_feature (5)..(322): Homolog of NCBI NO: 15236667 NR Description: putative phi-1-like phosphate-induced protein; id: At4g08950.1, supported by cDNA: 3552., supported by cDNA: supported by cDNA: gi_20259893, supported by cDNA: gi_20271141
  misc_feature (48)..(321): Homolog of NCBI NO: 15219504 NR Description: phosphate-induced (phi-1) protein, putative; id: At1g35140.1, supported by cDNA: 118937., supported by cDNA:
  misc_feature (27)..(322): Homolog of NCBI NO: 3759184 NR Description: phi-1 [Nicotiana tabacum]
  misc_feature (53)..(322): Homolog of NCBI NO: 15242420 NR Description: putative protein; protein id: At5g09440.1, by cDNA: 38576., supported by cDNA: gi_17473690, supported by
  misc_feature (137)..(321): Homolog of NCBI NO: 13194680 NR Description: phosphate-induced protein 1-like protein
  misc_feature (87)..(324): Homolog of NCBI NO: 37533672 NR Description: putative phosphate-induced protein [Oryza sativa
  misc_feature (48)..(251): Homolog of NCBI NO: 11762144 NR Description: At1g35140 [Arabidopsis thaliana]
MRASMTTLLIRLVLTVALLGDEAARRCAAFNPRVLFTVKPDPIVLRDHRGALLTGNHTVNLLFYGRFTAAQRAIVVDFVRSLSDASAPRPEPPGAPPSVAAWWCTIRLYRGGGARLRLGRQIIDERMSLGRGPLSPGNVTALARAAGHHRGAITAVLTAADVPVASFCVSRCGAHGHDRGGTHGRARYTYLWAGNPAQQCPGQCAWPFHLPTYGPQTPPLVPPNGDVGVDGMVISLAALLAGTVTNPYGDGYYQGDAGTGAGLEAATVCAGIFGTGSYPGYPGKLLTDPATGASYNVVGLGGRKYLLPALWDPATSQCKTLVQT

SEQ ID NO: 7648 - DNA, 1787 bp, Zea mays subsp. mays
  misc_feature (1)..(1787): Ceres Seq. ID no. 12406298
  misc_feature: MA Experiment ID: 20000534 Result: Down-regulated in Transcription
  misc_feature: MA Experiment 20000534 PARAMETER Experiment Name: Zm_Hybrid_Pollen_P Parameter: Age (day) Value: 8
  misc_feature: MA Experiment 20000534 PARAMETER Experiment Name: Zm_Hybrid_Pollen_P Parameter: Organism Value: Zea mays
  misc_feature: MA Experiment 20000534 PARAMETER Experiment Name: Zm_Hybrid_Pollen_P Parameter: Plant Line Value: 35A19
  misc_feature: MA Experiment 20000534 PARAMETER Experiment Name: Zm_Hybrid_Pollen_P Parameter: Tissue Value: Pollen vs. Aerial
  misc_feature: MA Experiment ID: 20000535 Result: Up-regulated in Transcription
  misc_feature: MA Experiment 20000535 PARAMETER Experiment Name: Zm_Hybrid_Seed_Dev_P Parameter: DAP Value: 30 vs. 12
  misc_feature: MA Experiment 20000535 PARAMETER Experiment Name: Zm_Hybrid_Seed_Dev_P Parameter: Organism Value: Zea mays
  misc_feature: MA Experiment 20000535 PARAMETER Experiment Name: Zm_Hybrid_Seed_Dev_P Parameter: Plant Line Value: 35A19
  misc_feature: MA Experiment 20000535 PARAMETER Experiment Name: Zm_Hybrid_Seed_Dev_P Parameter: Tissue Value: Embryo vs. Unfert Floret
aaaggattcccaaccccaaccccaaccccccaagaagcaccgcgcagaaccctctgctcctctcaccctcacgctccaaggcggcggcgccatgcacggcggaggcgcggcctcgcccgatgccgccatatgcatctccccagaagctgggcccatcgtcggggtcgcccccgccgggatcagggtcgaaaactgctacgtgttcaagagccggctgcaggagtatgctcagagggttggcattccaaccccggagtaccacacgctgaaagaaggcccgtctcatgaacctgtcttcaagtccacagtgttcgttaataataccaagtatgaatcgctgcctgggttcttcagccggaaggctgcagaacagtctgccgcggaagttgcgctcatggagatagccatgtccgctccggtgaccgaaattaggaacatgccagcagttcaagaaactggactgtgcaagaatctccttcaggagtatgctcagaagatgaattatgccattccatcttatatttgcactaaacaagcttcgggtgtagctcctttcgtatgcagtgttgagattggtggcatcctatacattggtgctgcagctaggacaaagaaggaggcagagataaaagctgcccgaactgctcttcttgcaatccaaagtcaatcagaaggtggtgcaaatggtgccaaaaagtacattgttgttcctgggcaaaggccagataaggaggcgaataaaaatccaactgaaacccccataccacttagagtcaagaagcgtggttccaggaagaaatggaacaagaggaaattcaggaggatggctgaccgaattgttgatgctggaaaggatgcagaggggcttggaacgcttgtacatgatgactatgaggaagctagaagaataggatatgagttacctacagatactgctatggttcaatttaacaaggaagttgtaatgacacaacctggtgaaggagataggatagtacaattggagccacccagagatcctgcagagtttcaatataacaaggaagctagaagtgttgaacaggacccacccagagatcctgcagaggtccaacataacaaggaagctagaagtgttgaacaggacccacccagagatcctgcagaggtccaacataacaaggaagctagaactgtcgaacaggacccacccagcaacactgaagtgtggaagcctgacaataaggctacaactacagagcaggagtcggtgagcgcttacatagcattgagatctaatggggattctacagatgtggaggcggcaccaggcgataccttgatgatgcagggcgaggagtcggaagccacaatgcaagaagcatctcacgctggtgaacaggcccagcctaactaggaacctgaaagcaaaaaaaacttcctgaacaggaagaccgaaatgtaggtcgaatgcatgcattgctgtaggagaataagtccgctggaggtacatgagcctaaaataatttgtggagtggtggttgactccagttgtaagtgccttccagagtgtaccggcatgcccaaaactgaaatttccggtttagatagaattgggggcgcggaagagggtgccatgtgtgtgtgtgtgtgttgcctgtggatggaggaattgatgggagtatgtgaactgatgtagctagtctatgtttgttaccattgatgatatgattgtgtttggtcatgttttcactgtcatatttgttgacgaccagcacttgcatgagcattggattcgaggtagcctg

SEQ ID NO: 7649 - protein, 464 aa, Zea mays subsp. mays
  peptide (1)..(464): Ceres Seq. ID no. 12406299
  misc_feature (68)..(134): Pfam Name: Double-stranded RNA binding motif Pfam Description: Double-stranded RNA binding motif
  misc_feature (51)..(463): Homolog of NCBI NO: 9229939 NR Description: dsRNA-binding protein ODB1 [Oryza sativa
  misc_feature (62)..(322): Homolog of NCBI NO: 27262831 NR Description: dsRNA-binding protein [Brassica oleracea var.
  misc_feature (62)..(322): Homolog of NCBI NO: 27262837 NR Description: dsRNA-binding protein [Brassica oleracea var.
  misc_feature (62)..(322): Homolog of NCBI NO: 27262835 NR Description: dsRNA-binding protein [Brassica oleracea var.
  misc_feature (62)..(282): Homolog of NCBI NO: 27262829 NR Description: dsRNA-binding protein [Brassica rapa subsp. rapa]
  misc_feature (62)..(277): Homolog of NCBI NO: 8346542 NR Description: BcpLH protein [Brassica rapa]
  misc_feature (62)..(322): Homolog of NCBI NO: 27262833 NR Description: dsRNA-binding protein [Brassica oleracea var.
  misc_feature (62)..(322): Homolog of NCBI NO: 9967526 NR Description: RBP2 protein [Brassica oleracea var. capitata]
  misc_feature (62)..(271): Homolog of NCBI NO: 18391056 NR Description: expressed protein; protein id: At1g09700.1, by cDNA: gi_12247456, supported by cDNA: gi_15451101, supported cDNA: gi_20148392 [Arabidopsis thaliana] >gi|25402565|pir||H86230
  misc_feature (67)..(215): Homolog of NCBI NO: 37535422 NR Description: putative extensin [Oryza sativa (japonica
KDSQPQPQPPKKHRAEPSAPLTLTLQGGGAMHGGGAASPDAAICISPEAGPIVGVAPAGIRVENCYVFKSRLQEYAQRVGIPTPEYHTLKEGPSHEPVFKSTVFVNNTKYESLPGFFSRKAAEQSAAEVALMEIAMSAPVTEIRNMPAVQETGLCKNLLQEYAQKMNYAIPSYICTKQASGVAPFVCSVEIGGILYIGAAARTKKEAEIKAARTALLAIQSQSEGGANGAKKYIVVPGQRPDKEANKNPTETPIPLRVKKRGSRKKWNKRKFRRMADRIVDAGKDAEGLGTLVHDDYEEARRIGYELPTDTAMVQFNKEVVMTQPGEGDRIVQLEPPRDPAEFQYNKEARSVEQDPPRDPAEVQHNKEARSVEQDPPRDPAEVQHNKEARTVEQDPPSNTEVWKPDNKATTTEQESVSAYIALRSNGDSTDVEAAPGDTLMMQGEESEATMQEASHAGEQAQPN

SEQ ID NO: 7650 - protein, 434 aa, Zea mays subsp. mays
  peptide (1)..(434): Ceres Seq. ID no. 12406300
  misc_feature (38)..(104): Pfam Name: Double-stranded RNA binding motif Pfam Description: Double-stranded RNA binding motif
  misc_feature (21)..(433): Homolog of NCBI NO: 9229939 NR Description: dsRNA-binding protein ODB1 [Oryza sativa
  misc_feature (32)..(292): Homolog of NCBI NO: 27262831 NR Description: dsRNA-binding protein [Brassica oleracea var.
  misc_feature (32)..(292): Homolog of NCBI NO: 27262837 NR Description: dsRNA-binding protein [Brassica oleracea var.
  misc_feature (32)..(292): Homolog of NCBI NO: 27262835 NR Description: dsRNA-binding protein [Brassica oleracea var.
  misc_feature (32)..(252): Homolog of NCBI NO: 27262829 NR Description: dsRNA-binding protein [Brassica rapa subsp. rapa]
  misc_feature (32)..(247): Homolog of NCBI NO: 8346542 NR Description: BcpLH protein [Brassica rapa]
  misc_feature (32)..(292): Homolog of NCBI NO: 27262833 NR Description: dsRNA-binding protein [Brassica oleracea var.
  misc_feature (32)..(292): Homolog of NCBI NO: 9967526 NR Description: RBP2 protein [Brassica oleracea var. capitata]
  misc_feature (32)..(241): Homolog of NCBI NO: 18391056 NR Description: expressed protein; protein id: At1g09700.1, by cDNA: gi_12247456, supported by cDNA: gi_15451101, supported cDNA: gi_20148392 [Arabidopsis thaliana] >gi|25402565|pir||H86230
  misc_feature (37)..(185): Homolog of NCBI NO: 37535422 NR Description: putative extensin [Oryza sativa (japonica
MHGGGAASPDAAICISPEAGPIVGVAPAGIRVENCYVFKSRLQEYAQRVGIPTPEYHTLKEGPSHEPVFKSTVFVNNTKYESLPGFFSRKAAEQSAAEVALMEIAMSAPVTEIRNMPAVQETGLCKNLLQEYAQKMNYAIPSYICTKQASGVAPFVCSVEIGGILYIGAAARTKKEAEIKAARTALLAIQSQSEGGANGAKKYIVVPGQRPDKEANKNPTETPIPLRVKKRGSRKKWNKRKFRRMADRIVDAGKDAEGLGTLVHDDYEEARRIGYELPTDTAMVQFNKEVVMTQPGEGDRIVQLEPPRDPAEFQYNKEARSVEQDPPRDPAEVQHNKEARSVEQDPPRDPAEVQHNKEARTVEQDPPSNTEVWKPDNKATTTEQESVSAYIALRSNGDSTDVEAAPGDTLMMQGEESEATMQEASHAGEQAQPN

SEQ ID NO: 7651 - protein, 333 aa, Zea mays subsp. mays
  peptide (1)..(333): Ceres Seq. ID no. 12406301
  misc_feature (1)..(332): Homolog of NCBI NO: 9229939 NR Description: dsRNA-binding protein ODB1 [Oryza sativa
  misc_feature (1)..(191): Homolog of NCBI NO: 27262831 NR Description: dsRNA-binding protein [Brassica oleracea var.
  misc_feature (1)..(191): Homolog of NCBI NO: 27262835 NR Description: dsRNA-binding protein [Brassica oleracea var.
  misc_feature (1)..(191): Homolog of NCBI NO: 27262837 NR Description: dsRNA-binding protein [Brassica oleracea var.
  misc_feature (1)..(151): Homolog of NCBI NO: 27262829 NR Description: dsRNA-binding protein [Brassica rapa subsp. rapa]
  misc_feature (1)..(146): Homolog of NCBI NO: 8346542 NR Description: BcpLH protein [Brassica rapa]
  misc_feature (1)..(191): Homolog of NCBI NO: 27262833 NR Description: dsRNA-binding protein [Brassica oleracea var.
  misc_feature (1)..(191): Homolog of NCBI NO: 9967526 NR Description: RBP2 protein [Brassica oleracea var. capitata]
  misc_feature (1)..(140): Homolog of NCBI NO: 18391056 NR Description: expressed protein; protein id: At1g09700.1, by cDNA: gi_12247456, supported by cDNA: gi_15451101, supported cDNA: gi_20148392 [Arabidopsis thaliana] >gi|25402565|pir||H86230
  misc_feature (1)..(84): Homolog of NCBI NO: 37535422 NR Description: putative extensin [Oryza sativa (japonica
MEIAMSAPVTEIRNMPAVQETGLCKNLLQEYAQKMNYAIPSYICTKQASGVAPFVCSVEIGGILYIGAAARTKKEAEIKAARTALLAIQSQSEGGANGAKKYIVVPGQRPDKEANKNPTETPIPLRVKKRGSRKKWNKRKFRRMADRIVDAGKDAEGLGTLVHDDYEEARRIGYELPTDTAMVQFNKEVVMTQPGEGDRIVQLEPPRDPAEFQYNKEARSVEQDPPRDPAEVQHNKEARSVEQDPPRDPAEVQHNKEARTVEQDPPSNTEVWKPDNKATTTEQESVSAYIALRSNGDSTDVEAAPGDTLMMQGEESEATMQEASHAGEQAQPN

SEQ ID NO: 7652 - DNA, 2066 bp, Zea mays subsp. mays
  misc_feature (1)..(2066): Ceres Seq. ID no. 12344306
  misc_feature: MA Experiment ID: 20000477 Result: Down-regulated in Transcription
  misc_feature: MA Experiment 20000477 PARAMETER Experiment Name: Zm_5mM_SA_P Parameter: Age (day) Value: 10
  misc_feature: MA Experiment 20000477 PARAMETER Experiment Name: Zm_5mM_SA_P Parameter: Organism Value: Zea mays
  misc_feature: MA Experiment 20000477 PARAMETER Experiment Name: Zm_5mM_SA_P Parameter: Plant Line Value: 35A19
  misc_feature: MA Experiment 20000477 PARAMETER Experiment Name: Zm_5mM_SA_P Parameter: Timepoint (hr) Value: 48
  misc_feature: MA Experiment 20000477 PARAMETER Experiment Name: Zm_5mM_SA_P Parameter: Tissue Value: Aerial
  misc_feature: MA Experiment 20000477 PARAMETER Experiment Name: Zm_5mM_SA_P Parameter: Treatment Value: 5mM SA vs. No Treatment
  misc_feature: MA Experiment ID: 20000480 Result: Down-regulated in Transcription
  misc_feature: MA Experiment 20000480 PARAMETER Experiment Name: Zm_Drought_P Parameter: Age (day) Value: 11
  misc_feature: MA Experiment 20000480 PARAMETER Experiment Name: Zm_Drought_P Parameter: Organism Value: Zea mays
  misc_feature: MA Experiment 20000480 PARAMETER Experiment Name: Zm_Drought_P Parameter: Plant Line Value: 35A19
  misc_feature: MA Experiment 20000480 PARAMETER Experiment Name: Zm_Drought_P Parameter: Timepoint (hr) Value: 72
  misc_feature: MA Experiment 20000480 PARAMETER Experiment Name: Zm_Drought_P Parameter: Tissue Value: Aerial
  misc_feature: MA Experiment 20000480 PARAMETER Experiment Name: Zm_Drought_P Parameter: Treatment Value: Drought vs. No Drought
ctccatggccgttaagcccacatccatcatcgccgcctccgccacagcacgccatggagaccagcaagtcgccaccgctctactcggcgccgcgggagccctctgccacgacagtgatgctgtgtccgtgcctggcgttcttcctcctcgctctcatcatcacctccatcgcactcactgtccactttcgcctctactgccacactcctcttgcccacctcatctccccgcaccgctgcccccaccacatctgacctccgtctccgcccgcatcgctggcgtggtcctgcttcccagaggcgtgttccctctgctgccgccgagatcccgatacgttatgggttcccctctcctcgcgacgccggcatgcggggcttacgacgtgctctggggcttcgcagccggaaggttcctctccatcttggctgcctccgacgaagatcagggctcgtcggagcaggaggcggctgcgagcaacccggagggcgtggaccgcgtctgcgcggccatcgcggacgtcgtcgcctccggtgccgacgcgaacctggaggcggcgctatccgcgctctcgccaccgctctgcgaagcggtcgtgctcgctgtgctccaccgcttcaagcacgcacataggccgtcctaccgcttcttcaggtgggccacagtgtccggtggctttacccacaccaccattacctactgcaagatgttacacatcttaggcaagacgaggcagttcgagtcgatggttgcgatgatccaagagatggggaaggcgggggccctgtccatggacgccttcaaggttgccattaagtccttcgctgcggctggtgagatcaagaatgcggttggcgtgttcgagttgatgagaaagaacggtttcgatgatggggtggaatcattcaattgcttgctcgttgctttagccaaagagggattaggtagggaggccaggcaggtgtttgacaaaatgcatggccagtactctccagacctgcgctcttatactgcactgatgctggcatggtgcaatgcgaggaatctggttgaggcggggcgggtttggaatgagatgctggagaagggaatggatccagatgttgttgtccacaacacaatgattgaggggttgctgcgtgggcagaggcgacccgaggccgtgaagatgtttgagctgatgaaggcaaaggggcctccaccaaatgtgtggacttacacaatgttaatccgtgaccattgtaagcaggggaagatggacatggcaatggagtgctttgaggagatgcaggaggctaaatgccaaccagatgttgctacctatacatgtttgctggttggatatgggaatgcaaaacaaatggacagagtgactgctgtgttggaggagatgacacagaagggatgcccccctgatgctcggacttacaatgcactgattaagttgctaacaaataggaatatgccagacgatgctgcaaggatatacaagaagatgatcaagaagggacttgagcccacaatccatacttacaacatgatgatgaagtcatatttcgttggtgatagcaactatgcaatgggttgtgcagtgtgggaggagatgcaccagaggggtatttgccctgatgtgaactcttacacagtgttcattaatcggcatatacgacatggcaggccagaggaggcatataaatatatcgaggagatgattaataaagggatgaaagctccacaaatagactataataagtttgctgcagatttctcaaaggctgggaaaccagatatattgtttgagttggctcagaaagtgaaatttgctgggaaattagatgtatctaatgtgttctatcagtgggcagatagaatgaagagtcgggtgaagagaaatgtaccttcagattggtaatagaatgttctaagattactatgctgccagcaggaatgtggcatgctgtgatggtgcttgaaatttgattactaaggagaactgctacctttttcagtttgccattgtacggtaatgtgccattgaagaattgcgtgcgttaatatccgttggtctg

SEQ ID NO: 7653 - protein, 635 aa, Zea mays subsp. mays
  peptide (1)..(635): Ceres Seq. ID no. 12344307
  misc_feature (508)..(542): Pfam Name: PPR repeat Pfam Description: PPR repeat
  misc_feature (144)..(634): Homolog of NCBI NO: 15228767 NR Description: putative protein; protein id: At3g62470.1
  misc_feature (144)..(634): Homolog of NCBI NO: 15228788 NR Description: putative protein; protein id: At3g62540.1
  misc_feature (144)..(634): Homolog of NCBI NO: 15241508 NR Description: putative protein; protein id: At5g14820.1
  misc_feature (327)..(634): Homolog of NCBI NO: 11357982 NR Description: hypothetical protein T12C14.240 - Arabidopsis (fragment) >gi|7340725|emb|CAB82968.1| putative protein
  misc_feature (175)..(604): Homolog of NCBI NO: 14488357 NR Description: unknown protein [Oryza sativa (japonica
  misc_feature (159)..(629): Homolog of NCBI NO: 15222719 NR Description: hypothetical protein; protein id: At1g26500.1
  misc_feature (182)..(604): Homolog of NCBI NO: 15229604 NR Description: putative protein; protein id: At3g49730.1
  misc_feature (150)..(604): Homolog of NCBI NO: 15223926 NR Description: hypothetical protein; protein id: At1g77360.1
  misc_feature (150)..(604): Homolog of NCBI NO: 15223927 NR Description: hypothetical protein; protein id: At1g71060.1
  misc_feature (182)..(574): Homolog of NCBI NO: 15239161 NR Description: putative protein; protein id: At5g65820.1
SMAVKPTSIIAASATARHGDQQVATALLGAAGALCHDSDAVSVPGVLPPRSHHHLHRTHCPLSPLLPHSSCPPHLPAPLPPPHLTSVSARIAGVVLLPRGVFPLLPPRSRYVMGSPLLATPACGAYDVLWGFAAGRFLSILAASDEDQGSSEQEAAASNPEGVDRVCAAIADVVASGADANLEAALSALSPPLCEAVVLAVLHRFKHAHRPSYRFFRWATVSGGFTHTTITYCKMLHILGKTRQFESMVAMIQEMGKAGALSMDAFKVAIKSFAAAGEIKNAVGVFELMRKNGFDDGVESFNCLLVALAKEGLGREARQVFDKMHGQYSPDLRSYTALMLAWCNARNLVEAGRVWNEMLEKGMDPDVVVHNTMIEGLLRGQRRPEAVKMFELMKAKGPPPNVWTYTMLIRDHCKQGKMDMAMECFEEMQEAKCQPDVATYTCLLVGYGNAKQMDRVTAVLEEMTQKGCPPDARTYNALIKLLTNRNMPDDAARIYKKMIKKGLEPTIHTYNMMMKSYFVGDSNYAMGCAVWEEMHQRGICPDVNSYTVFINRHIRHGRPEEAYKYIEEMINKGMKAPQIDYNKFAADFSKAGKPDILFELAQKVKFAGKLDVSNVFYQWADRMKSRVKRNVPSDW

SEQ ID NO: 7654 - protein, 634 aa, Zea mays subsp. mays
  peptide (1)..(634): Ceres Seq. ID no. 12344308
  misc_feature (507)..(541): Pfam Name: PPR repeat Pfam Description: PPR repeat
  misc_feature (143)..(633): Homolog of NCBI NO: 15228767 NR Description: putative protein; protein id: At3g62470.1
  misc_feature (143)..(633): Homolog of NCBI NO: 15228788 NR Description: putative protein; protein id: At3g62540.1
  misc_feature (143)..(633): Homolog of NCBI NO: 15241508 NR Description: putative protein; protein id: At5g14820.1
  misc_feature (326)..(633): Homolog of NCBI NO: 11357982 NR Description: hypothetical protein T12C14.240 - Arabidopsis (fragment) >gi|7340725|emb|CAB82968.1| putative protein
  misc_feature (174)..(603): Homolog of NCBI NO: 14488357 NR Description: unknown protein [Oryza sativa (japonica
  misc_feature (158)..(628): Homolog of NCBI NO: 15222719 NR Description: hypothetical protein; protein id: At1g26500.1
  misc_feature (181)..(603): Homolog of NCBI NO: 15229604 NR Description: putative protein; protein id: At3g49730.1
  misc_feature (149)..(603): Homolog of NCBI NO: 15223926 NR Description: hypothetical protein; protein id: At1g77360.1
  misc_feature (149)..(603): Homolog of NCBI NO: 15223927 NR Description: hypothetical protein; protein id: At1g71060.1
  misc_feature (181)..(573): Homolog of NCBI NO: 15239161 NR Description: putative protein; protein id: At5g65820.1
MAVKPTSIIAASATARHGDQQVATALLGAAGALCHDSDAVSVPGVLPPRSHHHLHRTHCPLSPLLPHSSCPPHLPAPLPPPHLTSVSARIAGVVLLPRGVFPLLPPRSRYVMGSPLLATPACGAYDVLWGFAAGRFLSILAASDEDQGSSEQEAAASNPEGVDRVCAAIADVVASGADANLEAALSALSPPLCEAVVLAVLHRFKHAHRPSYRFFRWATVSGGFTHTTITYCKMLHILGKTRQFESMVAMIQEMGKAGALSMDAFKVAIKSFAAAGEIKNAVGVFELMRKNGFDDGVESFNCLLVALAKEGLGREARQVFDKMHGQYSPDLRSYTALMLAWCNARNLVEAGRVWNEMLEKGMDPDVVVHNTMIEGLLRGQRRPEAVKMFELMKAKGPPPNVWTYTMLIRDHCKQGKMDMAMECFEEMQEAKCQPDVATYTCLLVGYGNAKQMDRVTAVLEEMTQKGCPPDARTYNALIKLLTNRNMPDDAARIYKKMIKKGLEPTIHTYNMMMKSYFVGDSNYAMGCAVWEEMHQRGICPDVNSYTVFINRHIRHGRPEEAYKYIEEMINKGMKAPQIDYNKFAADFSKAGKPDILFELAQKVKFAGKLDVSNVFYQWADRMKSRVKRNVPSDW

SEQ ID NO: 7655 - protein, 523 aa, Zea mays subsp. mays
  peptide (1)..(523): Ceres Seq. ID no. 12344309
  misc_feature (396)..(430): Pfam Name: PPR repeat Pfam Description: PPR repeat
  misc_feature (32)..(522): Homolog of NCBI NO: 15228767 NR Description: putative protein; protein id: At3g62470.1
  misc_feature (32)..(522): Homolog of NCBI NO: 15228788 NR Description: putative protein; protein id: At3g62540.1
  misc_feature (32)..(522): Homolog of NCBI NO: 15241508 NR Description: putative protein; protein id: At5g14820.1
  misc_feature (215)..(522): Homolog of NCBI NO: 11357982 NR Description: hypothetical protein T12C14.240 - Arabidopsis (fragment) >gi|7340725|emb|CAB82968.1| putative protein
  misc_feature (63)..(492): Homolog of NCBI NO: 14488357 NR Description: unknown protein [Oryza sativa (japonica
  misc_feature (47)..(517): Homolog of NCBI NO: 15222719 NR Description: hypothetical protein; protein id: At1g26500.1
  misc_feature (70)..(492): Homolog of NCBI NO: 15229604 NR Description: putative protein; protein id: At3g49730.1
  misc_feature (38)..(492): Homolog of NCBI NO: 15223926 NR Description: hypothetical protein; protein id: At1g77360.1
  misc_feature (38)..(492): Homolog of NCBI NO: 15223927 NR Description: hypothetical protein; protein id: At1g71060.1
  misc_feature (70)..(462): Homolog of NCBI NO: 15239161 NR Description: putative protein; protein id: At5g65820.1
MGSPLLATPACGAYDVLWGFAAGRFLSILAASDEDQGSSEQEAAASNPEGVDRVCAAIADVVASGADANLEAALSALSPPLCEAVVLAVLHRFKHAHRPSYRFFRWATVSGGFTHTTITYCKMLHILGKTRQFESMVAMIQEMGKAGALSMDAFKVAIKSFAAAGEIKNAVGVFELMRKNGFDDGVESFNCLLVALAKEGLGREARQVFDKMHGQYSPDLRSYTALMLAWCNARNLVEAGRVWNEMLEKGMDPDVVVHNTMIEGLLRGQRRPEAVKMFELMKAKGPPPNVWTYTMLIRDHCKQGKMDMAMECFEEMQEAKCQPDVATYTCLLVGYGNAKQMDRVTAVLEEMTQKGCPPDARTYNALIKLLTNRNMPDDAARIYKKMIKKGLEPTIHTYNMMMKSYFVGDSNYAMGCAVWEEMHQRGICPDVNSYTVFINRHIRHGRPEEAYKYIEEMINKGMKAPQIDYNKFAADFSKAGKPDILFELAQKVKFAGKLDVSNVFYQWADRMKSRVKRNVPSDW

SEQ ID NO: 7656 - DNA, 1554 bp, Zea mays subsp. mays
  misc_feature (1)..(1554): Ceres Seq. ID no. 12367443
  misc_feature: MA Experiment ID: 108527 Result: Up-regulated in Transcription
  misc_feature: MA Experiment 108527 PARAMETER Experiment Name: Zm_5mM_NO_P Parameter: Age (day) Value: 8
  misc_feature: MA Experiment 108527 PARAMETER Experiment Name: Zm_5mM_NO_P Parameter: Organism Value: Zea mays
  misc_feature: MA Experiment 108527 PARAMETER Experiment Name: Zm_5mM_NO_P Parameter: Plant Line Value: 35A19
  misc_feature: MA Experiment 108527 PARAMETER Experiment Name: Zm_5mM_NO_P Parameter: Timepoint (hr) Value: 6
  misc_feature: MA Experiment 108527 PARAMETER Experiment Name: Zm_5mM_NO_P Parameter: Tissue Value: Aerial
  misc_feature: MA Experiment 108527 PARAMETER Experiment Name: Zm_5mM_NO_P Parameter: Treatment Value: 5mM NO vs. No Treatment
  misc_feature: MA Experiment ID: 108559 Result: Up-regulated in Transcription
  misc_feature: MA Experiment 108559 PARAMETER Experiment Name: Zm_5mM_NO_P Parameter: Age (day) Value: 8
  misc_feature: MA Experiment 108559 PARAMETER Experiment Name: Zm_5mM_NO_P Parameter: Organism Value: Zea mays
  misc_feature: MA Experiment 108559 PARAMETER Experiment Name: Zm_5mM_NO_P Parameter: Plant Line Value: 35A19
  misc_feature: MA Experiment 108559 PARAMETER Experiment Name: Zm_5mM_NO_P Parameter: Timepoint (hr) Value: 12
  misc_feature: MA Experiment 108559 PARAMETER Experiment Name: Zm_5mM_NO_P Parameter: Tissue Value: Aerial
  misc_feature: MA Experiment 108559 PARAMETER Experiment Name: Zm_5mM_NO_P Parameter: Treatment Value: 5mM NO vs. No Treatment
  misc_feature: MA Experiment ID: 20000478 Result: Up-regulated in Transcription
  misc_feature: MA Experiment 20000478 PARAMETER Experiment Name: Zm_5mM_SA_P Parameter: Age (day) Value: 11
  misc_feature: MA Experiment 20000478 PARAMETER Experiment Name: Zm_5mM_SA_P Parameter: Organism Value: Zea mays
  misc_feature: MA Experiment 20000478 PARAMETER Experiment Name: Zm_5mM_SA_P Parameter: Plant Line Value: 35A19
  misc_feature: MA Experiment 20000478 PARAMETER Experiment Name: Zm_5mM_SA_P Parameter: Timepoint (hr) Value: 72
  misc_feature: MA Experiment 20000478 PARAMETER Experiment Name: Zm_5mM_SA_P Parameter: Tissue Value: Aerial
  misc_feature: MA Experiment 20000478 PARAMETER Experiment Name: Zm_5mM_SA_P Parameter: Treatment Value: 5mM SA vs. No Treatment
gtcgaacacatacctaattatcacctgtaagccagctgaaccacatctcgtcgtgcacatccggagcccgggaacacacacacacattgccatggccatgcccatgcccaagcccgtcctgagcctgctcgtgcacctacacgccgccgtcctgttccttcccgccccggccggcggcgcggtctacaacgttctgcgctacggcgcgcgccccgacggcgtgacggacgcggcggggcccttcctccgcgcgtgggcggacgcctgccgctcgcccctcccggccgccatgtacgtgccgccagggaggtacctggtgcggagcgccacgttcaccggcccgtgccacagccgcgccgtgacgttcgccgtcgccggcacggtcgtcgcccccgcggcctacggcgcgcgcggctcgtcggggaggtggatcacgttcgagaacatggacggcctcgtcgtcgccggcggcggcacgctggacggccgcggcagggcgctctggacctgcagacagcgcgggcagcgcgactgtccgacccccacgtccactctgacgatcgccaactccaaggacgtggtggtggcccgggctgcggtcggtggacagcgagctgttccacgtggtggtgctgcagtgccacggcgtgacggtgcgcggggtgacggtggaggcgccggcggacagccccaacaccgacggcatccacctacacatgtccacccacgtgtcggtgtacgacgccaggatcagcaccggcgacgactgcatctccatcggccccggccaactctcacctctggatcgagcgcgtcgcctgcggccccggccacggcatcagcatcgggagcctgggcaagcagcagggcacggaggtggaggcggtgcagaacgtgacggtgaagacgacgtggttcaccggcaccatgaacgggctgcggatcaagacgtggggcggctccaagcgcggcttcgtcacgggcgtcaccttcgccgactccaccatgtccggcgtggacaaccccatcattatcgaccagaactactgccccgccagcagcggctgccccggcgccggccggagctccagcatcaggatcagcgacgtgcggtacgtgggcatccggggctcgtccgccacgccggtggccgtcaacttcgactgcagccggagctacccctgcagtggcatcagcctgcaggacgtggcgctgacgtaccagaaccgggccgccgccaagtcctactgccggaacgtgcaggggaccgcgctcggcctcgtgctgccgccgagctgcctctgatcagacgatcgaccttgcaacttacattgccggccggacgcagcagttcagttagctgcatgcgttgtcacgtgtatatagatgcatatgtcgagtgtattatgtacggagtatgtggggagtgcttagactaggagaacattacgagcttcttctgacagtagatggttatatagtcgatatatgttggttcttttctttaacccttcacctttttcgcagcacgattattatatgagcgagtttttt

SEQ ID NO: 7657 - protein, 298 aa, Zea mays subsp. mays
  peptide (1)..(298): Ceres Seq. ID no. 12367444
  misc_feature (89)..(195): Pfam Name: Glycosyl hydrolases family 28 Pfam Description: Glycosyl hydrolases family 28
  misc_feature (35)..(195): Homolog of NCBI NO: 34907530 NR Description: putative endopolygalacturonase [Oryza sativa
  misc_feature (31)..(196): Homolog of NCBI NO: 24475519 NR Description: polygalacturonase [Pyrus communis]
  misc_feature (55)..(199): Homolog of NCBI NO: 3747093 NR Description: endopolygalacturonase [Prunus persica]
  misc_feature (55)..(199): Homolog of NCBI NO: 1346705 NR Description: POLYGALACTURONASE PRECURSOR (PG) (PECTINASE)
  misc_feature (42)..(196): Homolog of NCBI NO: 3834451 NR Description: polygalacturonase 7 [Lycopersicon esculentum]
  misc_feature (64)..(199): Homolog of NCBI NO: 30349275 NR Description: endopolygalacturonase [Prunus persica]
  misc_feature (33)..(195): Homolog of NCBI NO: 7435394 NR Description: probable polygalacturonase (EC 3.2.1.15) - tomato
  misc_feature (40)..(195): Homolog of NCBI NO: 7435389 NR Description: polygalacturonase (EC 3.2.1.15) precursor - >gi|3320458|gb|AAC26510.1| polygalacturonase precursor [Cucumis
  misc_feature (50)..(200): Homolog of NCBI NO: 1362096 NR Description: polygalacturonase precursor - tomato
  misc_feature (61)..(200): Homolog of NCBI NO: 2459811 NR Description: polygalacturonase 1 [Lycopersicon esculentum]
SNTYLIITCKPAEPHLVVHIRSPGTHTHIAMAMPMPKPVLSLLVHLHAAVLFLPAPAGGAVYNVLRYGARPDGVTDAAGPFLRAWADACRSPLPAAMYVPPGRYLVRSATFTGPCHSRAVTFAVAGTVVAPAAYGARGSSGRWITFENMDGLVVAGGGTLDGRGRALWTCRQRGQRDCPTPTSTLTIANSKDVVVARAAVGGQRAVPRGGAAVPRRDGARGDGGGAGGQPQHRRHPPTHVHPRVGVRRQDQHRRRLHLHRPRPTLTSGSSASPAAPATASASGAWASSRARRWRRCRT

SEQ ID NO: 7658 - protein, 268 aa, Zea mays subsp. mays
  peptide (1)..(268): Ceres Seq. ID no. 12367445
  misc_feature (59)..(165): Pfam Name: Glycosyl hydrolases family 28 Pfam Description: Glycosyl hydrolases family 28
  misc_feature (5)..(165): Homolog of NCBI NO: 34907530 NR Description: putative endopolygalacturonase [Oryza sativa
  misc_feature (1)..(166): Homolog of NCBI NO: 24475519 NR Description: polygalacturonase [Pyrus communis]
  misc_feature (25)..(169): Homolog of NCBI NO: 3747093 NR Description: endopolygalacturonase [Prunus persica]
  misc_feature (25)..(169): Homolog of NCBI NO: 1346705 NR Description: POLYGALACTURONASE PRECURSOR (PG) (PECTINASE)
  misc_feature (12)..(166): Homolog of NCBI NO: 3834451 NR Description: polygalacturonase 7 [Lycopersicon esculentum]
  misc_feature (34)..(169): Homolog of NCBI NO: 30349275 NR Description: endopolygalacturonase [Prunus persica]
  misc_feature (3)..(165): Homolog of NCBI NO: 7435394 NR Description: probable polygalacturonase (EC 3.2.1.15) - tomato
  misc_feature (10)..(165): Homolog of NCBI NO: 7435389 NR Description: polygalacturonase (EC 3.2.1.15) precursor - >gi|3320458|gb|AAC26510.1| polygalacturonase precursor [Cucumis
  misc_feature (20)..(170): Homolog of NCBI NO: 1362096 NR Description: polygalacturonase precursor - tomato
  misc_feature (31)..(170): Homolog of NCBI NO: 2459811 NR Description: polygalacturonase 1 [Lycopersicon esculentum]
MAMPMPKPVLSLLVHLHAAVLFLPAPAGGAVYNVLRYGARPDGVTDAAGPFLRAWADACRSPLPAAMYVPPGRYLVRSATFTGPCHSRAVTFAVAGTVVAPAAYGARGSSGRWITFENMDGLVVAGGGTLDGRGRALWTCRQRGQRDCPTPTSTLTIANSKDVVVARAAVGGQRAVPRGGAAVPRRDGARGDGGGAGGQPQHRRHPPTHVHPRVGVRRQDQHRRRLHLHRPRPTLTSGSSASPAAPATASASGAWASSRARRWRRCRT

SEQ ID NO: 7659 - protein, 266 aa, Zea mays subsp. mays
  peptide (1)..(266): Ceres Seq. ID no. 12367446
  misc_feature (57)..(163): Pfam Name: Glycosyl hydrolases family 28 Pfam Description: Glycosyl hydrolases family 28
  misc_feature (3)..(163): Homolog of NCBI NO: 34907530 NR Description: putative endopolygalacturonase [Oryza sativa
  misc_feature (1)..(164): Homolog of NCBI NO: 24475519 NR Description: polygalacturonase [Pyrus communis]
  misc_feature (23)..(167): Homolog of NCBI NO: 3747093 NR Description: endopolygalacturonase [Prunus persica]
  misc_feature (23)..(167): Homolog of NCBI NO: 1346705 NR Description: POLYGALACTURONASE PRECURSOR (PG) (PECTINASE)
  misc_feature (10)..(164): Homolog of NCBI NO: 3834451 NR Description: polygalacturonase 7 [Lycopersicon esculentum]
  misc_feature (32)..(167): Homolog of NCBI NO: 30349275 NR Description: endopolygalacturonase [Prunus persica]
  misc_feature (1)..(163): Homolog of NCBI NO: 7435394 NR Description: probable polygalacturonase (EC 3.2.1.15) - tomato
  misc_feature (8)..(163): Homolog of NCBI NO: 7435389 NR Description: polygalacturonase (EC 3.2.1.15) precursor - >gi|3320458|gb|AAC26510.1| polygalacturonase precursor [Cucumis
  misc_feature (18)..(168): Homolog of NCBI NO: 1362096 NR Description: polygalacturonase precursor - tomato
  misc_feature (29)..(168): Homolog of NCBI NO: 2459811 NR Description: polygalacturonase 1 [Lycopersicon esculentum]
MPMPKPVLSLLVHLHAAVLFLPAPAGGAVYNVLRYGARPDGVTDAAGPFLRAWADACRSPLPAAMYVPPGRYLVRSATFTGPCHSRAVTFAVAGTVVAPAAYGARGSSGRWITFENMDGLVVAGGGTLDGRGRALWTCRQRGQRDCPTPTSTLTIANSKDVVVARAAVGGQRAVPRGGAAVPRRDGARGDGGGAGGQPQHRRHPPTHVHPRVGVRRQDQHRRRLHLHRPRPTLTSGSSASPAAPATASASGAWASSRARRWRRCRT

SEQ ID NO: 7660 - DNA, 1229 bp, Zea mays subsp. mays
  misc_feature (1)..(1229): Ceres Seq. ID no. 12408661
  misc_feature: MA Experiment ID: 108535 Result: Up-regulated in Transcription
  misc_feature: MA Experiment 108535 PARAMETER Experiment Name: Zm_Meristem_P Parameter: Age (day) Value: 8
  misc_feature: MA Experiment 108535 PARAMETER Experiment Name: Zm_Meristem_P Parameter: Organism Value: Zea mays
  misc_feature: MA Experiment 108535 PARAMETER Experiment Name: Zm_Meristem_P Parameter: Plant Line Value: 35A19
  misc_feature: MA Experiment 108535 PARAMETER Experiment Name: Zm_Meristem_P Parameter: Tissue Value: Root Meristem vs. Above Root Meristem
  misc_feature: MA Experiment ID: 108543 Result: Up-regulated in Transcription
  misc_feature: MA Experiment ID: 108546 Result: Down-regulated in Transcription
  misc_feature: MA Experiment 108546 PARAMETER Experiment Name: Zm_Imbibed_Seeds_P Parameter: Age (day) Value: 3 vs. 2
  misc_feature: MA Experiment 108546 PARAMETER Experiment Name: Zm_Imbibed_Seeds_P Parameter: Organism Value: Zea mays
  misc_feature: MA Experiment 108546 PARAMETER Experiment Name: Zm_Imbibed_Seeds_P Parameter: Plant Line Value: 35A19
  misc_feature: MA Experiment 108546 PARAMETER Experiment Name: Zm_Imbibed_Seeds_P Parameter: Tissue Value: Roots vs. Embryo
  misc_feature: MA Experiment ID: 108687 Result: Down-regulated in Transcription
  misc_feature: MA Experiment 108687 PARAMETER Experiment Name: Zm_Embryos-Flowers__P Parameter: Tissue Value: Embryo vs. Aerial+
  misc_feature: MA Experiment ID: 20000477 Result: Down-regulated in Transcription
  misc_feature: MA Experiment 20000477 PARAMETER Experiment Name: Zm_5mM_SA_P Parameter: Age (day) Value: 10
  misc_feature: MA Experiment 20000477 PARAMETER Experiment Name: Zm_5mM_SA_P Parameter: Organism Value: Zea mays
  misc_feature: MA Experiment 20000477 PARAMETER Experiment Name: Zm_5mM_SA_P Parameter: Plant Line Value: 35A19
  misc_feature: MA Experiment 20000477 PARAMETER Experiment Name: Zm_5mM_SA_P Parameter: Timepoint (hr) Value: 48
  misc_feature: MA Experiment 20000477 PARAMETER Experiment Name: Zm_5mM_SA_P Parameter: Tissue Value: Aerial
  misc_feature: MA Experiment 20000477 PARAMETER Experiment Name: Zm_5mM_SA_P Parameter: Treatment Value: 5mM SA vs. No Treatment
  misc_feature: MA Experiment ID: 20000478 Result: Down-regulated in Transcription
  misc_feature: MA Experiment 20000478 PARAMETER Experiment Name: Zm_5mM_SA_P Parameter: Age (day) Value: 11
  misc_feature: MA Experiment 20000478 PARAMETER Experiment Name: Zm_5mM_SA_P Parameter: Organism Value: Zea mays
  misc_feature: MA Experiment 20000478 PARAMETER Experiment Name: Zm_5mM_SA_P Parameter: Plant Line Value: 35A19
  misc_feature: MA Experiment 20000478 PARAMETER Experiment Name: Zm_5mM_SA_P Parameter: Timepoint (hr) Value: 72
  misc_feature: MA Experiment 20000478 PARAMETER Experiment Name: Zm_5mM_SA_P Parameter: Tissue Value: Aerial
  misc_feature: MA Experiment 20000478 PARAMETER Experiment Name: Zm_5mM_SA_P Parameter: Treatment Value: 5mM SA vs. No Treatment
  misc_feature: MA Experiment ID: 20000479 Result: Down-regulated in Transcription
  misc_feature: MA Experiment 20000479 PARAMETER Experiment Name: Zm_Drought_P Parameter: Age (day) Value: 10
  misc_feature: MA Experiment 20000479 PARAMETER Experiment Name: Zm_Drought_P Parameter: Organism Value: Zea mays
  misc_feature: MA Experiment 20000479 PARAMETER Experiment Name: Zm_Drought_P Parameter: Plant Line Value: 35A19
  misc_feature: MA Experiment 20000479 PARAMETER Experiment Name: Zm_Drought_P Parameter: Timepoint (hr) Value: 48
  misc_feature: MA Experiment 20000479 PARAMETER Experiment Name: Zm_Drought_P Parameter: Tissue Value: Aerial
  misc_feature: MA Experiment 20000479 PARAMETER Experiment Name: Zm_Drought_P Parameter: Treatment Value: Drought vs. No Drought
  misc_feature: MA Experiment ID: 20000487 Result: Down-regulated in Transcription
  misc_feature: MA Experiment 20000487 PARAMETER Experiment Name: Zm_50mM_NH4NO3_L_to_H_P Parameter: Organism Value: Zea mays
  misc_feature: MA Experiment 20000487 PARAMETER Experiment Name: Zm_50mM_NH4NO3_L_to_H_P Parameter: Timepoint (hr) Value: 4
  misc_feature: MA Experiment 20000487 PARAMETER Experiment Name: Zm_50mM_NH4NO3_L_to_H_P Parameter: Tissue Value: Leaves
  misc_feature: MA Experiment 20000487 PARAMETER Experiment Name: Zm_50mM_NH4NO3_L_to_H_P Parameter: Treatment Value: 50mM NH4NO3 vs. 100mM Mannitol
  misc_feature: MA Experiment ID: 20000632 Result: Down-regulated in Transcription
  misc_feature: MA Experiment 20000632 PARAMETER Experiment Name: Zm_Herbicide-Treatments_P Parameter: Timepoint (hr) Value: 4
  misc_feature: MA Experiment 20000632 PARAMETER Experiment Name: Zm_Herbicide-Treatments_P Parameter: Tissue Value: Aerial
  misc_feature: MA Experiment 20000632 PARAMETER Experiment Name: Zm_Herbicide-Treatments_P Parameter: Treatment Value: Glean vs. No Treatment
ataataacgctgcacctcttttcatttcaccatctcctgcccccttaaaaaaagactcaccgtcgacacgccctcccgtcccgagagttctgaatcgaaaccgtcggccacgagagcagtgcgaggcgcccaccgcgatggctcgaaccaagcaccaggccgtgaggaagacggcggagaagcccaagaagaagctccagttcgagcgctcaggtggtgcgagtacctcggcgacgccggtgagcgcgtgcgtgcggggatcagttccctccttttgccttttttgtgggctgctcttacttgcttgcaagctgtttgatggaatgcaggaaagggctgctgggaccgggggaagagcggcgtctggaggtgactcagttaagaagacgaaaccacgccaccgctggcggccagggactgtagcgctgcgggagatcaggaagtaccagaagtccactgaaccgctcatcccctttgcgcctttcgtccgtgtggtgagggagttaaccaatttcgtaacaaacgggaaagtagagcgctataccgcagaagccctccttgcgctgcaagaggcagcagaattccacttgatagaactgtttgaaatggcgaatctgtgtgccatccatgccaagcgtgtcacaatcatgcaaaaggacatacaacttgcaaggcgtatcggaggaaggcgttgggcatgatatataatatccattctgattgcatcattcttgtgaatttgtttgtaggagctagacattagtgttgttgaatgctgcatggttcctaatccttttcgcagtctaacatctgtggagttagtatgttacatggcaacagctgaacatctgtggactataactatatggcaacagccgaagattgtgtctgtgggataactggttgttttggttgctcttcagtagtttgtttgcttcagtctgcagtatggactatggagtaaactgcatgctgaaacccgaaccactgctgaaacggcagttgccaggatagcaggagggcctttatgcacagtggaattgagtagagaactgagtaaaccatggttctttctccttttgaactggaacacacacagttggatcttgtttctcttcttatgccattgtcatcgtgtttataaggggtgtaaatggtacaaatattatctgcccgtattcacatttgatctatctaagaaggctgaaatccgatccgtattcgagtcg

SEQ ID NO: 7661 - protein, 232 aa, Zea mays subsp. mays
  peptide (1)..(232): Ceres Seq. ID no. 12408662
  misc_feature (110)..(230): Pfam Name: Core histone H2A/H2B/H3/H4 Pfam Description: Core histone H2A/H2B/H3/H4
  misc_feature (110)..(232): Homolog of NCBI NO: 21668094 NR Description: centromeric histone h3-like protein [Zea mays]
  misc_feature (46)..(86): Homolog of NCBI NO: 21668094 NR Description: centromeric histone h3-like protein [Zea mays]
  misc_feature (107)..(231): Homolog of NCBI NO: 40365140 NR Description: centromeric histone 3 [Oryza sativa (japonica
  misc_feature (46)..(82): Homolog of NCBI NO: 40365140 NR Description: centromeric histone 3 [Oryza sativa (japonica
  misc_feature (120)..(230): Homolog of NCBI NO: 17532993 NR Description: Histone H3 (15.3 kD) [Caenorhabditis elegans]
  misc_feature (120)..(230): Homolog of NCBI NO: 122090 NR Description: Histone H3 >gi|81287|pir||S00940 histone H3 -
  misc_feature (111)..(230): Homolog of NCBI NO: 4574208 NR Description: histone H3 [Tortula ruralis]
  misc_feature (120)..(230): Homolog of NCBI NO: 2119018 NR Description: histone H3 (clone CH-I) - Chlamydomonas
  misc_feature (120)..(230): Homolog of NCBI NO: 6686276 NR Description: HISTONE H3
  misc_feature (46)..(231): Homolog of NCBI NO: 33146136 NR Description: histone H3 like protein [Arabis gemmifera]
NNAAPLFISPSPAPLKKDSPSTRPPVPRVLNRNRRPREQCEAPTAMARTKHQAVRKTAEKPKKKLQFERSGGASTSATPVSACVRGSVPSFCLFCGLLLLACKLFDGMQERAAGTGGRAASGGDSVKKTKPRHRWRPGTVALREIRKYQKSTEPLIPFAPFVRVVRELTNFVTNGKVERYTAEALLALQEAAEFHLIELFEMANLCAIHAKRVTIMQKDIQLARRIGGRRWA

SEQ ID NO: 7662 - protein, 187 aa, Zea mays subsp. mays
  peptide (1)..(187): Ceres Seq. ID no. 12408663
  misc_feature (65)..(185): Pfam Name: Core histone H2A/H2B/H3/H4 Pfam Description: Core histone H2A/H2B/H3/H4
  misc_feature (65)..(187): Homolog of NCBI NO: 21668094 NR Description: centromeric histone h3-like protein [Zea mays]
  misc_feature (1)..(41): Homolog of NCBI NO: 21668094 NR Description: centromeric histone h3-like protein [Zea mays]
  misc_feature (62)..(186): Homolog of NCBI NO: 40365140 NR Description: centromeric histone 3 [Oryza sativa (japonica
  misc_feature (1)..(37): Homolog of NCBI NO: 40365140 NR Description: centromeric histone 3 [Oryza sativa (japonica
  misc_feature (75)..(185): Homolog of NCBI NO: 17532993 NR Description: Histone H3 (15.3 kD) [Caenorhabditis elegans]
  misc_feature (75)..(185): Homolog of NCBI NO: 122090 NR Description: Histone H3 >gi|81287|pir||S00940 histone H3 -
  misc_feature (66)..(185): Homolog of NCBI NO: 4574208 NR Description: histone H3 [Tortula ruralis]
  misc_feature (75)..(185): Homolog of NCBI NO: 2119018 NR Description: histone H3 (clone CH-I) - Chlamydomonas
  misc_feature (75)..(185): Homolog of NCBI NO: 6686276 NR Description: HISTONE H3
  misc_feature (1)..(186): Homolog of NCBI NO: 33146136 NR Description: histone H3 like protein [Arabis gemmifera]
MARTKHQAVRKTAEKPKKKLQFERSGGASTSATPVSACVRGSVPSFCLFCGLLLLACKLFDGMQERAAGTGGRAASGGDSVKKTKPRHRWRPGTVALREIRKYQKSTEPLIPFAPFVRVVRELTNFVTNGKVERYTAEALLALQEAAEFHLIELFEMANLCAIHAKRVTIMQKDIQLARRIGGRRWA

SEQ ID NO: 7663 - protein, 125 aa, Zea mays subsp. mays
  peptide (1)..(125): Ceres Seq. ID no. 12408664
  misc_feature (3)..(123): Pfam Name: Core histone H2A/H2B/H3/H4 Pfam Description: Core histone H2A/H2B/H3/H4
  misc_feature (3)..(125): Homolog of NCBI NO: 21668094 NR Description: centromeric histone h3-like protein [Zea mays]
  misc_feature (1)..(124): Homolog of NCBI NO: 40365140 NR Description: centromeric histone 3 [Oryza sativa (japonica
  misc_feature (13)..(123): Homolog of NCBI NO: 17532993 NR Description: Histone H3 (15.3 kD) [Caenorhabditis elegans]
  misc_feature (13)..(123): Homolog of NCBI NO: 122090 NR Description: Histone H3 >gi|81287|pir||S00940 histone H3 -
  misc_feature (4)..(123): Homolog of NCBI NO: 4574208 NR Description: histone H3 [Tortula ruralis]
  misc_feature (13)..(123): Homolog of NCBI NO: 2119018 NR Description: histone H3 (clone CH-I) - Chlamydomonas
  misc_feature (13)..(123): Homolog of NCBI NO: 6686276 NR Description: HISTONE H3
  misc_feature (1)..(124): Homolog of NCBI NO: 33146136 NR Description: histone H3 like protein [Arabis gemmifera]
  misc_feature (6)..(123): Homolog of NCBI NO: 38564127 NR Description: histone 3 [Drosophila pseudoobscura]
  misc_feature (23)..(123): Homolog of NCBI NO: 81850 NR Description: histone H3 (clone pH3c-1) - alfalfa (fragment)
MQERAAGTGGRAASGGDSVKKTKPRHRWRPGTVALREIRKYQKSTEPLIPFAPFVRVVRELTNFVTNGKVERYTAEALLALQEAAEFHLIELFEMANLCAIHAKRVTIMQKDIQLARRIGGRRWA

SEQ ID NO: 7664 - DNA, 1805 bp, Zea mays subsp. mays
  misc_feature (1)..(1805): Ceres Seq. ID no. 12408657
  misc_feature: MA Experiment ID: 108527 Result: Up-regulated in Transcription
  misc_feature: MA Experiment 108527 PARAMETER Experiment Name: Zm_5mM_NO_P Parameter: Age (day) Value: 8
  misc_feature: MA Experiment 108527 PARAMETER Experiment Name: Zm_5mM_NO_P Parameter: Organism Value: Zea mays
  misc_feature: MA Experiment 108527 PARAMETER Experiment Name: Zm_5mM_NO_P Parameter: Plant Line Value: 35A19
  misc_feature: MA Experiment 108527 PARAMETER Experiment Name: Zm_5mM_NO_P Parameter: Timepoint (hr) Value: 6
  misc_feature: MA Experiment 108527 PARAMETER Experiment Name: Zm_5mM_NO_P Parameter: Tissue Value: Aerial
  misc_feature: MA Experiment 108527 PARAMETER Experiment Name: Zm_5mM_NO_P Parameter: Treatment Value: 5mM NO vs. No Treatment
  misc_feature: MA Experiment ID: 108528 Result: Up-regulated in Transcription
  misc_feature: MA Experiment 108528 PARAMETER Experiment Name: Zm_Imbibed_Seeds_P Parameter: Age (day) Value: 5 vs. 2
  misc_feature: MA Experiment 108528 PARAMETER Experiment Name: Zm_Imbibed_Seeds_P Parameter: Organism Value: Zea mays
  misc_feature: MA Experiment 108528 PARAMETER Experiment Name: Zm_Imbibed_Seeds_P Parameter: Plant Line Value: 35A19
  misc_feature: MA Experiment 108528 PARAMETER Experiment Name: Zm_Imbibed_Seeds_P Parameter: Tissue Value: Aerial vs. Embryo
  misc_feature: MA Experiment ID: 108530 Result: Up-regulated in Transcription
  misc_feature: MA Experiment 108530 PARAMETER Experiment Name: Zm_Imbibed_Seeds_P Parameter: Age (day) Value: 6 vs. 2
  misc_feature: MA Experiment 108530 PARAMETER Experiment Name: Zm_Imbibed_Seeds_P Parameter: Organism Value: Zea mays
  misc_feature: MA Experiment 108530 PARAMETER Experiment Name: Zm_Imbibed_Seeds_P Parameter: Plant Line Value: 35A19
  misc_feature: MA Experiment 108530 PARAMETER Experiment Name: Zm_Imbibed_Seeds_P Parameter: Tissue Value: Aerial vs. Embryo
  misc_feature: MA Experiment ID: 108535 Result: Down-regulated in Transcription
  misc_feature: MA Experiment 108535 PARAMETER Experiment Name: Zm_Meristem_P Parameter: Age (day) Value: 8
  misc_feature: MA Experiment 108535 PARAMETER Experiment Name: Zm_Meristem_P Parameter: Organism Value: Zea mays
  misc_feature: MA Experiment 108535 PARAMETER Experiment Name: Zm_Meristem_P Parameter: Plant Line Value: 35A19
  misc_feature: MA Experiment 108535 PARAMETER Experiment Name: Zm_Meristem_P Parameter: Tissue Value: Root Meristem vs. Above Root Meristem
  misc_feature: MA Experiment ID: 108543 Result: Down-regulated in Transcription
  misc_feature: MA Experiment ID: 108547 Result: Up-regulated in Transcription
  misc_feature: MA Experiment 108547 PARAMETER Experiment Name: Zm_Imbibed_Seeds_P Parameter: Age (day) Value: 4 vs. 2
  misc_feature: MA Experiment 108547 PARAMETER Experiment Name: Zm_Imbibed_Seeds_P Parameter: Organism Value: Zea mays
  misc_feature: MA Experiment 108547 PARAMETER Experiment Name: Zm_Imbibed_Seeds_P Parameter: Plant Line Value: 35A19
  misc_feature: MA Experiment 108547 PARAMETER Experiment Name: Zm_Imbibed_Seeds_P Parameter: Tissue Value: Aerial vs. Embryo
  misc_feature: MA Experiment ID: 20000108 Result: Down-regulated in Transcription
  misc_feature: MA Experiment 20000108 PARAMETER Experiment Name: Zm_Root-Tips_P Parameter: Age (day) Value: 12
  misc_feature: MA Experiment 20000108 PARAMETER Experiment Name: Zm_Root-Tips_P Parameter: Organism Value: Zea mays
  misc_feature: MA Experiment 20000108 PARAMETER Experiment Name: Zm_Root-Tips_P Parameter: Tissue Value: Root tips vs. Root mid region    35
  misc_feature: MA Experiment 20000108 PARAMETER Experiment Name: Zm_Root-Tips_P Parameter: Tissue Value: Root tips vs. Root mid region   Sequence Listing-Misc Features (4)
  misc_feature: MA Experiment ID: 20000478 Result: Up-regulated in Transcription
  misc_feature: MA Experiment 20000478 PARAMETER Experiment Name: Zm_5mM_SA_P Parameter: Age (day) Value: 11
  misc_feature: MA Experiment 20000478 PARAMETER Experiment Name: Zm_5mM_SA_P Parameter: Organism Value: Zea mays
  misc_feature: MA Experiment 20000478 PARAMETER Experiment Name: Zm_5mM_SA_P Parameter: Plant Line Value: 35A19
  misc_feature: MA Experiment 20000478 PARAMETER Experiment Name: Zm_5mM_SA_P Parameter: Timepoint (hr) Value: 72
  misc_feature: MA Experiment 20000478 PARAMETER Experiment Name: Zm_5mM_SA_P Parameter: Tissue Value: Aerial
  misc_feature: MA Experiment 20000478 PARAMETER Experiment Name: Zm_5mM_SA_P Parameter: Treatment Value: 5mM SA vs. No Treatment
  misc_feature: MA Experiment ID: 20000535 Result: Down-regulated in Transcription
  misc_feature: MA Experiment 20000535 PARAMETER Experiment Name: Zm_Hybrid_Seed_Dev_P Parameter: DAP Value: 30 vs. 12
  misc_feature: MA Experiment 20000535 PARAMETER Experiment Name: Zm_Hybrid_Seed_Dev_P Parameter: Organism Value: Zea mays
  misc_feature: MA Experiment 20000535 PARAMETER Experiment Name: Zm_Hybrid_Seed_Dev_P Parameter: Plant Line Value: 35A19
  misc_feature: MA Experiment 20000535 PARAMETER Experiment Name: Zm_Hybrid_Seed_Dev_P Parameter: Tissue Value: Embryo vs. Unfert Floret
  misc_feature: MA Experiment ID: 20000626 Result: Up-regulated in Transcription
  misc_feature: MA Experiment 20000626 PARAMETER Experiment Name: Zm_Herbicide-Treatments_P Parameter: Timepoint (hr) Value: 12
  misc_feature: MA Experiment 20000626 PARAMETER Experiment Name: Zm_Herbicide-Treatments_P Parameter: Tissue Value: Aerial
  misc_feature: MA Experiment 20000626 PARAMETER Experiment Name: Zm_Herbicide-Treatments_P Parameter: Treatment Value: Roundup vs. No Treatment
  misc_feature: MA Experiment ID: 20001613 Result: Down-regulated in Transcription
  misc_feature: MA Experiment 20001613 PARAMETER Experiment Name: Zm_50ppm_KNO3_L-to-H_P Parameter: Age (day) Value: 20
  misc_feature: MA Experiment 20001613 PARAMETER Experiment Name: Zm_50ppm_KNO3_L-to-H_P Parameter: Organism Value: Zea mays
  misc_feature: MA Experiment 20001613 PARAMETER Experiment Name: Zm_50ppm_KNO3_L-to-H_P Parameter: Plant Line Value: 35A19
  misc_feature: MA Experiment 20001613 PARAMETER Experiment Name: Zm_50ppm_KNO3_L-to-H_P Parameter: Timepoint (hr) Value: 24
  misc_feature: MA Experiment 20001613 PARAMETER Experiment Name: Zm_50ppm_KNO3_L-to-H_P Parameter: Tissue Value: Roots
  misc_feature: MA Experiment 20001613 PARAMETER Experiment Name: Zm_50ppm_KNO3_L-to-H_P Parameter: Treatment Value: 50ppm KNO3 vs. 50ppm KCl
  misc_feature: MA Experiment ID: 20001614 Result: Down-regulated in Transcription
  misc_feature: MA Experiment 20001614 PARAMETER Experiment Name: Zm_50ppm_KNO3_L-to-H_P Parameter: Age (day) Value: 21
  misc_feature: MA Experiment 20001614 PARAMETER Experiment Name: Zm_50ppm_KNO3_L-to-H_P Parameter: Organism Value: Zea mays
  misc_feature: MA Experiment 20001614 PARAMETER Experiment Name: Zm_50ppm_KNO3_L-to-H_P Parameter: Plant Line Value: 35A19
  misc_feature: MA Experiment 20001614 PARAMETER Experiment Name: Zm_50ppm_KNO3_L-to-H_P Parameter: Timepoint (hr) Value: 48
  misc_feature: MA Experiment 20001614 PARAMETER Experiment Name: Zm_50ppm_KNO3_L-to-H_P Parameter: Tissue Value: Roots
  misc_feature: MA Experiment 20001614 PARAMETER Experiment Name: Zm_50ppm_KNO3_L-to-H_P Parameter: Treatment Value: 50ppm KNO3 vs. 50ppm KCl
aagtcctgctagctccataaaggcgcagccggccggctggccggtagcagtcagccagccagccagccatggagacggcctccttcctctcagtggcgctggccctggcggccctcgtccccgtctcgctgctccttgtgaaccggcccctctacggcaaactgcccccggggccgcggcggcgtcccgtggtgggtaacctgttcgacgtgcagcccgtgcggtgccggtgctaccaggagtgggcgcgccggtacgggcccatcatgacggtgtggctgggcacgtcgcccacggtggtggtgtccacgtcggagctggccaaggaggtgctcaagacccacgaccagcagctcgccgaccgctgccgggaccgctccaccgagagcttcagccgaggcggccaggacctcatctgggccgactacggcccccactacatcaaggtgcgcaagctctgcaacctcgagctcttcacgcagcgccgcctcgaggcgctcaggcccatccgcgaggacgaggtcaccgccatggtcgagtccgtctacaaagccgtcaccgcgcctggcagtgcagggaagccgttggttgtaaagaaccacctctcgatggtggccttcaacaacatcacgcggctggccttcgggaagcggttcgtggacgcggccggcgagctggacgagcaagggcgcgagttcaaggggatcgtccacaacggcatcaagatcggtgcgtccctctccatcgcgcagcacatcccgtggctacgctggctggccccggtcgacgagcaggccttcaaagcccacggcgaacggcgcgaccgcctcaccgtgaagatcatggaggagcacgccagggccctcaagcagcgcggcgcccagcagcacttcgtcgacgcgctcttcactctcagggacaagtacgacctcagcgatgacaccgtcataggcctcctctgggacatgatcaccgccggcacggacacgacggtgatctcggtggagtgggcgatggcggagctgctgaggaaccccagagtgcaggagaagctgcaggaggagctggaccgtgtcgtcggccgcgaccgggtcctgtcggagacggacttcccgaacctgccttacctgcaggccgtcgtcaaggagtccctgcgcctgcacccgccgacgccgctgatgctcccccacagggccagcgccagcgtcaagatcgccggctacgacatccccaagggcgccaacgtcgtcgtcaacgtgtgggcggtggcgcgcgaccccgaggtgtgggacagcccgctcgagttccggccggagcggttcctccgggagaacatcgacatcaagggcgccgacttccgcgtgctgccgttcggcgccggccgccgggtgtgccccggcgcgcagctcgggatcaacctcgtggcgtccatgatcggccacatgctgcaccacttcacgtggacgctgccgagcgggacctgtcccgaggacgtgagcatgatggagtcccccgggctcgtcaccttcatggccacgccgctgcaggccgtcgccacgccgcgcctggacaaggaggaactgtacaggcgtgtcccttcggacgtgtgagccgtcggcgtcctggcatctgctgcgttccctgttttgaaacctgctgctgctgttgcgaatttgtgtaccattaactattcgctggtgatgtacgtgtcatagtcgtgtacgagcattttgtgtactgcagaacttgatcgctgagcatacacttttgcccggtagtaatttacaatttcagcattgcaaatt

SEQ ID NO: 7665 - protein, 513 aa, Zea mays subsp. mays
  peptide (1)..(513): Ceres Seq. ID no. 12408658
  misc_feature (33)..(487): Pfam Name: Cytochrome P450 Pfam Description: Cytochrome P450
  misc_feature (1)..(513): Homolog of NCBI NO: 5915857 NR Description: Cytochrome P450 98A1 >gi|7430624|pir||T14638
  misc_feature (5)..(513): Homolog of NCBI NO: 30688445 NR Description: cytochrome P450 98A3 [Arabidopsis thaliana]
METASFLSVALALAALVPVSLLLVNRPLYGKLPPGPRRRPVVGNLFDVQPVRCRCYQEWARRYGPIMTVWLGTSPTVVVSTSELAKEVLKTHDQQLADRCRDRSTESFSRGGQDLIWADYGPHYIKVRKLCNLELFTQRRLEALRPIREDEVTAMVESVYKAVTAPGSAGKPLVVKNHLSMVAFNNITRLAFGKRFVDAAGELDEQGREFKGIVHNGIKIGASLSIAQHIPWLRWLAPVDEQAFKAHGERRDRLTVKIMEEHARALKQRGAQQHFVDALFTLRDKYDLSDDTVIGLLWDMITAGTDTTVISVEWAMAELLRNPRVQEKLQEELDRVVGRDRVLSETDFPNLPYLQAVVKESLRLHPPTPLMLPHRASASVKIAGYDIPKGANVVVNVWAVARDPEVWDSPLEFRPERFLRENIDIKGADFRVLPFGAGRRVCPGAQLGINLVASMIGHMLHHFTWTLPSGTCPEDVSMMESPGLVTFMATPLQAVATPRLDKEELYRRVPSDV

SEQ ID NO: 7666 - protein, 447 aa, Zea mays subsp. mays
  peptide (1)..(447): Ceres Seq. ID no. 12408659
  misc_feature (1)..(421): Pfam Name: Cytochrome P450 Pfam Description: Cytochrome P450
  misc_feature (1)..(447): Homolog of NCBI NO: 5915857 NR Description: Cytochrome P450 98A1 >gi|7430624|pir||T14638
  misc_feature (1)..(447): Homolog of NCBI NO: 30688445 NR Description: cytochrome P450 98A3 [Arabidopsis thaliana]
MTVWLGTSPTVVVSTSELAKEVLKTHDQQLADRCRDRSTESFSRGGQDLIWADYGPHYIKVRKLCNLELFTQRRLEALRPIREDEVTAMVESVYKAVTAPGSAGKPLVVKNHLSMVAFNNITRLAFGKRFVDAAGELDEQGREFKGIVHNGIKIGASLSIAQHIPWLRWLAPVDEQAFKAHGERRDRLTVKIMEEHARALKQRGAQQHFVDALFTLRDKYDLSDDTVIGLLWDMITAGTDTTVISVEWAMAELLRNPRVQEKLQEELDRVVGRDRVLSETDFPNLPYLQAVVKESLRLHPPTPLMLPHRASASVKIAGYDIPKGANVVVNVWAVARDPEVWDSPLEFRPERFLRENIDIKGADFRVLPFGAGRRVCPGAQLGINLVASMIGHMLHHFTWTLPSGTCPEDVSMMESPGLVTFMATPLQAVATPRLDKEELYRRVPSDV

SEQ ID NO: 7667 - protein, 359 aa, Zea mays subsp. mays
  peptide (1)..(359): Ceres Seq. ID no. 12408660
  misc_feature (1)..(333): Pfam Name: Cytochrome P450 Pfam Description: Cytochrome P450
  misc_feature (1)..(359): Homolog of NCBI NO: 5915857 NR Description: Cytochrome P450 98A1 >gi|7430624|pir||T14638
  misc_feature (1)..(359): Homolog of NCBI NO: 30688445 NR Description: cytochrome P450 98A3 [Arabidopsis thaliana]
MVESVYKAVTAPGSAGKPLVVKNHLSMVAFNNITRLAFGKRFVDAAGELDEQGREFKGIVHNGIKIGASLSIAQHIPWLRWLAPVDEQAFKAHGERRDRLTVKIMEEHARALKQRGAQQHFVDALFTLRDKYDLSDDTVIGLLWDMITAGTDTTVISVEWAMAELLRNPRVQEKLQEELDRVVGRDRVLSETDFPNLPYLQAVVKESLRLHPPTPLMLPHRASASVKIAGYDIPKGANVVVNVWAVARDPEVWDSPLEFRPERFLRENIDIKGADFRVLPFGAGRRVCPGAQLGINLVASMIGHMLHHFTWTLPSGTCPEDVSMMESPGLVTFMATPLQAVATPRLDKEELYRRVPSDV

SEQ ID NO: 7668 - DNA, 1655 bp, Zea mays subsp. mays
  misc_feature (1)..(1655): Ceres Seq. ID no. 12347506
  misc_feature: MA Experiment ID: 108535 Result: Up-regulated in Transcription
  misc_feature: MA Experiment 108535 PARAMETER Experiment Name: Zm_Meristem_P Parameter: Age (day) Value: 8
  misc_feature: MA Experiment 108535 PARAMETER Experiment Name: Zm_Meristem_P Parameter: Organism Value: Zea mays
  misc_feature: MA Experiment 108535 PARAMETER Experiment Name: Zm_Meristem_P Parameter: Plant Line Value: 35A19
  misc_feature: MA Experiment 108535 PARAMETER Experiment Name: Zm_Meristem_P Parameter: Tissue Value: Root Meristem vs. Above Root Meristem
  misc_feature: MA Experiment ID: 108559 Result: Down-regulated in Transcription
  misc_feature: MA Experiment 108559 PARAMETER Experiment Name: Zm_5mM_NO_P Parameter: Age (day) Value: 8
  misc_feature: MA Experiment 108559 PARAMETER Experiment Name: Zm_5mM_NO_P Parameter: Organism Value: Zea mays
  misc_feature: MA Experiment 108559 PARAMETER Experiment Name: Zm_5mM_NO_P Parameter: Plant Line Value: 35A19
  misc_feature: MA Experiment 108559 PARAMETER Experiment Name: Zm_5mM_NO_P Parameter: Timepoint (hr) Value: 12
  misc_feature: MA Experiment 108559 PARAMETER Experiment Name: Zm_5mM_NO_P Parameter: Tissue Value: Aerial
  misc_feature: MA Experiment 108559 PARAMETER Experiment Name: Zm_5mM_NO_P Parameter: Treatment Value: 5mM NO vs. No Treatment
  misc_feature: MA Experiment ID: 108689 Result: Up-regulated in Transcription
  misc_feature: MA Experiment 108689 PARAMETER Experiment Name: Zm_Drought_Roots_P Parameter: Age (day) Value: 9
  misc_feature: MA Experiment 108689 PARAMETER Experiment Name: Zm_Drought_Roots_P Parameter: Organism Value: Zea mays
  misc_feature: MA Experiment 108689 PARAMETER Experiment Name: Zm_Drought_Roots_P Parameter: Plant Line Value: 35A19
  misc_feature: MA Experiment 108689 PARAMETER Experiment Name: Zm_Drought_Roots_P Parameter: Timepoint (hr) Value: 24
  misc_feature: MA Experiment 108689 PARAMETER Experiment Name: Zm_Drought_Roots_P Parameter: Tissue Value: Roots
  misc_feature: MA Experiment 108689 PARAMETER Experiment Name: Zm_Drought_Roots_P Parameter: Treatment Value: Drought vs. No Drought
  misc_feature: MA Experiment ID: 20000480 Result: Down-regulated in Transcription
  misc_feature: MA Experiment 20000480 PARAMETER Experiment Name: Zm_Drought_P Parameter: Age (day) Value: 11
  misc_feature: MA Experiment 20000480 PARAMETER Experiment Name: Zm_Drought_P Parameter: Organism Value: Zea mays
  misc_feature: MA Experiment 20000480 PARAMETER Experiment Name: Zm_Drought_P Parameter: Plant Line Value: 35A19
  misc_feature: MA Experiment 20000480 PARAMETER Experiment Name: Zm_Drought_P Parameter: Timepoint (hr) Value: 72
  misc_feature: MA Experiment 20000480 PARAMETER Experiment Name: Zm_Drought_P Parameter: Tissue Value: Aerial
  misc_feature: MA Experiment 20000480 PARAMETER Experiment Name: Zm_Drought_P Parameter: Treatment Value: Drought vs. No Drought
  misc_feature: MA Experiment ID: 20000492 Result: Up-regulated in Transcription
  misc_feature: MA Experiment 20000492 PARAMETER Experiment Name: Zm_Hybrid_Seed_Dev_P Parameter: DAP Value: 12
  misc_feature: MA Experiment 20000492 PARAMETER Experiment Name: Zm_Hybrid_Seed_Dev_P Parameter: Organism Value: Zea mays
  misc_feature: MA Experiment 20000492 PARAMETER Experiment Name: Zm_Hybrid_Seed_Dev_P Parameter: Plant Line Value: 35A19
  misc_feature: MA Experiment 20000492 PARAMETER Experiment Name: Zm_Hybrid_Seed_Dev_P Parameter: Tissue Value: Fert Kernel vs. Unfert Floret
  misc_feature: MA Experiment ID: 20000535 Result: Up-regulated in Transcription
  misc_feature: MA Experiment 20000535 PARAMETER Experiment Name: Zm_Hybrid_Seed_Dev_P Parameter: DAP Value: 30 vs. 12
  misc_feature: MA Experiment 20000535 PARAMETER Experiment Name: Zm_Hybrid_Seed_Dev_P Parameter: Organism Value: Zea mays
  misc_feature: MA Experiment 20000535 PARAMETER Experiment Name: Zm_Hybrid_Seed_Dev_P Parameter: Plant Line Value: 35A19
  misc_feature: MA Experiment 20000535 PARAMETER Experiment Name: Zm_Hybrid_Seed_Dev_P Parameter: Tissue Value: Embryo vs. Unfert Floret
  misc_feature: MA Experiment ID: 20000626 Result: Down-regulated in Transcription
  misc_feature: MA Experiment 20000626 PARAMETER Experiment Name: Zm_Herbicide-Treatments_P Parameter: Timepoint (hr) Value: 12
  misc_feature: MA Experiment 20000626 PARAMETER Experiment Name: Zm_Herbicide-Treatments_P Parameter: Tissue Value: Aerial
  misc_feature: MA Experiment 20000626 PARAMETER Experiment Name: Zm_Herbicide-Treatments_P Parameter: Treatment Value: Roundup vs. No Treatment
gaggccttgcctgcctgccttgtttccccaaccccctcggaccctcacatcttcctcggtctctccgccgcccaccacctccatccccctcctctctttatacgccaccgcggcggggcttcccccatccctctgtccgttcgctgcattgctcccctaaccgttcggccaggagacagcggagagggcagagatggcggccgcgtccttcaccgccgccaagttcctggcgccggtggccgcgagatccggcggagagagggcgcccccgctccccgccggcgcctcgtcctcctccttcgccaggaccctgcgccgcggcgcggtgcaccacccgcgcctgcgcaccgcgctcgccgtctcctccgacctgctcgctgggaacaaggccgcgcaggccgccgccgcgcatccggcggttacacgggaagaggcactggagctgtatgaggacatggttcttggccgtgtattcgaggacatgtgtgcacaaatgtactaccgtggcaagatgtttggtttcgtccacctttacaatggccaggaggctgtctccactggcttcatcaaacttctgaaccaagctgactgtgttgttagcacataccgtgatcatgtccatgcgctgtccaagggcgtcccggcacgttctgtcatggctgagctctttggcaaggccacaggctgctgccgtggacagggtggttccatgcacatgttctctgctccccacaacctcctgggaggctttgccttcatcggagagggcattcctgttgccactggtgcagcctttgctgctaagtaccgtcatgaggtgctcaaggagtctggccctgatgggcttgatgtcacattggcgttctttggcgatggtacctgtaataatggccagttctttgagtgtctgaacatggcacagctttggaagcttcctattgtgtttgttgtggagaataacctgtgggcaattggaatgtcacacattagggctacatcggacccagagatttggaagaaggggccagcatttggaatgcctggggtgcatgttgatggtatggatgtcctgaaggtcagggaggttgctaaggaggcaattgagagggcaaggagaggtgaagggccaaccctagtcgagtgtgaaacatacaggttccggggtcactcccttgcagacccagatgagctcaggaagcctgatgagaaaacacactacgccgcaagggattctatcacggccttgaagaagtacatcatagagcagaacctcgcaaccgaatccgagctgaagagcatcgagaagaagatcgacgatgtcgttgaggaggctgtcgagtttgctgacgcgagcccgcatccgccgcgcagccagctgttggagaacgtgtttgccgaccccaaaggctttggtatcggccccgatgggaagtacaggtgcgaggatcccaagttcacccaaggcactgcccaagtttaaggaggttaatctgcgctctgtaccactgtgcttgagttctctagttttgtcgatcccagtgtcatgttaaggatactgtatgcataaggcggtccatttctttggctcttaggcttgtgtctgatactattgtgtaatttattcgaatgctcaactgatgcccatgttttatggc

SEQ ID NO: 7669 - protein, 428 aa, Zea mays subsp. mays
  peptide (1)..(428): Ceres Seq. ID no. 12347507
  misc_feature (86)..(393): Pfam Name: Dehydrogenase E1 component Pfam Description: Dehydrogenase E1 component
  misc_feature (2)..(428): Homolog of NCBI NO: 38344868 NR Description: OSJNBa0020P07.11 [Oryza sativa (japonica
  misc_feature (3)..(428): Homolog of NCBI NO: 15223294 NR Description: pyruvate dehydrogenase E1 alpha subunit; protein At1g01090.1, supported by cDNA: gi_15450706, supported by cDNA: supported by cDNA: gi_2454181 [Arabidopsis thaliana] [Arabidopsis
  misc_feature (3)..(417): Homolog of NCBI NO: 6715645 NR Description: T25K16.8 [Arabidopsis thaliana]
  misc_feature (72)..(402): Homolog of NCBI NO: 17230200 NR Description: pyruvate dehydrogenase E1 component, alpha [Nostoc sp. PCC 7120] >gi|25284425|pir||AE2144 pyruvate
  misc_feature (76)..(402): Homolog of NCBI NO: 23128827 NR Description: hypothetical protein [Nostoc punctiforme]
  misc_feature (76)..(402): Homolog of NCBI NO: 11465733 NR Description: pyruvate dehydrogenase E1 component alpha subunit purpurea] >gi|1709450|sp|P51267|ODPA_PORPU PYRUVATE DEHYDROGENASE COMPONENT ALPHA SUBUNIT >gi|2147992|pir||S73188 pyruvate
  misc_feature (72)..(402): Homolog of NCBI NO: 16331186 NR Description: pyruvate dehydrogenase E1 component, alpha subunit
  misc_feature (76)..(402): Homolog of NCBI NO: 23041416 NR Description: hypothetical protein [Trichodesmium erythraeum
  misc_feature (69)..(402): Homolog of NCBI NO: 37522413 NR Description: pyruvate dehydrogenase E1 alpha-subunit
  misc_feature (75)..(402): Homolog of NCBI NO: 22298712 NR Description: pyruvate dehydrogenase E1 component, alpha subunit
MAAASFTAAKFLAPVAARSGGERAPPLPAGASSSSFARTLRRGAVHHPRLRTALAVSSDLLAGNKAAQAAAAHPAVTREEALELYEDMVLGRVFEDMCAQMYYRGKMFGFVHLYNGQEAVSTGFIKLLNQADCVVSTYRDHVHALSKGVPARSVMAELFGKATGCCRGQGGSMHMFSAPHNLLGGFAFIGEGIPVATGAAFAAKYRHEVLKESGPDGLDVTLAFFGDGTCNNGQFFECLNMAQLWKLPIVFVVENNLWAIGMSHIRATSDPEIWKKGPAFGMPGVHVDGMDVLKVREVAKEAIERARRGEGPTLVECETYRFRGHSLADPDELRKPDEKTHYAARDSITALKKYIIEQNLATESELKSIEKKIDDVVEEAVEFADASPHPPRSQLLENVFADPKGFGIGPDGKYRCEDPKFTQGTAQV

SEQ ID NO: 7670 - protein, 341 aa, Zea mays subsp. mays
  peptide (1)..(341): Ceres Seq. ID no. 12347508
  misc_feature (1)..(306): Pfam Name: Dehydrogenase E1 component Pfam Description: Dehydrogenase E1 component
  misc_feature (1)..(341): Homolog of NCBI NO: 38344868 NR Description: OSJNBa0020P07.11 [Oryza sativa (japonica
  misc_feature (1)..(341): Homolog of NCBI NO: 15223294 NR Description: pyruvate dehydrogenase E1 alpha subunit; protein At1g01090.1, supported by cDNA: gi_15450706, supported by cDNA: supported by cDNA: gi_2454181 [Arabidopsis thaliana] [Arabidopsis
  misc_feature (1)..(330): Homolog of NCBI NO: 6715645 NR Description: T25K16.8 [Arabidopsis thaliana]
  misc_feature (1)..(315): Homolog of NCBI NO: 17230200 NR Description: pyruvate dehydrogenase E1 component, alpha [Nostoc sp. PCC 7120] >gi|25284425|pir||AE2144 pyruvate
  misc_feature (1)..(315): Homolog of NCBI NO: 23128827 NR Description: hypothetical protein [Nostoc punctiforme]
  misc_feature (1)..(315): Homolog of NCBI NO: 11465733 NR Description: pyruvate dehydrogenase E1 component alpha subunit purpurea] >gi|1709450|sp|P51267|ODPA_PORPU PYRUVATE DEHYDROGENASE COMPONENT ALPHA SUBUNIT >gi|2147992|pir||S73188 pyruvate
  misc_feature (1)..(315): Homolog of NCBI NO: 16331186 NR Description: pyruvate dehydrogenase E1 component, alpha subunit
  misc_feature (1)..(315): Homolog of NCBI NO: 23041416 NR Description: hypothetical protein [Trichodesmium erythraeum
  misc_feature (1)..(315): Homolog of NCBI NO: 37522413 NR Description: pyruvate dehydrogenase E1 alpha-subunit
  misc_feature (1)..(315): Homolog of NCBI NO: 22298712 NR Description: pyruvate dehydrogenase E1 component, alpha subunit
MVLGRVFEDMCAQMYYRGKMFGFVHLYNGQEAVSTGFIKLLNQADCVVSTYRDHVHALSKGVPARSVMAELFGKATGCCRGQGGSMHMFSAPHNLLGGFAFIGEGIPVATGAAFAAKYRHEVLKESGPDGLDVTLAFFGDGTCNNGQFFECLNMAQLWKLPIVFVVENNLWAIGMSHIRATSDPEIWKKGPAFGMPGVHVDGMDVLKVREVAKEAIERARRGEGPTLVECETYRFRGHSLADPDELRKPDEKTHYAARDSITALKKYIIEQNLATESELKSIEKKIDDVVEEAVEFADASPHPPRSQLLENVFADPKGFGIGPDGKYRCEDPKFTQGTAQV

SEQ ID NO: 7671 - protein, 332 aa, Zea mays subsp. mays
  peptide (1)..(332): Ceres Seq. ID no. 12347509
  misc_feature (1)..(297): Pfam Name: Dehydrogenase E1 component Pfam Description: Dehydrogenase E1 component
  misc_feature (1)..(332): Homolog of NCBI NO: 38344868 NR Description: OSJNBa0020P07.11 [Oryza sativa (japonica
  misc_feature (1)..(332): Homolog of NCBI NO: 15223294 NR Description: pyruvate dehydrogenase E1 alpha subunit; protein At1g01090.1, supported by cDNA: gi_15450706, supported by cDNA: supported by cDNA: gi_2454181 [Arabidopsis thaliana] [Arabidopsis
  misc_feature (1)..(321): Homolog of NCBI NO: 6715645 NR Description: T25K16.8 [Arabidopsis thaliana]
  misc_feature (1)..(306): Homolog of NCBI NO: 17230200 NR Description: pyruvate dehydrogenase E1 component, alpha [Nostoc sp. PCC 7120] >gi|25284425|pir||AE2144 pyruvate
  misc_feature (1)..(306): Homolog of NCBI NO: 23128827 NR Description: hypothetical protein [Nostoc punctiforme]
  misc_feature (1)..(306): Homolog of NCBI NO: 11465733 NR Description: pyruvate dehydrogenase E1 component alpha subunit purpurea] >gi|1709450|sp|P51267|ODPA_PORPU PYRUVATE DEHYDROGENASE COMPONENT ALPHA SUBUNIT >gi|2147992|pir||S73188 pyruvate
  misc_feature (1)..(306): Homolog of NCBI NO: 16331186 NR Description: pyruvate dehydrogenase E1 component, alpha subunit
  misc_feature (1)..(306): Homolog of NCBI NO: 23041416 NR Description: hypothetical protein [Trichodesmium erythraeum
  misc_feature (1)..(306): Homolog of NCBI NO: 37522413 NR Description: pyruvate dehydrogenase E1 alpha-subunit
  misc_feature (1)..(306): Homolog of NCBI NO: 22298712 NR Description: pyruvate dehydrogenase E1 component, alpha subunit
MCAQMYYRGKMFGFVHLYNGQEAVSTGFIKLLNQADCVVSTYRDHVHALSKGVPARSVMAELFGKATGCCRGQGGSMHMFSAPHNLLGGFAFIGEGIPVATGAAFAAKYRHEVLKESGPDGLDVTLAFFGDGTCNNGQFFECLNMAQLWKLPIVFVVENNLWAIGMSHIRATSDPEIWKKGPAFGMPGVHVDGMDVLKVREVAKEAIERARRGEGPTLVECETYRFRGHSLADPDELRKPDEKTHYAARDSITALKKYIIEQNLATESELKSIEKKIDDVVEEAVEFADASPHPPRSQLLENVFADPKGFGIGPDGKYRCEDPKFTQGTAQV

SEQ ID NO: 7672 - DNA, 1825 bp, Zea mays subsp. mays
  misc_feature (1)..(1825): Ceres Seq. ID no. 13498687
  misc_feature: MA Experiment ID: 108523 Result: Down-regulated in Transcription
  misc_feature: MA Experiment 108523 PARAMETER Experiment Name: Zm_42deg_Heat_P Parameter: Age (day) Value: 8
  misc_feature: MA Experiment 108523 PARAMETER Experiment Name: Zm_42deg_Heat_P Parameter: Organism Value: Zea mays
  misc_feature: MA Experiment 108523 PARAMETER Experiment Name: Zm_42deg_Heat_P Parameter: Plant Line Value: 35A19
  misc_feature: MA Experiment 108523 PARAMETER Experiment Name: Zm_42deg_Heat_P Parameter: Temperature (deg C) Value: 42 vs. 22
  misc_feature: MA Experiment 108523 PARAMETER Experiment Name: Zm_42deg_Heat_P Parameter: Timepoint (hr) Value: 6
  misc_feature: MA Experiment 108523 PARAMETER Experiment Name: Zm_42deg_Heat_P Parameter: Tissue Value: Aerial
  misc_feature: MA Experiment ID: 108528 Result: Down-regulated in Transcription
  misc_feature: MA Experiment 108528 PARAMETER Experiment Name: Zm_Imbibed_Seeds_P Parameter: Age (day) Value: 5 vs. 2
  misc_feature: MA Experiment 108528 PARAMETER Experiment Name: Zm_Imbibed_Seeds_P Parameter: Organism Value: Zea mays
  misc_feature: MA Experiment 108528 PARAMETER Experiment Name: Zm_Imbibed_Seeds_P Parameter: Plant Line Value: 35A19
  misc_feature: MA Experiment 108528 PARAMETER Experiment Name: Zm_Imbibed_Seeds_P Parameter: Tissue Value: Aerial vs. Embryo
  misc_feature: MA Experiment ID: 108534 Result: Down-regulated in Transcription
  misc_feature: MA Experiment 108534 PARAMETER Experiment Name: Zm_4deg_Cold_P Parameter: Age (hr) Value: 8
  misc_feature: MA Experiment 108534 PARAMETER Experiment Name: Zm_4deg_Cold_P Parameter: Organism Value: Zea mays
  misc_feature: MA Experiment 108534 PARAMETER Experiment Name: Zm_4deg_Cold_P Parameter: Plant Line Value: 35A19
  misc_feature: MA Experiment 108534 PARAMETER Experiment Name: Zm_4deg_Cold_P Parameter: Temperature (deg C) Value: 4 vs. 22
  misc_feature: MA Experiment 108534 PARAMETER Experiment Name: Zm_4deg_Cold_P Parameter: Timepoint (hr) Value: 6
  misc_feature: MA Experiment 108534 PARAMETER Experiment Name: Zm_4deg_Cold_P Parameter: Tissue Value: Aerial
  misc_feature: MA Experiment ID: 108536 Result: Down-regulated in Transcription
  misc_feature: MA Experiment 108536 PARAMETER Experiment Name: Zm_Meristem_P Parameter: Age (day) Value: 8
  misc_feature: MA Experiment 108536 PARAMETER Experiment Name: Zm_Meristem_P Parameter: Organism Value: Zea mays
  misc_feature: MA Experiment 108536 PARAMETER Experiment Name: Zm_Meristem_P Parameter: Plant Line Value: 35A19
  misc_feature: MA Experiment 108536 PARAMETER Experiment Name: Zm_Meristem_P Parameter: Tissue Value: Shoot Meristem vs. Above Shoot Meristem
  misc_feature: MA Experiment ID: 108543 Result: Down-regulated in Transcription
  misc_feature: MA Experiment ID: 108545 Result: Down-regulated in Transcription
  misc_feature: MA Experiment 108545 PARAMETER Experiment Name: Zm_Imbibed_Seeds_P Parameter: Age (day) Value: 3 vs. 2
  misc_feature: MA Experiment 108545 PARAMETER Experiment Name: Zm_Imbibed_Seeds_P Parameter: Organism Value: Zea mays
  misc_feature: MA Experiment 108545 PARAMETER Experiment Name: Zm_Imbibed_Seeds_P Parameter: Plant Line Value: 35A19
  misc_feature: MA Experiment 108545 PARAMETER Experiment Name: Zm_Imbibed_Seeds_P Parameter: Tissue Value: Aerial vs. Embryo
  misc_feature: MA Experiment ID: 108547 Result: Down-regulated in Transcription
  misc_feature: MA Experiment 108547 PARAMETER Experiment Name: Zm_Imbibed_Seeds_P Parameter: Age (day) Value: 4 vs. 2
  misc_feature: MA Experiment 108547 PARAMETER Experiment Name: Zm_Imbibed_Seeds_P Parameter: Organism Value: Zea mays
  misc_feature: MA Experiment 108547 PARAMETER Experiment Name: Zm_Imbibed_Seeds_P Parameter: Plant Line Value: 35A19
  misc_feature: MA Experiment 108547 PARAMETER Experiment Name: Zm_Imbibed_Seeds_P Parameter: Tissue Value: Aerial vs. Embryo
  misc_feature: MA Experiment ID: 108559 Result: Down-regulated in Transcription
  misc_feature: MA Experiment 108559 PARAMETER Experiment Name: Zm_5mM_NO_P Parameter: Age (day) Value: 8
  misc_feature: MA Experiment 108559 PARAMETER Experiment Name: Zm_5mM_NO_P Parameter: Organism Value: Zea mays
  misc_feature: MA Experiment 108559 PARAMETER Experiment Name: Zm_5mM_NO_P Parameter: Plant Line Value: 35A19
  misc_feature: MA Experiment 108559 PARAMETER Experiment Name: Zm_5mM_NO_P Parameter: Timepoint (hr) Value: 12
  misc_feature: MA Experiment 108559 PARAMETER Experiment Name: Zm_5mM_NO_P Parameter: Tissue Value: Aerial
  misc_feature: MA Experiment 108559 PARAMETER Experiment Name: Zm_5mM_NO_P Parameter: Treatment Value: 5mM NO vs. No Treatment
  misc_feature: MA Experiment ID: 108688 Result: Down-regulated in Transcription
  misc_feature: MA Experiment 108688 PARAMETER Experiment Name: Zm_Embryos-Flowers__P Parameter: Tissue Value: Immature Flowers vs. Aerial+
  misc_feature: MA Experiment ID: 20000108 Result: Down-regulated in Transcription
  misc_feature: MA Experiment 20000108 PARAMETER Experiment Name: Zm_Root-Tips_P Parameter: Age (day) Value: 12
  misc_feature: MA Experiment 20000108 PARAMETER Experiment Name: Zm_Root-Tips_P Parameter: Organism Value: Zea mays
  misc_feature: MA Experiment 20000108 PARAMETER Experiment Name: Zm_Root-Tips_P Parameter: Tissue Value: Root tips vs. Root mid region    35
  misc_feature: MA Experiment 20000108 PARAMETER Experiment Name: Zm_Root-Tips_P Parameter: Tissue Value: Root tips vs. Root mid region   Sequence Listing-Misc Features (4)
  misc_feature: MA Experiment ID: 20000477 Result: Up-regulated in Transcription
  misc_feature: MA Experiment 20000477 PARAMETER Experiment Name: Zm_5mM_SA_P Parameter: Age (day) Value: 10
  misc_feature: MA Experiment 20000477 PARAMETER Experiment Name: Zm_5mM_SA_P Parameter: Organism Value: Zea mays
  misc_feature: MA Experiment 20000477 PARAMETER Experiment Name: Zm_5mM_SA_P Parameter: Plant Line Value: 35A19
  misc_feature: MA Experiment 20000477 PARAMETER Experiment Name: Zm_5mM_SA_P Parameter: Timepoint (hr) Value: 48
  misc_feature: MA Experiment 20000477 PARAMETER Experiment Name: Zm_5mM_SA_P Parameter: Tissue Value: Aerial
  misc_feature: MA Experiment 20000477 PARAMETER Experiment Name: Zm_5mM_SA_P Parameter: Treatment Value: 5mM SA vs. No Treatment
  misc_feature: MA Experiment ID: 20000487 Result: Down-regulated in Transcription
  misc_feature: MA Experiment 20000487 PARAMETER Experiment Name: Zm_50mM_NH4NO3_L_to_H_P Parameter: Organism Value: Zea mays
  misc_feature: MA Experiment 20000487 PARAMETER Experiment Name: Zm_50mM_NH4NO3_L_to_H_P Parameter: Timepoint (hr) Value: 4
  misc_feature: MA Experiment 20000487 PARAMETER Experiment Name: Zm_50mM_NH4NO3_L_to_H_P Parameter: Tissue Value: Leaves
  misc_feature: MA Experiment 20000487 PARAMETER Experiment Name: Zm_50mM_NH4NO3_L_to_H_P Parameter: Treatment Value: 50mM NH4NO3 vs. 100mM Mannitol
  misc_feature: MA Experiment ID: 20000488 Result: Down-regulated in Transcription
  misc_feature: MA Experiment 20000488 PARAMETER Experiment Name: Zm_50mM_NH4NO3_L_to_H_P Parameter: Organism Value: Zea mays
  misc_feature: MA Experiment 20000488 PARAMETER Experiment Name: Zm_50mM_NH4NO3_L_to_H_P Parameter: Timepoint (hr) Value: 8
  misc_feature: MA Experiment 20000488 PARAMETER Experiment Name: Zm_50mM_NH4NO3_L_to_H_P Parameter: Tissue Value: Leaves
  misc_feature: MA Experiment 20000488 PARAMETER Experiment Name: Zm_50mM_NH4NO3_L_to_H_P Parameter: Treatment Value: 50mM NH4NO3 vs. 100mM Mannitol
  misc_feature: MA Experiment ID: 20000535 Result: Up-regulated in Transcription
  misc_feature: MA Experiment 20000535 PARAMETER Experiment Name: Zm_Hybrid_Seed_Dev_P Parameter: DAP Value: 30 vs. 12
  misc_feature: MA Experiment 20000535 PARAMETER Experiment Name: Zm_Hybrid_Seed_Dev_P Parameter: Organism Value: Zea mays
  misc_feature: MA Experiment 20000535 PARAMETER Experiment Name: Zm_Hybrid_Seed_Dev_P Parameter: Plant Line Value: 35A19
  misc_feature: MA Experiment 20000535 PARAMETER Experiment Name: Zm_Hybrid_Seed_Dev_P Parameter: Tissue Value: Embryo vs. Unfert Floret
  misc_feature: MA Experiment ID: 20000626 Result: Up-regulated in Transcription
  misc_feature: MA Experiment 20000626 PARAMETER Experiment Name: Zm_Herbicide-Treatments_P Parameter: Timepoint (hr) Value: 12
  misc_feature: MA Experiment 20000626 PARAMETER Experiment Name: Zm_Herbicide-Treatments_P Parameter: Tissue Value: Aerial
  misc_feature: MA Experiment 20000626 PARAMETER Experiment Name: Zm_Herbicide-Treatments_P Parameter: Treatment Value: Roundup vs. No Treatment
  misc_feature: MA Experiment ID: 20001605 Result: Down-regulated in Transcription
  misc_feature: MA Experiment 20001605 PARAMETER Experiment Name: Zm_50ppm_KNO3_L-to-H_P Parameter: Age (day) Value: 19
  misc_feature: MA Experiment 20001605 PARAMETER Experiment Name: Zm_50ppm_KNO3_L-to-H_P Parameter: Organism Value: Zea mays
  misc_feature: MA Experiment 20001605 PARAMETER Experiment Name: Zm_50ppm_KNO3_L-to-H_P Parameter: Plant Line Value: 35A19
  misc_feature: MA Experiment 20001605 PARAMETER Experiment Name: Zm_50ppm_KNO3_L-to-H_P Parameter: Timepoint (hr) Value: 4
  misc_feature: MA Experiment 20001605 PARAMETER Experiment Name: Zm_50ppm_KNO3_L-to-H_P Parameter: Tissue Value: Shoots
  misc_feature: MA Experiment 20001605 PARAMETER Experiment Name: Zm_50ppm_KNO3_L-to-H_P Parameter: Treatment Value: 50ppm KNO3 vs. 50ppm KCl
  misc_feature: MA Experiment ID: 20001606 Result: Down-regulated in Transcription
  misc_feature: MA Experiment 20001606 PARAMETER Experiment Name: Zm_50ppm_KNO3_L-to-H_P Parameter: Age (day) Value: 19
  misc_feature: MA Experiment 20001606 PARAMETER Experiment Name: Zm_50ppm_KNO3_L-to-H_P Parameter: Organism Value: Zea mays
  misc_feature: MA Experiment 20001606 PARAMETER Experiment Name: Zm_50ppm_KNO3_L-to-H_P Parameter: Plant Line Value: 35A19
  misc_feature: MA Experiment 20001606 PARAMETER Experiment Name: Zm_50ppm_KNO3_L-to-H_P Parameter: Timepoint (hr) Value: 8
  misc_feature: MA Experiment 20001606 PARAMETER Experiment Name: Zm_50ppm_KNO3_L-to-H_P Parameter: Tissue Value: Shoots
  misc_feature: MA Experiment 20001606 PARAMETER Experiment Name: Zm_50ppm_KNO3_L-to-H_P Parameter: Treatment Value: 50ppm KNO3 vs. 50ppm KCl
  misc_feature: MA Experiment ID: 20001608 Result: Down-regulated in Transcription
  misc_feature: MA Experiment 20001608 PARAMETER Experiment Name: Zm_50ppm_KNO3_L-to-H_P Parameter: Age (day) Value: 21
  misc_feature: MA Experiment 20001608 PARAMETER Experiment Name: Zm_50ppm_KNO3_L-to-H_P Parameter: Organism Value: Zea mays
  misc_feature: MA Experiment 20001608 PARAMETER Experiment Name: Zm_50ppm_KNO3_L-to-H_P Parameter: Plant Line Value: 35A19
  misc_feature: MA Experiment 20001608 PARAMETER Experiment Name: Zm_50ppm_KNO3_L-to-H_P Parameter: Timepoint (hr) Value: 48
  misc_feature: MA Experiment 20001608 PARAMETER Experiment Name: Zm_50ppm_KNO3_L-to-H_P Parameter: Tissue Value: Shoots
  misc_feature: MA Experiment 20001608 PARAMETER Experiment Name: Zm_50ppm_KNO3_L-to-H_P Parameter: Treatment Value: 50ppm KNO3 vs. 50ppm KCl
tagaacatcctaatcgaaaaacagcacgcataggacgaactaccgatgcaagctgcgatcgatcagtcaccgcatctccggttccgcgcaggcatggacgacaagtcctgctacgtggccaccggcctctccctggcggccatcctcctcgtcctccaccgcctcgtggtccgtgctggcggcaaggggaacgccgccgcgcggcggtgtgcctcctagccctcccgccgtcccgttcctcgggcacctccacctgctagcatcggagtgccctctccactcgtcgctggcccgcctcgcggcgcgccacggccccgtgctctcgctgcgcctgggctcccgcgccgccgtggtggtgtcgtcgccggagtgcgccgaggcgtgcttcacggagcacgacgtggcgttcgccaaccgccccagactgacctcgcaggcgctggcctccttcggcggcgccgcgctggccgtgtctagctacgggccctactggcgcaacctccggcgcgtggccgccgtgcgcctcctctccacgcaccgcgtggcgtgcatgtgccccgtcatctcggccgaggtgcgcgccatgctgcgccgggtggggcgtgcggccgaggcggcggggcgcgtccagctcaaggccagcctgttcgagctctccctcagcgtgctcatggagaccatcgcgcagaccaagacgtcgcgcgccgacgacgcggacgatgccgtgtcgcccgaggcgcacgagttccggcggatcgtcgacgagatcctgccctacctcggcgccaccaacctgtgggactacctgccgctcctgcggcggttcgacgtgctcggggtgaggaacaagatcagggacgttgtcggcaggagggacgccttcctgcagcggctcatcgacgcggagcggcggaggctggacggcgacggtgacggcgacgacggcgagaagaagagcatgatcgccgtgatgctctcgctgcagaagtcggagccggacgtgtacacggacaccatgatcatggcactgtgcgggaacttgtttacagccggaacggagacgacgtcgtccacgatagaatgggccatgtcgctgttgctgaaccacccggacgcgctgaagaaggccgaggcagagatcgaggcggccgtgggcgcgtcccgcctcatcaccatggacgacgtgcccgggctgggctacctgcagtgcgtcatcaacgagacgctgcgcctgtacccggtggccccgctgctgctgccgcacgagtcggcggcggactgcacggtcggcggctacgacgtgccccgcggcacgctgctgttcgtcaacgcgtacgccatccacagggacccggcggcgtgggaggagccggacgagttcaggccggagcggttccgcgacggcaaggccgagggccggctgatgctgccgttcgggatgggacggcgcaggtgccccggggagacactcgcgctgcggaccgccggcctcgtgctcgccacgctcatccagtgcttccactgggacaggatcgatggcgctgagatcgacatgaccgagagcggcgggctcaccatgccccgggccgtcccgttggaggccacctgcaagcctcgcgaagccatgcgtcatgttcttcagcagctctgattggtctatgtgctaaacattctcatccctattctctcttgtgtgtgtggcagtacgaacagcacgtgctagctaaataagctgcgagcaatagctatccgcgtaacagtatggttcgtcaaagttgttatctttcaaaagttatctagtactataaacaaattgttcgtgtcg

SEQ ID NO: 7673 - protein, 366 aa, Zea mays subsp. mays
  peptide (1)..(366): Ceres Seq. ID no. 13498688
  misc_feature (1)..(366): Homolog of NCBI NO: 13661746 NR Description: putative cytochrome P450 [Lolium rigidum]
  misc_feature (1)..(366): Homolog of NCBI NO: 13661748 NR Description: putative cytochrome P450 [Lolium rigidum]
  misc_feature (1)..(366): Homolog of NCBI NO: 13661744 NR Description: putative cytochrome P450 [Lolium rigidum]
  misc_feature (1)..(366): Homolog of NCBI NO: 14488353 NR Description: putative cytochrome P450 [Oryza sativa (japonica
  misc_feature (1)..(366): Homolog of NCBI NO: 14488355 NR Description: putative cytochrome P450 [Oryza sativa (japonica
  misc_feature (1)..(366): Homolog of NCBI NO: 14488373 NR Description: putative cytochrome P450 [Oryza sativa (japonica
  misc_feature (1)..(365): Homolog of NCBI NO: 14488358 NR Description: putative cytochrome P450 [Oryza sativa (japonica
  misc_feature (1)..(366): Homolog of NCBI NO: 3059131 NR Description: cytochrome P450 [Helianthus tuberosus]
  misc_feature (1)..(366): Homolog of NCBI NO: 7430635 NR Description: cytochrome P450 (EC 1.14.-.-) 81B1c - Jerusalem >gi|3059129|emb|CAA04116.1| cytochrome P450 [Helianthus
  misc_feature (1)..(366): Homolog of NCBI NO: 38344454 NR Description: OSJNBa0017P10.2 [Oryza sativa (japonica
MCPVISAEVRAMLRRVGRAAEAAGRVQLKASLFELSLSVLMETIAQTKTSRADDADDAVSPEAHEFRRIVDEILPYLGATNLWDYLPLLRRFDVLGVRNKIRDVVGRRDAFLQRLIDAERRRLDGDGDGDDGEKKSMIAVMLSLQKSEPDVYTDTMIMALCGNLFTAGTETTSSTIEWAMSLLLNHPDALKKAEAEIEAAVGASRLITMDDVPGLGYLQCVINETLRLYPVAPLLLPHESAADCTVGGYDVPRGTLLFVNAYAIHRDPAAWEEPDEFRPERFRDGKAEGRLMLPFGMGRRRCPGETLALRTAGLVLATLIQCFHWDRIDGAEIDMTESGGLTMPRAVPLEATCKPREAMRHVLQQL

SEQ ID NO: 7674 - protein, 355 aa, Zea mays subsp. mays
  peptide (1)..(355): Ceres Seq. ID no. 13498689
  misc_feature (1)..(355): Homolog of NCBI NO: 13661746 NR Description: putative cytochrome P450 [Lolium rigidum]
  misc_feature (1)..(355): Homolog of NCBI NO: 13661748 NR Description: putative cytochrome P450 [Lolium rigidum]
  misc_feature (1)..(355): Homolog of NCBI NO: 13661744 NR Description: putative cytochrome P450 [Lolium rigidum]
  misc_feature (1)..(355): Homolog of NCBI NO: 14488353 NR Description: putative cytochrome P450 [Oryza sativa (japonica
  misc_feature (1)..(355): Homolog of NCBI NO: 14488355 NR Description: putative cytochrome P450 [Oryza sativa (japonica
  misc_feature (1)..(355): Homolog of NCBI NO: 14488373 NR Description: putative cytochrome P450 [Oryza sativa (japonica
  misc_feature (1)..(354): Homolog of NCBI NO: 14488358 NR Description: putative cytochrome P450 [Oryza sativa (japonica
  misc_feature (1)..(355): Homolog of NCBI NO: 3059131 NR Description: cytochrome P450 [Helianthus tuberosus]
  misc_feature (1)..(355): Homolog of NCBI NO: 7430635 NR Description: cytochrome P450 (EC 1.14.-.-) 81B1c - Jerusalem >gi|3059129|emb|CAA04116.1| cytochrome P450 [Helianthus
  misc_feature (1)..(355): Homolog of NCBI NO: 38344454 NR Description: OSJNBa0017P10.2 [Oryza sativa (japonica
MLRRVGRAAEAAGRVQLKASLFELSLSVLMETIAQTKTSRADDADDAVSPEAHEFRRIVDEILPYLGATNLWDYLPLLRRFDVLGVRNKIRDVVGRRDAFLQRLIDAERRRLDGDGDGDDGEKKSMIAVMLSLQKSEPDVYTDTMIMALCGNLFTAGTETTSSTIEWAMSLLLNHPDALKKAEAEIEAAVGASRLITMDDVPGLGYLQCVINETLRLYPVAPLLLPHESAADCTVGGYDVPRGTLLFVNAYAIHRDPAAWEEPDEFRPERFRDGKAEGRLMLPFGMGRRRCPGETLALRTAGLVLATLIQCFHWDRIDGAEIDMTESGGLTMPRAVPLEATCKPREAMRHVLQQL

SEQ ID NO: 7675 - protein, 326 aa, Zea mays subsp. mays
  peptide (1)..(326): Ceres Seq. ID no. 13498690
  misc_feature (1)..(326): Homolog of NCBI NO: 13661746 NR Description: putative cytochrome P450 [Lolium rigidum]
  misc_feature (1)..(326): Homolog of NCBI NO: 13661748 NR Description: putative cytochrome P450 [Lolium rigidum]
  misc_feature (1)..(326): Homolog of NCBI NO: 13661744 NR Description: putative cytochrome P450 [Lolium rigidum]
  misc_feature (1)..(326): Homolog of NCBI NO: 14488353 NR Description: putative cytochrome P450 [Oryza sativa (japonica
  misc_feature (1)..(326): Homolog of NCBI NO: 14488355 NR Description: putative cytochrome P450 [Oryza sativa (japonica
  misc_feature (1)..(326): Homolog of NCBI NO: 14488373 NR Description: putative cytochrome P450 [Oryza sativa (japonica
  misc_feature (1)..(325): Homolog of NCBI NO: 14488358 NR Description: putative cytochrome P450 [Oryza sativa (japonica
  misc_feature (1)..(326): Homolog of NCBI NO: 3059131 NR Description: cytochrome P450 [Helianthus tuberosus]
  misc_feature (1)..(326): Homolog of NCBI NO: 7430635 NR Description: cytochrome P450 (EC 1.14.-.-) 81B1c - Jerusalem >gi|3059129|emb|CAA04116.1| cytochrome P450 [Helianthus
  misc_feature (1)..(326): Homolog of NCBI NO: 38344454 NR Description: OSJNBa0017P10.2 [Oryza sativa (japonica
METIAQTKTSRADDADDAVSPEAHEFRRIVDEILPYLGATNLWDYLPLLRRFDVLGVRNKIRDVVGRRDAFLQRLIDAERRRLDGDGDGDDGEKKSMIAVMLSLQKSEPDVYTDTMIMALCGNLFTAGTETTSSTIEWAMSLLLNHPDALKKAEAEIEAAVGASRLITMDDVPGLGYLQCVINETLRLYPVAPLLLPHESAADCTVGGYDVPRGTLLFVNAYAIHRDPAAWEEPDEFRPERFRDGKAEGRLMLPFGMGRRRCPGETLALRTAGLVLATLIQCFHWDRIDGAEIDMTESGGLTMPRAVPLEATCKPREAMRHVLQQL

SEQ ID NO: 7676 - DNA, 936 bp, Zea mays subsp. mays; identical to SEQ ID NO: 2373
  misc_feature (1)..(936): Ceres Seq. ID no. 13564260
  misc_feature: MA Experiment ID: 108504 Result: Up-regulated in Transcription
  misc_feature: MA Experiment 108504 PARAMETER Experiment Name: Zm_Drought_P Parameter: Age (day) Value: 8
  misc_feature: MA Experiment 108504 PARAMETER Experiment Name: Zm_Drought_P Parameter: Organism Value: Zea mays
  misc_feature: MA Experiment 108504 PARAMETER Experiment Name: Zm_Drought_P Parameter: Plant Line Value: 35A19
  misc_feature: MA Experiment 108504 PARAMETER Experiment Name: Zm_Drought_P Parameter: Timepoint (hr) Value: 12
  misc_feature: MA Experiment 108504 PARAMETER Experiment Name: Zm_Drought_P Parameter: Tissue Value: Aerial
  misc_feature: MA Experiment 108504 PARAMETER Experiment Name: Zm_Drought_P Parameter: Treatment Value: Drought vs. No Drought
  misc_feature: MA Experiment ID: 108513 Result: Up-regulated in Transcription
  misc_feature: MA Experiment 108513 PARAMETER Experiment Name: Zm_100uM_ABA_P Parameter: Age (day) Value: 8
  misc_feature: MA Experiment 108513 PARAMETER Experiment Name: Zm_100uM_ABA_P Parameter: Organism Value: Zea mays
  misc_feature: MA Experiment 108513 PARAMETER Experiment Name: Zm_100uM_ABA_P Parameter: Plant Line Value: 35A19
  misc_feature: MA Experiment 108513 PARAMETER Experiment Name: Zm_100uM_ABA_P Parameter: Timepoint (hr) Value: 6
  misc_feature: MA Experiment 108513 PARAMETER Experiment Name: Zm_100uM_ABA_P Parameter: Tissue Value: Aerial
  misc_feature: MA Experiment 108513 PARAMETER Experiment Name: Zm_100uM_ABA_P Parameter: Treatment Value: 100uM ABA vs. No Treatment
  misc_feature: MA Experiment ID: 108523 Result: Up-regulated in Transcription
  misc_feature: MA Experiment 108523 PARAMETER Experiment Name: Zm_42deg_Heat_P Parameter: Age (day) Value: 8
  misc_feature: MA Experiment 108523 PARAMETER Experiment Name: Zm_42deg_Heat_P Parameter: Organism Value: Zea mays
  misc_feature: MA Experiment 108523 PARAMETER Experiment Name: Zm_42deg_Heat_P Parameter: Plant Line Value: 35A19
  misc_feature: MA Experiment 108523 PARAMETER Experiment Name: Zm_42deg_Heat_P Parameter: Temperature (deg C) Value: 42 vs. 22
  misc_feature: MA Experiment 108523 PARAMETER Experiment Name: Zm_42deg_Heat_P Parameter: Timepoint (hr) Value: 6
  misc_feature: MA Experiment 108523 PARAMETER Experiment Name: Zm_42deg_Heat_P Parameter: Tissue Value: Aerial
  misc_feature: MA Experiment ID: 108526 Result: Up-regulated in Transcription
  misc_feature: MA Experiment 108526 PARAMETER Experiment Name: Zm_5mM_NO_P Parameter: Age (day) Value: 8
  misc_feature: MA Experiment 108526 PARAMETER Experiment Name: Zm_5mM_NO_P Parameter: Organism Value: Zea mays
  misc_feature: MA Experiment 108526 PARAMETER Experiment Name: Zm_5mM_NO_P Parameter: Plant Line Value: 35A19
  misc_feature: MA Experiment 108526 PARAMETER Experiment Name: Zm_5mM_NO_P Parameter: Timepoint (hr) Value: 1
  misc_feature: MA Experiment 108526 PARAMETER Experiment Name: Zm_5mM_NO_P Parameter: Tissue Value: Aerial
  misc_feature: MA Experiment 108526 PARAMETER Experiment Name: Zm_5mM_NO_P Parameter: Treatment Value: 5mM NO vs. No Treatment
  misc_feature: MA Experiment ID: 108527 Result: Up-regulated in Transcription
  misc_feature: MA Experiment 108527 PARAMETER Experiment Name: Zm_5mM_NO_P Parameter: Age (day) Value: 8
  misc_feature: MA Experiment 108527 PARAMETER Experiment Name: Zm_5mM_NO_P Parameter: Organism Value: Zea mays
  misc_feature: MA Experiment 108527 PARAMETER Experiment Name: Zm_5mM_NO_P Parameter: Plant Line Value: 35A19
  misc_feature: MA Experiment 108527 PARAMETER Experiment Name: Zm_5mM_NO_P Parameter: Timepoint (hr) Value: 6
  misc_feature: MA Experiment 108527 PARAMETER Experiment Name: Zm_5mM_NO_P Parameter: Tissue Value: Aerial
  misc_feature: MA Experiment 108527 PARAMETER Experiment Name: Zm_5mM_NO_P Parameter: Treatment Value: 5mM NO vs. No Treatment
  misc_feature: MA Experiment ID: 108530 Result: Down-regulated in Transcription
  misc_feature: MA Experiment 108530 PARAMETER Experiment Name: Zm_Imbibed_Seeds_P Parameter: Age (day) Value: 6 vs. 2
  misc_feature: MA Experiment 108530 PARAMETER Experiment Name: Zm_Imbibed_Seeds_P Parameter: Organism Value: Zea mays
  misc_feature: MA Experiment 108530 PARAMETER Experiment Name: Zm_Imbibed_Seeds_P Parameter: Plant Line Value: 35A19
  misc_feature: MA Experiment 108530 PARAMETER Experiment Name: Zm_Imbibed_Seeds_P Parameter: Tissue Value: Aerial vs. Embryo
  misc_feature: MA Experiment ID: 108536 Result: Up-regulated in Transcription
  misc_feature: MA Experiment 108536 PARAMETER Experiment Name: Zm_Meristem_P Parameter: Age (day) Value: 8
  misc_feature: MA Experiment 108536 PARAMETER Experiment Name: Zm_Meristem_P Parameter: Organism Value: Zea mays
  misc_feature: MA Experiment 108536 PARAMETER Experiment Name: Zm_Meristem_P Parameter: Plant Line Value: 35A19
  misc_feature: MA Experiment 108536 PARAMETER Experiment Name: Zm_Meristem_P Parameter: Tissue Value: Shoot Meristem vs. Above Shoot Meristem
  misc_feature: MA Experiment ID: 108540 Result: Up-regulated in Transcription
  misc_feature: MA Experiment 108540 PARAMETER Experiment Name: Zm_20percent_PEG_P Parameter: Age (day) Value: 8
  misc_feature: MA Experiment 108540 PARAMETER Experiment Name: Zm_20percent_PEG_P Parameter: Organism Value: Zea mays
  misc_feature: MA Experiment 108540 PARAMETER Experiment Name: Zm_20percent_PEG_P Parameter: Plant Line Value: 35A19
  misc_feature: MA Experiment 108540 PARAMETER Experiment Name: Zm_20percent_PEG_P Parameter: Timepoint (hr) Value: 6
  misc_feature: MA Experiment 108540 PARAMETER Experiment Name: Zm_20percent_PEG_P Parameter: Tissue Value: Aerial
  misc_feature: MA Experiment 108540 PARAMETER Experiment Name: Zm_20percent_PEG_P Parameter: Treatment Value: 20percent PEG vs. No Treatment
  misc_feature: MA Experiment ID: 108556 Result: Up-regulated in Transcription
  misc_feature: MA Experiment 108556 PARAMETER Experiment Name: Zm_Drought_P Parameter: Age (day) Value: 9
  misc_feature: MA Experiment 108556 PARAMETER Experiment Name: Zm_Drought_P Parameter: Organism Value: Zea mays
  misc_feature: MA Experiment 108556 PARAMETER Experiment Name: Zm_Drought_P Parameter: Plant Line Value: 35A19
  misc_feature: MA Experiment 108556 PARAMETER Experiment Name: Zm_Drought_P Parameter: Timepoint (hr) Value: 24
  misc_feature: MA Experiment 108556 PARAMETER Experiment Name: Zm_Drought_P Parameter: Tissue Value: Aerial
  misc_feature: MA Experiment 108556 PARAMETER Experiment Name: Zm_Drought_P Parameter: Treatment Value: Drought vs. No Drought
  misc_feature: MA Experiment ID: 108559 Result: Up-regulated in Transcription
  misc_feature: MA Experiment 108559 PARAMETER Experiment Name: Zm_5mM_NO_P Parameter: Age (day) Value: 8
  misc_feature: MA Experiment 108559 PARAMETER Experiment Name: Zm_5mM_NO_P Parameter: Organism Value: Zea mays
  misc_feature: MA Experiment 108559 PARAMETER Experiment Name: Zm_5mM_NO_P Parameter: Plant Line Value: 35A19
  misc_feature: MA Experiment 108559 PARAMETER Experiment Name: Zm_5mM_NO_P Parameter: Timepoint (hr) Value: 12
  misc_feature: MA Experiment 108559 PARAMETER Experiment Name: Zm_5mM_NO_P Parameter: Tissue Value: Aerial
  misc_feature: MA Experiment 108559 PARAMETER Experiment Name: Zm_5mM_NO_P Parameter: Treatment Value: 5mM NO vs. No Treatment
  misc_feature: MA Experiment ID: 108597 Result: Up-regulated in Transcription
  misc_feature: MA Experiment 108597 PARAMETER Experiment Name: Zm_100uM_ABA_P Parameter: Age (day) Value: 9
  misc_feature: MA Experiment 108597 PARAMETER Experiment Name: Zm_100uM_ABA_P Parameter: Organism Value: Zea mays
  misc_feature: MA Experiment 108597 PARAMETER Experiment Name: Zm_100uM_ABA_P Parameter: Plant Line Value: 35A19
  misc_feature: MA Experiment 108597 PARAMETER Experiment Name: Zm_100uM_ABA_P Parameter: Timepoint (hr) Value: 24
  misc_feature: MA Experiment 108597 PARAMETER Experiment Name: Zm_100uM_ABA_P Parameter: Tissue Value: Aerial
  misc_feature: MA Experiment 108597 PARAMETER Experiment Name: Zm_100uM_ABA_P Parameter: Treatment Value: 100uM ABA vs. No Treatment
  misc_feature: MA Experiment ID: 20000479 Result: Up-regulated in Transcription
  misc_feature: MA Experiment 20000479 PARAMETER Experiment Name: Zm_Drought_P Parameter: Age (day) Value: 10
  misc_feature: MA Experiment 20000479 PARAMETER Experiment Name: Zm_Drought_P Parameter: Organism Value: Zea mays
  misc_feature: MA Experiment 20000479 PARAMETER Experiment Name: Zm_Drought_P Parameter: Plant Line Value: 35A19
  misc_feature: MA Experiment 20000479 PARAMETER Experiment Name: Zm_Drought_P Parameter: Timepoint (hr) Value: 48
  misc_feature: MA Experiment 20000479 PARAMETER Experiment Name: Zm_Drought_P Parameter: Tissue Value: Aerial
  misc_feature: MA Experiment 20000479 PARAMETER Experiment Name: Zm_Drought_P Parameter: Treatment Value: Drought vs. No Drought
  misc_feature: MA Experiment ID: 20000480 Result: Up-regulated in Transcription
  misc_feature: MA Experiment 20000480 PARAMETER Experiment Name: Zm_Drought_P Parameter: Age (day) Value: 11
  misc_feature: MA Experiment 20000480 PARAMETER Experiment Name: Zm_Drought_P Parameter: Organism Value: Zea mays
  misc_feature: MA Experiment 20000480 PARAMETER Experiment Name: Zm_Drought_P Parameter: Plant Line Value: 35A19
  misc_feature: MA Experiment 20000480 PARAMETER Experiment Name: Zm_Drought_P Parameter: Timepoint (hr) Value: 72
  misc_feature: MA Experiment 20000480 PARAMETER Experiment Name: Zm_Drought_P Parameter: Tissue Value: Aerial
  misc_feature: MA Experiment 20000480 PARAMETER Experiment Name: Zm_Drought_P Parameter: Treatment Value: Drought vs. No Drought
  misc_feature: MA Experiment ID: 20000534 Result: Down-regulated in Transcription
  misc_feature: MA Experiment 20000534 PARAMETER Experiment Name: Zm_Hybrid_Pollen_P Parameter: Age (day) Value: 8
  misc_feature: MA Experiment 20000534 PARAMETER Experiment Name: Zm_Hybrid_Pollen_P Parameter: Organism Value: Zea mays
  misc_feature: MA Experiment 20000534 PARAMETER Experiment Name: Zm_Hybrid_Pollen_P Parameter: Plant Line Value: 35A19
  misc_feature: MA Experiment 20000534 PARAMETER Experiment Name: Zm_Hybrid_Pollen_P Parameter: Tissue Value: Pollen vs. Aerial
  misc_feature: MA Experiment ID: 20000535 Result: Up-regulated in Transcription
  misc_feature: MA Experiment 20000535 PARAMETER Experiment Name: Zm_Hybrid_Seed_Dev_P Parameter: DAP Value: 30 vs. 12
  misc_feature: MA Experiment 20000535 PARAMETER Experiment Name: Zm_Hybrid_Seed_Dev_P Parameter: Organism Value: Zea mays
  misc_feature: MA Experiment 20000535 PARAMETER Experiment Name: Zm_Hybrid_Seed_Dev_P Parameter: Plant Line Value: 35A19
  misc_feature: MA Experiment 20000535 PARAMETER Experiment Name: Zm_Hybrid_Seed_Dev_P Parameter: Tissue Value: Embryo vs. Unfert Floret
  misc_feature: MA Experiment ID: 20000627 Result: Down-regulated in Transcription
  misc_feature: MA Experiment 20000627 PARAMETER Experiment Name: Zm_Herbicide-Treatments_P Parameter: Timepoint (hr) Value: 12
  misc_feature: MA Experiment 20000627 PARAMETER Experiment Name: Zm_Herbicide-Treatments_P Parameter: Tissue Value: Aerial
  misc_feature: MA Experiment 20000627 PARAMETER Experiment Name: Zm_Herbicide-Treatments_P Parameter: Treatment Value: Finale vs. No Treatment
  misc_feature: MA Experiment ID: 20000629 Result: Down-regulated in Transcription
  misc_feature: MA Experiment 20000629 PARAMETER Experiment Name: Zm_Herbicide-Treatments_P Parameter: Timepoint (hr) Value: 12
  misc_feature: MA Experiment 20000629 PARAMETER Experiment Name: Zm_Herbicide-Treatments_P Parameter: Tissue Value: Aerial
  misc_feature: MA Experiment 20000629 PARAMETER Experiment Name: Zm_Herbicide-Treatments_P Parameter: Treatment Value: Trimec vs. No Treatment
  misc_feature: MA Experiment ID: 20000632 Result: Down-regulated in Transcription
  misc_feature: MA Experiment 20000632 PARAMETER Experiment Name: Zm_Herbicide-Treatments_P Parameter: Timepoint (hr) Value: 4
  misc_feature: MA Experiment 20000632 PARAMETER Experiment Name: Zm_Herbicide-Treatments_P Parameter: Tissue Value: Aerial
  misc_feature: MA Experiment 20000632 PARAMETER Experiment Name: Zm_Herbicide-Treatments_P Parameter: Treatment Value: Glean vs. No Treatment
  misc_feature: MA Experiment ID: 20000633 Result: Down-regulated in Transcription
  misc_feature: MA Experiment 20000633 PARAMETER Experiment Name: Zm_Herbicide-Treatments_P Parameter: Timepoint (hr) Value: 4
  misc_feature: MA Experiment 20000633 PARAMETER Experiment Name: Zm_Herbicide-Treatments_P Parameter: Tissue Value: Aerial
  misc_feature: MA Experiment 20000633 PARAMETER Experiment Name: Zm_Herbicide-Treatments_P Parameter: Treatment Value: Trimec vs. No Treatment
  misc_feature: MA Experiment ID: 20001608 Result: Up-regulated in Transcription
  misc_feature: MA Experiment 20001608 PARAMETER Experiment Name: Zm_50ppm_KNO3_L-to-H_P Parameter: Age (day) Value: 21
  misc_feature: MA Experiment 20001608 PARAMETER Experiment Name: Zm_50ppm_KNO3_L-to-H_P Parameter: Organism Value: Zea mays
  misc_feature: MA Experiment 20001608 PARAMETER Experiment Name: Zm_50ppm_KNO3_L-to-H_P Parameter: Plant Line Value: 35A19
  misc_feature: MA Experiment 20001608 PARAMETER Experiment Name: Zm_50ppm_KNO3_L-to-H_P Parameter: Timepoint (hr) Value: 48
  misc_feature: MA Experiment 20001608 PARAMETER Experiment Name: Zm_50ppm_KNO3_L-to-H_P Parameter: Tissue Value: Shoots
  misc_feature: MA Experiment 20001608 PARAMETER Experiment Name: Zm_50ppm_KNO3_L-to-H_P Parameter: Treatment Value: 50ppm KNO3 vs. 50ppm KCl

SEQ ID NO: 7677 - protein, 212 aa, Zea mays subsp. mays; identical to SEQ ID NO: 2374
  peptide (1)..(212): Ceres Seq. ID no. 13564261
  misc_feature (51)..(87): Pfam Name: QXW lectin repeat Pfam Description: QXW lectin repeat
  misc_feature (27)..(111): Homolog of NCBI NO: 7489571 NR Description: r40c1 protein - rice >gi|1296955|emb|CAA64683.1|
  misc_feature (27)..(111): Homolog of NCBI NO: 34902150 NR Description: Putative r40c1 protein - rice [Oryza sativa
  misc_feature (27)..(111): Homolog of NCBI NO: 7489572 NR Description: r40g2 protein - rice (fragment)
  misc_feature (27)..(111): Homolog of NCBI NO: 34394517 NR Description: r40g2 protein [Oryza sativa (japonica
  misc_feature (48)..(111): Homolog of NCBI NO: 7489573 NR Description: r40g3 protein - rice >gi|1658315|emb|CAA70175.1|
  misc_feature (44)..(111): Homolog of NCBI NO: 34394517 NR Description: r40g2 protein [Oryza sativa (japonica
  misc_feature (44)..(111): Homolog of NCBI NO: 34394518 NR Description: putative r40c2 protein [Oryza sativa (japonica
  misc_feature (44)..(111): Homolog of NCBI NO: 7489572 NR Description: r40g2 protein - rice (fragment)
  misc_feature (41)..(111): Homolog of NCBI NO: 34894060 NR Description: putative r40c1 protein [Oryza sativa (japonica group)] >gi|10697200|dbj|BAB16331.1| putative r40c1 protein
  misc_feature (88)..(111): Homolog of NCBI NO: 34394518 NR Description: putative r40c2 protein [Oryza sativa (japonica

SEQ ID NO: 7678 - protein, 186 aa, Zea mays subsp. mays; identical to SEQ ID NO: 2375
  peptide (1)..(186): Ceres Seq. ID no. 13564262
  misc_feature (25)..(61): Pfam Name: QXW lectin repeat Pfam Description: QXW lectin repeat
  misc_feature (1)..(85): Homolog of NCBI NO: 7489571 NR Description: r40c1 protein - rice >gi|1296955|emb|CAA64683.1|
  misc_feature (1)..(85): Homolog of NCBI NO: 34902150 NR Description: Putative r40c1 protein - rice [Oryza sativa
  misc_feature (1)..(85): Homolog of NCBI NO: 7489572 NR Description: r40g2 protein - rice (fragment)
  misc_feature (1)..(85): Homolog of NCBI NO: 34394517 NR Description: r40g2 protein [Oryza sativa (japonica
  misc_feature (22)..(85): Homolog of NCBI NO: 7489573 NR Description: r40g3 protein - rice >gi|1658315|emb|CAA70175.1|
  misc_feature (18)..(85): Homolog of NCBI NO: 34394517 NR Description: r40g2 protein [Oryza sativa (japonica
  misc_feature (18)..(85): Homolog of NCBI NO: 34394518 NR Description: putative r40c2 protein [Oryza sativa (japonica
  misc_feature (18)..(85): Homolog of NCBI NO: 7489572 NR Description: r40g2 protein - rice (fragment)
  misc_feature (15)..(85): Homolog of NCBI NO: 34894060 NR Description: putative r40c1 protein [Oryza sativa (japonica group)] >gi|10697200|dbj|BAB16331.1| putative r40c1 protein
  misc_feature (62)..(85): Homolog of NCBI NO: 34394518 NR Description: putative r40c2 protein [Oryza sativa (japonica

SEQ ID NO: 7679 - protein, 125 aa, Zea mays subsp. mays; identical to SEQ ID NO: 2376
  peptide (1)..(125): Ceres Seq. ID no. 13564263
  misc_feature (1)..(24): Homolog of NCBI NO: 7489571 NR Description: r40c1 protein - rice >gi|1296955|emb|CAA64683.1|
  misc_feature (1)..(24): Homolog of NCBI NO: 34902150 NR Description: Putative r40c1 protein - rice [Oryza sativa
  misc_feature (1)..(24): Homolog of NCBI NO: 7489572 NR Description: r40g2 protein - rice (fragment)
  misc_feature (1)..(24): Homolog of NCBI NO: 34394517 NR Description: r40g2 protein [Oryza sativa (japonica
  misc_feature (1)..(24): Homolog of NCBI NO: 7489573 NR Description: r40g3 protein - rice >gi|1658315|emb|CAA70175.1|
  misc_feature (1)..(24): Homolog of NCBI NO: 34394517 NR Description: r40g2 protein [Oryza sativa (japonica
  misc_feature (1)..(24): Homolog of NCBI NO: 34394518 NR Description: putative r40c2 protein [Oryza sativa (japonica
  misc_feature (1)..(24): Homolog of NCBI NO: 7489572 NR Description: r40g2 protein - rice (fragment)
  misc_feature (1)..(24): Homolog of NCBI NO: 34894060 NR Description: putative r40c1 protein [Oryza sativa (japonica group)] >gi|10697200|dbj|BAB16331.1| putative r40c1 protein
  misc_feature (1)..(24): Homolog of NCBI NO: 34394518 NR Description: putative r40c2 protein [Oryza sativa (japonica

SEQ ID NO: 7680 - DNA, 1417 bp, Zea mays subsp. mays
  misc_feature (1)..(1417): Ceres Seq. ID no. 12408649
  misc_feature: MA Experiment ID: 108527 Result: Up-regulated in Transcription
  misc_feature: MA Experiment 108527 PARAMETER Experiment Name: Zm_5mM_NO_P Parameter: Age (day) Value: 8
  misc_feature: MA Experiment 108527 PARAMETER Experiment Name: Zm_5mM_NO_P Parameter: Organism Value: Zea mays
  misc_feature: MA Experiment 108527 PARAMETER Experiment Name: Zm_5mM_NO_P Parameter: Plant Line Value: 35A19
  misc_feature: MA Experiment 108527 PARAMETER Experiment Name: Zm_5mM_NO_P Parameter: Timepoint (hr) Value: 6
  misc_feature: MA Experiment 108527 PARAMETER Experiment Name: Zm_5mM_NO_P Parameter: Tissue Value: Aerial
  misc_feature: MA Experiment 108527 PARAMETER Experiment Name: Zm_5mM_NO_P Parameter: Treatment Value: 5mM NO vs. No Treatment
  misc_feature: MA Experiment ID: 108529 Result: Up-regulated in Transcription
  misc_feature: MA Experiment 108529 PARAMETER Experiment Name: Zm_Imbibed_Seeds_P Parameter: Age (day) Value: 5 vs. 2
  misc_feature: MA Experiment 108529 PARAMETER Experiment Name: Zm_Imbibed_Seeds_P Parameter: Organism Value: Zea mays
  misc_feature: MA Experiment 108529 PARAMETER Experiment Name: Zm_Imbibed_Seeds_P Parameter: Plant Line Value: 35A19
  misc_feature: MA Experiment 108529 PARAMETER Experiment Name: Zm_Imbibed_Seeds_P Parameter: Tissue Value: Roots vs. Embryo
  misc_feature: MA Experiment ID: 108535 Result: Down-regulated in Transcription
  misc_feature: MA Experiment 108535 PARAMETER Experiment Name: Zm_Meristem_P Parameter: Age (day) Value: 8
  misc_feature: MA Experiment 108535 PARAMETER Experiment Name: Zm_Meristem_P Parameter: Organism Value: Zea mays
  misc_feature: MA Experiment 108535 PARAMETER Experiment Name: Zm_Meristem_P Parameter: Plant Line Value: 35A19
  misc_feature: MA Experiment 108535 PARAMETER Experiment Name: Zm_Meristem_P Parameter: Tissue Value: Root Meristem vs. Above Root Meristem
  misc_feature: MA Experiment ID: 108559 Result: Up-regulated in Transcription
  misc_feature: MA Experiment 108559 PARAMETER Experiment Name: Zm_5mM_NO_P Parameter: Age (day) Value: 8
  misc_feature: MA Experiment 108559 PARAMETER Experiment Name: Zm_5mM_NO_P Parameter: Organism Value: Zea mays
  misc_feature: MA Experiment 108559 PARAMETER Experiment Name: Zm_5mM_NO_P Parameter: Plant Line Value: 35A19
  misc_feature: MA Experiment 108559 PARAMETER Experiment Name: Zm_5mM_NO_P Parameter: Timepoint (hr) Value: 12
  misc_feature: MA Experiment 108559 PARAMETER Experiment Name: Zm_5mM_NO_P Parameter: Tissue Value: Aerial
  misc_feature: MA Experiment 108559 PARAMETER Experiment Name: Zm_5mM_NO_P Parameter: Treatment Value: 5mM NO vs. No Treatment
  misc_feature: MA Experiment ID: 108688 Result: Down-regulated in Transcription
  misc_feature: MA Experiment 108688 PARAMETER Experiment Name: Zm_Embryos-Flowers__P Parameter: Tissue Value: Immature Flowers vs. Aerial+
  misc_feature: MA Experiment ID: 20000478 Result: Up-regulated in Transcription
  misc_feature: MA Experiment 20000478 PARAMETER Experiment Name: Zm_5mM_SA_P Parameter: Age (day) Value: 11
  misc_feature: MA Experiment 20000478 PARAMETER Experiment Name: Zm_5mM_SA_P Parameter: Organism Value: Zea mays
  misc_feature: MA Experiment 20000478 PARAMETER Experiment Name: Zm_5mM_SA_P Parameter: Plant Line Value: 35A19
  misc_feature: MA Experiment 20000478 PARAMETER Experiment Name: Zm_5mM_SA_P Parameter: Timepoint (hr) Value: 72
  misc_feature: MA Experiment 20000478 PARAMETER Experiment Name: Zm_5mM_SA_P Parameter: Tissue Value: Aerial
  misc_feature: MA Experiment 20000478 PARAMETER Experiment Name: Zm_5mM_SA_P Parameter: Treatment Value: 5mM SA vs. No Treatment
  misc_feature: MA Experiment ID: 20000488 Result: Down-regulated in Transcription
  misc_feature: MA Experiment 20000488 PARAMETER Experiment Name: Zm_50mM_NH4NO3_L_to_H_P Parameter: Organism Value: Zea mays
  misc_feature: MA Experiment 20000488 PARAMETER Experiment Name: Zm_50mM_NH4NO3_L_to_H_P Parameter: Timepoint (hr) Value: 8
  misc_feature: MA Experiment 20000488 PARAMETER Experiment Name: Zm_50mM_NH4NO3_L_to_H_P Parameter: Tissue Value: Leaves
  misc_feature: MA Experiment 20000488 PARAMETER Experiment Name: Zm_50mM_NH4NO3_L_to_H_P Parameter: Treatment Value: 50mM NH4NO3 vs. 100mM Mannitol
  misc_feature: MA Experiment ID: 20000492 Result: Down-regulated in Transcription
  misc_feature: MA Experiment 20000492 PARAMETER Experiment Name: Zm_Hybrid_Seed_Dev_P Parameter: DAP Value: 12
  misc_feature: MA Experiment 20000492 PARAMETER Experiment Name: Zm_Hybrid_Seed_Dev_P Parameter: Organism Value: Zea mays
  misc_feature: MA Experiment 20000492 PARAMETER Experiment Name: Zm_Hybrid_Seed_Dev_P Parameter: Plant Line Value: 35A19
  misc_feature: MA Experiment 20000492 PARAMETER Experiment Name: Zm_Hybrid_Seed_Dev_P Parameter: Tissue Value: Fert Kernel vs. Unfert Floret
  misc_feature: MA Experiment ID: 20000535 Result: Down-regulated in Transcription
  misc_feature: MA Experiment 20000535 PARAMETER Experiment Name: Zm_Hybrid_Seed_Dev_P Parameter: DAP Value: 30 vs. 12
  misc_feature: MA Experiment 20000535 PARAMETER Experiment Name: Zm_Hybrid_Seed_Dev_P Parameter: Organism Value: Zea mays
  misc_feature: MA Experiment 20000535 PARAMETER Experiment Name: Zm_Hybrid_Seed_Dev_P Parameter: Plant Line Value: 35A19
  misc_feature: MA Experiment 20000535 PARAMETER Experiment Name: Zm_Hybrid_Seed_Dev_P Parameter: Tissue Value: Embryo vs. Unfert Floret
aggtgacaaatccacgcggagtccgctgaaattttggtcgccccatgcccgttctagacgccatggacgatgcggcggcggcggcggtagataggcacggcggcttctagaccgtctccgttttctgcgcgttggccgtcgggggaagtacacaataaacaaagcaagagcagaggtgcaactgggctgctgtgtcctctgcctcttctccttcctgtcgttctgcgctgccccgacccccgagtgcccctggtcttgtcctcctctccctgctgacctcggagcggagcggagcaagcagccgccaggagggaaggatccatggccgggagatcgcggtacgacaaccccttcgaggagggcggcgccgacgaggtcaaccctttcgcggaccaagctaagagaggaggatcgagtgctcagtccggctactctggtggcgcgttctacacgacgcaatcgcaacgccctgctcctcctagcacacgcctttcgcctcttcctcctgaacctgccgacttctacaacgacttcgctaccccggtggatatccccatggacacaaacaaggacatgaagacaagggagaaggagcttctggccaaggaggccgagctgaacaggcgtgagaaggaaataaaaaggcgagaagatgctgcggcacgagctggtgtcgtgttggaagagaagaactggcccccgtttttccccatcattcataacgatatcggcaacgagatacctgtccatctgcaaagaacgctgtacgtcgcgttcgcgtcgctcttagggttggtcttgtgcctgttttggaacataatctgcgttaccgctgcctgggcaaaagggtcaggtccaaagatatggtttctcgcaatcatatacttcatcctcggatgccccggtgcatactacctttggtaccggccactataccgcgcaatgaggaacgagagcgctctcaagttcggatggtttttcctcttctacttggttcatatcgccttctgcgcgtacgcagctgtttctccttcaattctcttcgtgggaaaatcgttaaccgggattttgccagcaatcaacttgataggcgacagcgtcattgttgggatcttctacttcattggctttgcattgttctgcctggaggctttgctaagcgtgtgggtcattcagcgcgtctacctgtacttccgagggagcgggaaagaagcggagatgaggcgtgaagcagcacgcggtgcagcgagggcagcgttttgatgaaagccgtatatagatgatatattatatatataggcacgacatacatacactgttcataatagtttgaagtgttttaggtcaacaggcatgtgtgtacagtagggttggcgtcctgtattacttctagttaaaagacgcaaggttttgagtc

SEQ ID NO: 7681 - protein, 313 aa, Zea mays subsp. mays
  peptide (1)..(313): Ceres Seq. ID no. 12408650
  misc_feature (121)..(295): Pfam Name: SCAMP family Pfam Description: SCAMP family
  misc_feature (1)..(313): Homolog of NCBI NO: 34899754 NR Description: putative secretory carrier membrane protein
  misc_feature (50)..(313): Homolog of NCBI NO: 7109232 NR Description: secretory carrier membrane protein [Oryza sativa]
  misc_feature (49)..(312): Homolog of NCBI NO: 15219893 NR Description: secretory carrier membrane protein; protein id: supported by cDNA: 27197., supported by cDNA: gi_15027862, by cDNA: gi_19310672, supported by cDNA: gi_7109227 [Arabidopsis
  misc_feature (50)..(312): Homolog of NCBI NO: 15226410 NR Description: putative secretory carrier-associated membrane protein id: At2g20840.1 [Arabidopsis thaliana]
  misc_feature (54)..(312): Homolog of NCBI NO: 3941289 NR Description: similarity to SCAMP37 [Pisum sativum]
  misc_feature (50)..(312): Homolog of NCBI NO: 15220305 NR Description: secretory carrier membrane protein, putative;
  misc_feature (52)..(312): Homolog of NCBI NO: 18379111 NR Description: expressed protein; protein id: At1g03550.1, by cDNA: 30006. [Arabidopsis thaliana] F21B7.17 [Arabidopsis thaliana] >gi|21592580|gb|AAM64529.1|
  misc_feature (59)..(294): Homolog of NCBI NO: 15222550 NR Description: secretory carrier membrane protein, putative; id: At1g32050.1, supported by cDNA: 34837. [Arabidopsis thaliana]
  misc_feature (50)..(312): Homolog of NCBI NO: 25402653 NR Description: hypothetical protein [imported] - Arabidopsis >gi|5734732|gb|AAD49997.1|AC007259_10 Hypothetical protein
  misc_feature (61)..(294): Homolog of NCBI NO: 38347080 NR Description: OSJNBa0006A01.21 [Oryza sativa (japonica
MAGRSRYDNPFEEGGADEVNPFADQAKRGGSSAQSGYSGGAFYTTQSQRPAPPSTRLSPLPPEPADFYNDFATPVDIPMDTNKDMKTREKELLAKEAELNRREKEIKRREDAAARAGVVLEEKNWPPFFPIIHNDIGNEIPVHLQRTLYVAFASLLGLVLCLFWNIICVTAAWAKGSGPKIWFLAIIYFILGCPGAYYLWYRPLYRAMRNESALKFGWFFLFYLVHIAFCAYAAVSPSILFVGKSLTGILPAINLIGDSVIVGIFYFIGFALFCLEALLSVWVIQRVYLYFRGSGKEAEMRREAARGAARAAF

SEQ ID NO: 7682 - protein, 235 aa, Zea mays subsp. mays
  peptide (1)..(235): Ceres Seq. ID no. 12408651
  misc_feature (43)..(217): Pfam Name: SCAMP family Pfam Description: SCAMP family
  misc_feature (1)..(216): Homolog of NCBI NO: 15222550 NR Description: secretory carrier membrane protein, putative; id: At1g32050.1, supported by cDNA: 34837. [Arabidopsis thaliana]
  misc_feature (1)..(234): Homolog of NCBI NO: 25402653 NR Description: hypothetical protein [imported] - Arabidopsis >gi|5734732|gb|AAD49997.1|AC007259_10 Hypothetical protein
  misc_feature (1)..(235): Homolog of NCBI NO: 7109232 NR Description: secretory carrier membrane protein [Oryza sativa]
  misc_feature (1)..(234): Homolog of NCBI NO: 15226410 NR Description: putative secretory carrier-associated membrane protein id: At2g20840.1 [Arabidopsis thaliana]
  misc_feature (1)..(234): Homolog of NCBI NO: 15220305 NR Description: secretory carrier membrane protein, putative;
  misc_feature (1)..(234): Homolog of NCBI NO: 18379111 NR Description: expressed protein; protein id: At1g03550.1, by cDNA: 30006. [Arabidopsis thaliana] F21B7.17 [Arabidopsis thaliana] >gi|21592580|gb|AAM64529.1|
  misc_feature (1)..(234): Homolog of NCBI NO: 3941289 NR Description: similarity to SCAMP37 [Pisum sativum]
  misc_feature (1)..(234): Homolog of NCBI NO: 15219893 NR Description: secretory carrier membrane protein; protein id: supported by cDNA: 27197., supported by cDNA: gi_15027862, by cDNA: gi_19310672, supported by cDNA: gi_7109227 [Arabidopsis
  misc_feature (1)..(235): Homolog of NCBI NO: 34899754 NR Description: putative secretory carrier membrane protein
  misc_feature (1)..(216): Homolog of NCBI NO: 38347080 NR Description: OSJNBa0006A01.21 [Oryza sativa (japonica
MDTNKDMKTREKELLAKEAELNRREKEIKRREDAAARAGVVLEEKNWPPFFPIIHNDIGNEIPVHLQRTLYVAFASLLGLVLCLFWNIICVTAAWAKGSGPKIWFLAIIYFILGCPGAYYLWYRPLYRAMRNESALKFGWFFLFYLVHIAFCAYAAVSPSILFVGKSLTGILPAINLIGDSVIVGIFYFIGFALFCLEALLSVWVIQRVYLYFRGSGKEAEMRREAARGAARAAF

SEQ ID NO: 7683 - protein, 229 aa, Zea mays subsp. mays
  peptide (1)..(229): Ceres Seq. ID no. 12408652
  misc_feature (37)..(211): Pfam Name: SCAMP family Pfam Description: SCAMP family
  misc_feature (1)..(229): Homolog of NCBI NO: 34899754 NR Description: putative secretory carrier membrane protein
  misc_feature (1)..(229): Homolog of NCBI NO: 7109232 NR Description: secretory carrier membrane protein [Oryza sativa]
  misc_feature (1)..(228): Homolog of NCBI NO: 15219893 NR Description: secretory carrier membrane protein; protein id: supported by cDNA: 27197., supported by cDNA: gi_15027862, by cDNA: gi_19310672, supported by cDNA: gi_7109227 [Arabidopsis
  misc_feature (1)..(228): Homolog of NCBI NO: 15226410 NR Description: putative secretory carrier-associated membrane protein id: At2g20840.1 [Arabidopsis thaliana]
  misc_feature (1)..(228): Homolog of NCBI NO: 3941289 NR Description: similarity to SCAMP37 [Pisum sativum]
  misc_feature (1)..(228): Homolog of NCBI NO: 15220305 NR Description: secretory carrier membrane protein, putative;
  misc_feature (1)..(228): Homolog of NCBI NO: 18379111 NR Description: expressed protein; protein id: At1g03550.1, by cDNA: 30006. [Arabidopsis thaliana] F21B7.17 [Arabidopsis thaliana] >gi|21592580|gb|AAM64529.1|
  misc_feature (1)..(210): Homolog of NCBI NO: 15222550 NR Description: secretory carrier membrane protein, putative; id: At1g32050.1, supported by cDNA: 34837. [Arabidopsis thaliana]
  misc_feature (1)..(228): Homolog of NCBI NO: 25402653 NR Description: hypothetical protein [imported] - Arabidopsis >gi|5734732|gb|AAD49997.1|AC007259_10 Hypothetical protein
  misc_feature (1)..(210): Homolog of NCBI NO: 38347080 NR Description: OSJNBa0006A01.21 [Oryza sativa (japonica
MKTREKELLAKEAELNRREKEIKRREDAAARAGVVLEEKNWPPFFPIIHNDIGNEIPVHLQRTLYVAFASLLGLVLCLFWNIICVTAAWAKGSGPKIWFLAIIYFILGCPGAYYLWYRPLYRAMRNESALKFGWFFLFYLVHIAFCAYAAVSPSILFVGKSLTGILPAINLIGDSVIVGIFYFIGFALFCLEALLSVWVIQRVYLYFRGSGKEAEMRREAARGAARAAF

SEQ ID NO: 7684 - DNA, 1629 bp, Zea mays subsp. mays
  misc_feature (1)..(1629): Ceres Seq. ID no. 12408645
  misc_feature: MA Experiment ID: 20000478 Result: Down-regulated in Transcription
  misc_feature: MA Experiment 20000478 PARAMETER Experiment Name: Zm_5mM_SA_P Parameter: Age (day) Value: 11
  misc_feature: MA Experiment 20000478 PARAMETER Experiment Name: Zm_5mM_SA_P Parameter: Organism Value: Zea mays
  misc_feature: MA Experiment 20000478 PARAMETER Experiment Name: Zm_5mM_SA_P Parameter: Plant Line Value: 35A19
  misc_feature: MA Experiment 20000478 PARAMETER Experiment Name: Zm_5mM_SA_P Parameter: Timepoint (hr) Value: 72
  misc_feature: MA Experiment 20000478 PARAMETER Experiment Name: Zm_5mM_SA_P Parameter: Tissue Value: Aerial
  misc_feature: MA Experiment 20000478 PARAMETER Experiment Name: Zm_5mM_SA_P Parameter: Treatment Value: 5mM SA vs. No Treatment
  misc_feature: MA Experiment ID: 20000479 Result: Down-regulated in Transcription
  misc_feature: MA Experiment 20000479 PARAMETER Experiment Name: Zm_Drought_P Parameter: Age (day) Value: 10
  misc_feature: MA Experiment 20000479 PARAMETER Experiment Name: Zm_Drought_P Parameter: Organism Value: Zea mays
  misc_feature: MA Experiment 20000479 PARAMETER Experiment Name: Zm_Drought_P Parameter: Plant Line Value: 35A19
  misc_feature: MA Experiment 20000479 PARAMETER Experiment Name: Zm_Drought_P Parameter: Timepoint (hr) Value: 48
  misc_feature: MA Experiment 20000479 PARAMETER Experiment Name: Zm_Drought_P Parameter: Tissue Value: Aerial
  misc_feature: MA Experiment 20000479 PARAMETER Experiment Name: Zm_Drought_P Parameter: Treatment Value: Drought vs. No Drought
  misc_feature: MA Experiment ID: 20000480 Result: Down-regulated in Transcription
  misc_feature: MA Experiment 20000480 PARAMETER Experiment Name: Zm_Drought_P Parameter: Age (day) Value: 11
  misc_feature: MA Experiment 20000480 PARAMETER Experiment Name: Zm_Drought_P Parameter: Organism Value: Zea mays
  misc_feature: MA Experiment 20000480 PARAMETER Experiment Name: Zm_Drought_P Parameter: Plant Line Value: 35A19
  misc_feature: MA Experiment 20000480 PARAMETER Experiment Name: Zm_Drought_P Parameter: Timepoint (hr) Value: 72
  misc_feature: MA Experiment 20000480 PARAMETER Experiment Name: Zm_Drought_P Parameter: Tissue Value: Aerial
  misc_feature: MA Experiment 20000480 PARAMETER Experiment Name: Zm_Drought_P Parameter: Treatment Value: Drought vs. No Drought
  misc_feature: MA Experiment ID: 20000492 Result: Up-regulated in Transcription
  misc_feature: MA Experiment 20000492 PARAMETER Experiment Name: Zm_Hybrid_Seed_Dev_P Parameter: DAP Value: 12
  misc_feature: MA Experiment 20000492 PARAMETER Experiment Name: Zm_Hybrid_Seed_Dev_P Parameter: Organism Value: Zea mays
  misc_feature: MA Experiment 20000492 PARAMETER Experiment Name: Zm_Hybrid_Seed_Dev_P Parameter: Plant Line Value: 35A19
  misc_feature: MA Experiment 20000492 PARAMETER Experiment Name: Zm_Hybrid_Seed_Dev_P Parameter: Tissue Value: Fert Kernel vs. Unfert Floret
accaccgtgacagttctattaacttgacgagacaaaaggggggaaagttctcctcctacaatcctacctccagtgatgtcagtaccaccgccggccggcggcggcgccatcatcaacgaggtcctcaccgacgacgagctccgcgcagtgctcaggcggctggggcccgaggcggagcgggacgcgttcgggctcgtgtgccgccgctggctccggatccagagctccgagcggcggcgcctgcgcgcgcgcgccggcccggacatgctgcgccgcctcgctgcacgcttccctggtgtcctggatctcgacctctctcagtcgccctcccgctccttctaccctggggtcatcgacgacgacctcaactttatcgccagcagcttccgcaacctgcgtgtcctcgcgctgcagaactgcaaaggtatctctgatgtcggagttgccaaattgggagatggactgccatcctctacagtcccttgatgtttctcgctgcataaagctgagtgacaaaggtttgaaggcggttgcactagggtgcaaaaaattgagtcagctgcaaatcatgggatgcaaattagtaacagataatttattgactgctctatcaaagagctgcctgcaattggtagaacttggagctgcgggatgtaacagcataacagatgctggtatatctgctctggctgatggctgtcatcacataaaatcactagacataagcaaatgcaacaaagttagtgatcctggagtctgtaagatcgctgaggtttcttcatcatgcttggtgtcaataaagctattggactgcagcaaggtgggagataagtccatctattcgttagctaagttttgcagtaacctagagactcttgtcattggtggatgtcggaacattagcgatggctccatacaagcacttgctcttgcctgctccagtagcttaaggagcctgagaatggactggtgcttgaaaataacagacacatcattgcaaagcctgctgtctaactgtaaacttcttgtagccattgatgtcggatgttgtgaccagataaccgacaatgcattcatggacggggaaggatacgggtttcagtctgaactgagagttttgaagatcagcagctgtgttcggctcacagttgcaggggtcggcagagtgattgaatccttcaaggctcttgagtacttggatgttcggtcatgccctcaggttacaagggacagctgcgagcaagctggagtgcagtttcctgctggctgtaaggtgaatttcgatggcagtttgctggaatctgatccatctgctgagatgttcttctaaaatgtgatctcggttgaaatcagatttagtgtgaactgcaaaactaagatttgaagagctcggtcatggaggcgagtgcttgacattgctgctgatctttcactgtcaaaatctatgcaagaacctgagaccacaacggatgcaagccatgatcatattcagtacccaattcaatatgcatgtgatttaatctgtagaaagtagcgcaaaagaccatgaaataagttgtctgaccaaagaacgtatttgcattatgtattgtgccagtgcagcgggtgtattaaaaaaatgtgcatttt

SEQ ID NO: 7685 - protein, 298 aa, Zea mays subsp. mays
  peptide (1)..(298): Ceres Seq. ID no. 12408646
  misc_feature (14)..(291): Homolog of NCBI NO: 15237286 NR Description: putative protein; protein id: At5g23340.1, by cDNA: gi_15809999 [Arabidopsis thaliana] contains similarity to glucose regulated repressor
  misc_feature (11)..(210): Homolog of NCBI NO: 15237286 NR Description: putative protein; protein id: At5g23340.1, by cDNA: gi_15809999 [Arabidopsis thaliana] contains similarity to glucose regulated repressor
  misc_feature (14)..(264): Homolog of NCBI NO: 15237286 NR Description: putative protein; protein id: At5g23340.1, by cDNA: gi_15809999 [Arabidopsis thaliana] contains similarity to glucose regulated repressor
  misc_feature (11)..(276): Homolog of NCBI NO: 26336707 NR Description: unnamed protein product [Mus musculus]
  misc_feature (14)..(264): Homolog of NCBI NO: 18414458 NR Description: F-box protein family, AtFBL4; protein id: supported by cDNA: 100411., supported by cDNA: gi_13430831, by cDNA: gi_13605654, supported by cDNA: gi_15810598 [Arabidopsis
  misc_feature (11)..(276): Homolog of NCBI NO: 30519963 NR Description: F-box and leucine-rich repeat protein 2 [Mus >gi|26332971|dbj|BAC30203.1| unnamed protein product [Mus >gi|26337583|dbj|BAC32477.1| unnamed protein product [Mus
  misc_feature (11)..(276): Homolog of NCBI NO: 5919219 NR Description: leucine-rich repeats containing F-box protein
  misc_feature (11)..(276): Homolog of NCBI NO: 6063090 NR Description: F-box protein FBL2 [Homo sapiens]
  misc_feature (11)..(276): Homolog of NCBI NO: 16306582 NR Description: F-box and leucine-rich repeat protein 2; F-box
  misc_feature (11)..(276): Homolog of NCBI NO: 7022695 NR Description: unnamed protein product [Homo sapiens]
MSELPNWEMDCHPLQSLDVSRCIKLSDKGLKAVALGCKKLSQLQIMGCKLVTDNLLTALSKSCLQLVELGAAGCNSITDAGISALADGCHHIKSLDISKCNKVSDPGVCKIAEVSSSCLVSIKLLDCSKVGDKSIYSLAKFCSNLETLVIGGCRNISDGSIQALALACSSSLRSLRMDWCLKITDTSLQSLLSNCKLLVAIDVGCCDQITDNAFMDGEGYGFQSELRVLKISSCVRLTVAGVGRVIESFKALEYLDVRSCPQVTRDSCEQAGVQFPAGCKVNFDGSLLESDPSAEMFF

SEQ ID NO: 7686 - protein, 290 aa, Zea mays subsp. mays
  peptide (1)..(290): Ceres Seq. ID no. 12408647
  misc_feature (6)..(283): Homolog of NCBI NO: 15237286 NR Description: putative protein; protein id: At5g23340.1, by cDNA: gi_15809999 [Arabidopsis thaliana] contains similarity to glucose regulated repressor
  misc_feature (3)..(202): Homolog of NCBI NO: 15237286 NR Description: putative protein; protein id: At5g23340.1, by cDNA: gi_15809999 [Arabidopsis thaliana] contains similarity to glucose regulated repressor
  misc_feature (6)..(256): Homolog of NCBI NO: 15237286 NR Description: putative protein; protein id: At5g23340.1, by cDNA: gi_15809999 [Arabidopsis thaliana] contains similarity to glucose regulated repressor
  misc_feature (3)..(268): Homolog of NCBI NO: 26336707 NR Description: unnamed protein product [Mus musculus]
  misc_feature (6)..(256): Homolog of NCBI NO: 18414458 NR Description: F-box protein family, AtFBL4; protein id: supported by cDNA: 100411., supported by cDNA: gi_13430831, by cDNA: gi_13605654, supported by cDNA: gi_15810598 [Arabidopsis
  misc_feature (3)..(268): Homolog of NCBI NO: 30519963 NR Description: F-box and leucine-rich repeat protein 2 [Mus >gi|26332971|dbj|BAC30203.1| unnamed protein product [Mus >gi|26337583|dbj|BAC32477.1| unnamed protein product [Mus
  misc_feature (3)..(268): Homolog of NCBI NO: 5919219 NR Description: leucine-rich repeats containing F-box protein
  misc_feature (3)..(268): Homolog of NCBI NO: 16306582 NR Description: F-box and leucine-rich repeat protein 2; F-box
  misc_feature (3)..(268): Homolog of NCBI NO: 6063090 NR Description: F-box protein FBL2 [Homo sapiens]
  misc_feature (3)..(268): Homolog of NCBI NO: 7022695 NR Description: unnamed protein product [Homo sapiens]
MDCHPLQSLDVSRCIKLSDKGLKAVALGCKKLSQLQIMGCKLVTDNLLTALSKSCLQLVELGAAGCNSITDAGISALADGCHHIKSLDISKCNKVSDPGVCKIAEVSSSCLVSIKLLDCSKVGDKSIYSLAKFCSNLETLVIGGCRNISDGSIQALALACSSSLRSLRMDWCLKITDTSLQSLLSNCKLLVAIDVGCCDQITDNAFMDGEGYGFQSELRVLKISSCVRLTVAGVGRVIESFKALEYLDVRSCPQVTRDSCEQAGVQFPAGCKVNFDGSLLESDPSAEMFF

SEQ ID NO: 7687 - protein, 253 aa, Zea mays subsp. mays
  peptide (1)..(253): Ceres Seq. ID no. 12408648
  misc_feature (1)..(246): Homolog of NCBI NO: 15237286 NR Description: putative protein; protein id: At5g23340.1, by cDNA: gi_15809999 [Arabidopsis thaliana] contains similarity to glucose regulated repressor
  misc_feature (1)..(165): Homolog of NCBI NO: 15237286 NR Description: putative protein; protein id: At5g23340.1, by cDNA: gi_15809999 [Arabidopsis thaliana] contains similarity to glucose regulated repressor
  misc_feature (1)..(219): Homolog of NCBI NO: 15237286 NR Description: putative protein; protein id: At5g23340.1, by cDNA: gi_15809999 [Arabidopsis thaliana] contains similarity to glucose regulated repressor
  misc_feature (1)..(231): Homolog of NCBI NO: 26336707 NR Description: unnamed protein product [Mus musculus]
  misc_feature (1)..(219): Homolog of NCBI NO: 18414458 NR Description: F-box protein family, AtFBL4; protein id: supported by cDNA: 100411., supported by cDNA: gi_13430831, by cDNA: gi_13605654, supported by cDNA: gi_15810598 [Arabidopsis
  misc_feature (1)..(231): Homolog of NCBI NO: 30519963 NR Description: F-box and leucine-rich repeat protein 2 [Mus >gi|26332971|dbj|BAC30203.1| unnamed protein product [Mus >gi|26337583|dbj|BAC32477.1| unnamed protein product [Mus
  misc_feature (1)..(231): Homolog of NCBI NO: 5919219 NR Description: leucine-rich repeats containing F-box protein
  misc_feature (1)..(231): Homolog of NCBI NO: 6063090 NR Description: F-box protein FBL2 [Homo sapiens]
  misc_feature (1)..(231): Homolog of NCBI NO: 7022695 NR Description: unnamed protein product [Homo sapiens]
  misc_feature (1)..(231): Homolog of NCBI NO: 16306582 NR Description: F-box and leucine-rich repeat protein 2; F-box
MGCKLVTDNLLTALSKSCLQLVELGAAGCNSITDAGISALADGCHHIKSLDISKCNKVSDPGVCKIAEVSSSCLVSIKLLDCSKVGDKSIYSLAKFCSNLETLVIGGCRNISDGSIQALALACSSSLRSLRMDWCLKITDTSLQSLLSNCKLLVAIDVGCCDQITDNAFMDGEGYGFQSELRVLKISSCVRLTVAGVGRVIESFKALEYLDVRSCPQVTRDSCEQAGVQFPAGCKVNFDGSLLESDPSAEMFF

SEQ ID NO: 7688 - DNA, 1203 bp, Zea mays subsp. mays
  misc_feature (1)..(1203): Ceres Seq. ID no. 12408641
  misc_feature: MA Experiment ID: 108504 Result: Up-regulated in Transcription
  misc_feature: MA Experiment 108504 PARAMETER Experiment Name: Zm_Drought_P Parameter: Age (day) Value: 8
  misc_feature: MA Experiment 108504 PARAMETER Experiment Name: Zm_Drought_P Parameter: Organism Value: Zea mays
  misc_feature: MA Experiment 108504 PARAMETER Experiment Name: Zm_Drought_P Parameter: Plant Line Value: 35A19
  misc_feature: MA Experiment 108504 PARAMETER Experiment Name: Zm_Drought_P Parameter: Timepoint (hr) Value: 12
  misc_feature: MA Experiment 108504 PARAMETER Experiment Name: Zm_Drought_P Parameter: Tissue Value: Aerial
  misc_feature: MA Experiment 108504 PARAMETER Experiment Name: Zm_Drought_P Parameter: Treatment Value: Drought vs. No Drought
  misc_feature: MA Experiment ID: 108523 Result: Down-regulated in Transcription
  misc_feature: MA Experiment 108523 PARAMETER Experiment Name: Zm_42deg_Heat_P Parameter: Age (day) Value: 8
  misc_feature: MA Experiment 108523 PARAMETER Experiment Name: Zm_42deg_Heat_P Parameter: Organism Value: Zea mays
  misc_feature: MA Experiment 108523 PARAMETER Experiment Name: Zm_42deg_Heat_P Parameter: Plant Line Value: 35A19
  misc_feature: MA Experiment 108523 PARAMETER Experiment Name: Zm_42deg_Heat_P Parameter: Temperature (deg C) Value: 42 vs. 22
  misc_feature: MA Experiment 108523 PARAMETER Experiment Name: Zm_42deg_Heat_P Parameter: Timepoint (hr) Value: 6
  misc_feature: MA Experiment 108523 PARAMETER Experiment Name: Zm_42deg_Heat_P Parameter: Tissue Value: Aerial
  misc_feature: MA Experiment ID: 108529 Result: Up-regulated in Transcription
  misc_feature: MA Experiment 108529 PARAMETER Experiment Name: Zm_Imbibed_Seeds_P Parameter: Age (day) Value: 5 vs. 2
  misc_feature: MA Experiment 108529 PARAMETER Experiment Name: Zm_Imbibed_Seeds_P Parameter: Organism Value: Zea mays
  misc_feature: MA Experiment 108529 PARAMETER Experiment Name: Zm_Imbibed_Seeds_P Parameter: Plant Line Value: 35A19
  misc_feature: MA Experiment 108529 PARAMETER Experiment Name: Zm_Imbibed_Seeds_P Parameter: Tissue Value: Roots vs. Embryo
  misc_feature: MA Experiment ID: 108534 Result: Up-regulated in Transcription
  misc_feature: MA Experiment 108534 PARAMETER Experiment Name: Zm_4deg_Cold_P Parameter: Age (hr) Value: 8
  misc_feature: MA Experiment 108534 PARAMETER Experiment Name: Zm_4deg_Cold_P Parameter: Organism Value: Zea mays
  misc_feature: MA Experiment 108534 PARAMETER Experiment Name: Zm_4deg_Cold_P Parameter: Plant Line Value: 35A19
  misc_feature: MA Experiment 108534 PARAMETER Experiment Name: Zm_4deg_Cold_P Parameter: Temperature (deg C) Value: 4 vs. 22
  misc_feature: MA Experiment 108534 PARAMETER Experiment Name: Zm_4deg_Cold_P Parameter: Timepoint (hr) Value: 6
  misc_feature: MA Experiment 108534 PARAMETER Experiment Name: Zm_4deg_Cold_P Parameter: Tissue Value: Aerial
  misc_feature: MA Experiment ID: 108535 Result: Down-regulated in Transcription
  misc_feature: MA Experiment 108535 PARAMETER Experiment Name: Zm_Meristem_P Parameter: Age (day) Value: 8
  misc_feature: MA Experiment 108535 PARAMETER Experiment Name: Zm_Meristem_P Parameter: Organism Value: Zea mays
  misc_feature: MA Experiment 108535 PARAMETER Experiment Name: Zm_Meristem_P Parameter: Plant Line Value: 35A19
  misc_feature: MA Experiment 108535 PARAMETER Experiment Name: Zm_Meristem_P Parameter: Tissue Value: Root Meristem vs. Above Root Meristem
  misc_feature: MA Experiment ID: 108536 Result: Up-regulated in Transcription
  misc_feature: MA Experiment 108536 PARAMETER Experiment Name: Zm_Meristem_P Parameter: Age (day) Value: 8
  misc_feature: MA Experiment 108536 PARAMETER Experiment Name: Zm_Meristem_P Parameter: Organism Value: Zea mays
  misc_feature: MA Experiment 108536 PARAMETER Experiment Name: Zm_Meristem_P Parameter: Plant Line Value: 35A19
  misc_feature: MA Experiment 108536 PARAMETER Experiment Name: Zm_Meristem_P Parameter: Tissue Value: Shoot Meristem vs. Above Shoot Meristem
  misc_feature: MA Experiment ID: 108543 Result: Up-regulated in Transcription
  misc_feature: MA Experiment ID: 108544 Result: Up-regulated in Transcription
  misc_feature: MA Experiment ID: 108545 Result: Down-regulated in Transcription
  misc_feature: MA Experiment 108545 PARAMETER Experiment Name: Zm_Imbibed_Seeds_P Parameter: Age (day) Value: 3 vs. 2
  misc_feature: MA Experiment 108545 PARAMETER Experiment Name: Zm_Imbibed_Seeds_P Parameter: Organism Value: Zea mays
  misc_feature: MA Experiment 108545 PARAMETER Experiment Name: Zm_Imbibed_Seeds_P Parameter: Plant Line Value: 35A19
  misc_feature: MA Experiment 108545 PARAMETER Experiment Name: Zm_Imbibed_Seeds_P Parameter: Tissue Value: Aerial vs. Embryo
  misc_feature: MA Experiment ID: 108547 Result: Down-regulated in Transcription
  misc_feature: MA Experiment 108547 PARAMETER Experiment Name: Zm_Imbibed_Seeds_P Parameter: Age (day) Value: 4 vs. 2
  misc_feature: MA Experiment 108547 PARAMETER Experiment Name: Zm_Imbibed_Seeds_P Parameter: Organism Value: Zea mays
  misc_feature: MA Experiment 108547 PARAMETER Experiment Name: Zm_Imbibed_Seeds_P Parameter: Plant Line Value: 35A19
  misc_feature: MA Experiment 108547 PARAMETER Experiment Name: Zm_Imbibed_Seeds_P Parameter: Tissue Value: Aerial vs. Embryo
  misc_feature: MA Experiment ID: 108556 Result: Up-regulated in Transcription
  misc_feature: MA Experiment 108556 PARAMETER Experiment Name: Zm_Drought_P Parameter: Age (day) Value: 9
  misc_feature: MA Experiment 108556 PARAMETER Experiment Name: Zm_Drought_P Parameter: Organism Value: Zea mays
  misc_feature: MA Experiment 108556 PARAMETER Experiment Name: Zm_Drought_P Parameter: Plant Line Value: 35A19
  misc_feature: MA Experiment 108556 PARAMETER Experiment Name: Zm_Drought_P Parameter: Timepoint (hr) Value: 24
  misc_feature: MA Experiment 108556 PARAMETER Experiment Name: Zm_Drought_P Parameter: Tissue Value: Aerial
  misc_feature: MA Experiment 108556 PARAMETER Experiment Name: Zm_Drought_P Parameter: Treatment Value: Drought vs. No Drought
  misc_feature: MA Experiment ID: 108559 Result: Down-regulated in Transcription
  misc_feature: MA Experiment 108559 PARAMETER Experiment Name: Zm_5mM_NO_P Parameter: Age (day) Value: 8
  misc_feature: MA Experiment 108559 PARAMETER Experiment Name: Zm_5mM_NO_P Parameter: Organism Value: Zea mays
  misc_feature: MA Experiment 108559 PARAMETER Experiment Name: Zm_5mM_NO_P Parameter: Plant Line Value: 35A19
  misc_feature: MA Experiment 108559 PARAMETER Experiment Name: Zm_5mM_NO_P Parameter: Timepoint (hr) Value: 12
  misc_feature: MA Experiment 108559 PARAMETER Experiment Name: Zm_5mM_NO_P Parameter: Tissue Value: Aerial
  misc_feature: MA Experiment 108559 PARAMETER Experiment Name: Zm_5mM_NO_P Parameter: Treatment Value: 5mM NO vs. No Treatment
  misc_feature: MA Experiment ID: 20000480 Result: Up-regulated in Transcription
  misc_feature: MA Experiment 20000480 PARAMETER Experiment Name: Zm_Drought_P Parameter: Age (day) Value: 11
  misc_feature: MA Experiment 20000480 PARAMETER Experiment Name: Zm_Drought_P Parameter: Organism Value: Zea mays
  misc_feature: MA Experiment 20000480 PARAMETER Experiment Name: Zm_Drought_P Parameter: Plant Line Value: 35A19
  misc_feature: MA Experiment 20000480 PARAMETER Experiment Name: Zm_Drought_P Parameter: Timepoint (hr) Value: 72
  misc_feature: MA Experiment 20000480 PARAMETER Experiment Name: Zm_Drought_P Parameter: Tissue Value: Aerial
  misc_feature: MA Experiment 20000480 PARAMETER Experiment Name: Zm_Drought_P Parameter: Treatment Value: Drought vs. No Drought
  misc_feature: MA Experiment ID: 20000535 Result: Down-regulated in Transcription
  misc_feature: MA Experiment 20000535 PARAMETER Experiment Name: Zm_Hybrid_Seed_Dev_P Parameter: DAP Value: 30 vs. 12
  misc_feature: MA Experiment 20000535 PARAMETER Experiment Name: Zm_Hybrid_Seed_Dev_P Parameter: Organism Value: Zea mays
  misc_feature: MA Experiment 20000535 PARAMETER Experiment Name: Zm_Hybrid_Seed_Dev_P Parameter: Plant Line Value: 35A19
  misc_feature: MA Experiment 20000535 PARAMETER Experiment Name: Zm_Hybrid_Seed_Dev_P Parameter: Tissue Value: Embryo vs. Unfert Floret
  misc_feature: MA Experiment ID: 20001608 Result: Up-regulated in Transcription
  misc_feature: MA Experiment 20001608 PARAMETER Experiment Name: Zm_50ppm_KNO3_L-to-H_P Parameter: Age (day) Value: 21
  misc_feature: MA Experiment 20001608 PARAMETER Experiment Name: Zm_50ppm_KNO3_L-to-H_P Parameter: Organism Value: Zea mays
  misc_feature: MA Experiment 20001608 PARAMETER Experiment Name: Zm_50ppm_KNO3_L-to-H_P Parameter: Plant Line Value: 35A19
  misc_feature: MA Experiment 20001608 PARAMETER Experiment Name: Zm_50ppm_KNO3_L-to-H_P Parameter: Timepoint (hr) Value: 48
  misc_feature: MA Experiment 20001608 PARAMETER Experiment Name: Zm_50ppm_KNO3_L-to-H_P Parameter: Tissue Value: Shoots
  misc_feature: MA Experiment 20001608 PARAMETER Experiment Name: Zm_50ppm_KNO3_L-to-H_P Parameter: Treatment Value: 50ppm KNO3 vs. 50ppm KCl
aaggcgcaaaagccatcaacctctgcagctacaggacagcgtgcttgtgagtggctgtgcttccgtaggggtagtagggtgcttgcgttgcgttgcagtgcagaggacactgacggacggcgaagaatcgaagatggaggcgtacgctgctggagccaagttcgactgcttgctgttcgacatggacgacactctgtacccgctgagccttggcatcaacctagcatgccgcaagaacatacaggagtacatgctgaagaagctgcggatcgaggagagccaggtccccaggatgtgcctggacctgtacagggagtatgggaccacaatggccggcctcaaggttttggggtacgatttcgactacgacgacttccacgcctgcgtgcacgggacgctgccgtacgagaaggtgaagcctgacccggtgctcaggcagctgctgctttccctgccgcagaggaagatcatcttcaccaactccgacaaggcccacgcggccagagtcctggagaagctcggcctccaggactgcttccaagggatcgtctgcttcgagacactgaacccgccaccaccaaccgagaccgagaagaacagtggcagtgctgggacgatcctgtgcaagccctcgctggcgtccatggaagccgtcatcgagatcgccaagctcgacgccgagagaacggtgttctttgacgacagcacgcgcaacatcgccgcagggaaggccgccggtttccgcaccgtcatcgtggggagctcggcgctggtgccaggggcggacgtggcgctggagagcatccacaacatcaaggaggcgctgccggagctctgggaggttgccgccgccgctgccgccggcgaccgcgtcgacgccgtcctccggtccaccaccgccgtggagaccacagtgattgcctgagcaataataccatatgacaaatgacattaaccgtcacggactcacggccacgtaatataatgctggcgtgtagtatttcttgtgacgtgcaaattaaaatgacttggaatgtggtgtgcctgattaagtaccgaccgaggtaactaatactactgtatatgacagaccagaactttactggtaataaggtttgtatagctcatccctgtcggcccgtgcttttttatggcgcggtccgtggtgcaaatggatgccacgtactgaatacaaataaatat

SEQ ID NO: 7689 - protein, 307 aa, Zea mays subsp. mays
  peptide (1)..(307): Ceres Seq. ID no. 12408642
  misc_feature (54)..(255): Pfam Name: haloacid dehalogenase-like hydrolase Pfam Description: haloacid dehalogenase-like hydrolase
  misc_feature (45)..(307): Homolog of NCBI NO: 34913328 NR Description: contains ESTs
  misc_feature (45)..(194): Homolog of NCBI NO: 40714684 NR Description: expressed protein [Oryza sativa (japonica
  misc_feature (206)..(307): Homolog of NCBI NO: 40714684 NR Description: expressed protein [Oryza sativa (japonica
  misc_feature (51)..(280): Homolog of NCBI NO: 11279021 NR Description: hypothetical protein F21F14.210 - Arabidopsis >gi|6899902|emb|CAB71911.1| putative protein [Arabidopsis
  misc_feature (53)..(190): Homolog of NCBI NO: 7406669 NR Description: putative ripening-related protein [Vitis vinifera]
  misc_feature (196)..(307): Homolog of NCBI NO: 7406669 NR Description: putative ripening-related protein [Vitis vinifera]
  misc_feature (49)..(200): Homolog of NCBI NO: 15241720 NR Description: putative protein; protein id: At5g02230.1, by cDNA: 36724. [Arabidopsis thaliana] >gi|11358409|pir||T48244
  misc_feature (49)..(200): Homolog of NCBI NO: 21593165 NR Description: unknown [Arabidopsis thaliana]
  misc_feature (206)..(307): Homolog of NCBI NO: 15241720 NR Description: putative protein; protein id: At5g02230.1, by cDNA: 36724. [Arabidopsis thaliana] >gi|11358409|pir||T48244
  misc_feature (206)..(307): Homolog of NCBI NO: 21593165 NR Description: unknown [Arabidopsis thaliana]
RRKSHQPLQLQDSVLVSGCASVGVVGCLRCVAVQRTLTDGEESKMEAYAAGAKFDCLLFDMDDTLYPLSLGINLACRKNIQEYMLKKLRIEESQVPRMCLDLYREYGTTMAGLKVLGYDFDYDDFHACVHGTLPYEKVKPDPVLRQLLLSLPQRKIIFTNSDKAHAARVLEKLGLQDCFQGIVCFETLNPPPPTETEKNSGSAGTILCKPSLASMEAVIEIAKLDAERTVFFDDSTRNIAAGKAAGFRTVIVGSSALVPGADVALESIHNIKEALPELWEVAAAAAAGDRVDAVLRSTTAVETTVIA

SEQ ID NO: 7690 - protein, 263 aa, Zea mays subsp. mays
  peptide (1)..(263): Ceres Seq. ID no. 12408643
  misc_feature (10)..(211): Pfam Name: haloacid dehalogenase-like hydrolase Pfam Description: haloacid dehalogenase-like hydrolase
  misc_feature (1)..(263): Homolog of NCBI NO: 34913328 NR Description: contains ESTs
  misc_feature (1)..(150): Homolog of NCBI NO: 40714684 NR Description: expressed protein [Oryza sativa (japonica
  misc_feature (162)..(263): Homolog of NCBI NO: 40714684 NR Description: expressed protein [Oryza sativa (japonica
  misc_feature (7)..(236): Homolog of NCBI NO: 11279021 NR Description: hypothetical protein F21F14.210 - Arabidopsis >gi|6899902|emb|CAB71911.1| putative protein [Arabidopsis
  misc_feature (9)..(146): Homolog of NCBI NO: 7406669 NR Description: putative ripening-related protein [Vitis vinifera]
  misc_feature (152)..(263): Homolog of NCBI NO: 7406669 NR Description: putative ripening-related protein [Vitis vinifera]
  misc_feature (5)..(156): Homolog of NCBI NO: 15241720 NR Description: putative protein; protein id: At5g02230.1, by cDNA: 36724. [Arabidopsis thaliana] >gi|11358409|pir||T48244
  misc_feature (5)..(156): Homolog of NCBI NO: 21593165 NR Description: unknown [Arabidopsis thaliana]
  misc_feature (162)..(263): Homolog of NCBI NO: 15241720 NR Description: putative protein; protein id: At5g02230.1, by cDNA: 36724. [Arabidopsis thaliana] >gi|11358409|pir||T48244
  misc_feature (162)..(263): Homolog of NCBI NO: 21593165 NR Description: unknown [Arabidopsis thaliana]
MEAYAAGAKFDCLLFDMDDTLYPLSLGINLACRKNIQEYMLKKLRIEESQVPRMCLDLYREYGTTMAGLKVLGYDFDYDDFHACVHGTLPYEKVKPDPVLRQLLLSLPQRKIIFTNSDKAHAARVLEKLGLQDCFQGIVCFETLNPPPPTETEKNSGSAGTILCKPSLASMEAVIEIAKLDAERTVFFDDSTRNIAAGKAAGFRTVIVGSSALVPGADVALESIHNIKEALPELWEVAAAAAAGDRVDAVLRSTTAVETTVIA

SEQ ID NO: 7691 - protein, 247 aa, Zea mays subsp. mays
  peptide (1)..(247): Ceres Seq. ID no. 12408644
  misc_feature (1)..(195): Pfam Name: haloacid dehalogenase-like hydrolase Pfam Description: haloacid dehalogenase-like hydrolase
  misc_feature (1)..(247): Homolog of NCBI NO: 34913328 NR Description: contains ESTs
  misc_feature (1)..(134): Homolog of NCBI NO: 40714684 NR Description: expressed protein [Oryza sativa (japonica
  misc_feature (146)..(247): Homolog of NCBI NO: 40714684 NR Description: expressed protein [Oryza sativa (japonica
  misc_feature (1)..(220): Homolog of NCBI NO: 11279021 NR Description: hypothetical protein F21F14.210 - Arabidopsis >gi|6899902|emb|CAB71911.1| putative protein [Arabidopsis
  misc_feature (1)..(130): Homolog of NCBI NO: 7406669 NR Description: putative ripening-related protein [Vitis vinifera]
  misc_feature (136)..(247): Homolog of NCBI NO: 7406669 NR Description: putative ripening-related protein [Vitis vinifera]
  misc_feature (1)..(140): Homolog of NCBI NO: 15241720 NR Description: putative protein; protein id: At5g02230.1, by cDNA: 36724. [Arabidopsis thaliana] >gi|11358409|pir||T48244
  misc_feature (1)..(140): Homolog of NCBI NO: 21593165 NR Description: unknown [Arabidopsis thaliana]
  misc_feature (146)..(247): Homolog of NCBI NO: 15241720 NR Description: putative protein; protein id: At5g02230.1, by cDNA: 36724. [Arabidopsis thaliana] >gi|11358409|pir||T48244
  misc_feature (146)..(247): Homolog of NCBI NO: 21593165 NR Description: unknown [Arabidopsis thaliana]
MDDTLYPLSLGINLACRKNIQEYMLKKLRIEESQVPRMCLDLYREYGTTMAGLKVLGYDFDYDDFHACVHGTLPYEKVKPDPVLRQLLLSLPQRKIIFTNSDKAHAARVLEKLGLQDCFQGIVCFETLNPPPPTETEKNSGSAGTILCKPSLASMEAVIEIAKLDAERTVFFDDSTRNIAAGKAAGFRTVIVGSSALVPGADVALESIHNIKEALPELWEVAAAAAAGDRVDAVLRSTTAVETTVIA

SEQ ID NO: 7692 - DNA, 1458 bp, Zea mays subsp. mays
  misc_feature (1)..(1458): Ceres Seq. ID no. 12408637
  misc_feature: MA Experiment ID: 20000492 Result: Down-regulated in Transcription
  misc_feature: MA Experiment 20000492 PARAMETER Experiment Name: Zm_Hybrid_Seed_Dev_P Parameter: DAP Value: 12
  misc_feature: MA Experiment 20000492 PARAMETER Experiment Name: Zm_Hybrid_Seed_Dev_P Parameter: Organism Value: Zea mays
  misc_feature: MA Experiment 20000492 PARAMETER Experiment Name: Zm_Hybrid_Seed_Dev_P Parameter: Plant Line Value: 35A19
  misc_feature: MA Experiment 20000492 PARAMETER Experiment Name: Zm_Hybrid_Seed_Dev_P Parameter: Tissue Value: Fert Kernel vs. Unfert Floret
  misc_feature: MA Experiment ID: 20000535 Result: Down-regulated in Transcription
  misc_feature: MA Experiment 20000535 PARAMETER Experiment Name: Zm_Hybrid_Seed_Dev_P Parameter: DAP Value: 30 vs. 12
  misc_feature: MA Experiment 20000535 PARAMETER Experiment Name: Zm_Hybrid_Seed_Dev_P Parameter: Organism Value: Zea mays
  misc_feature: MA Experiment 20000535 PARAMETER Experiment Name: Zm_Hybrid_Seed_Dev_P Parameter: Plant Line Value: 35A19
  misc_feature: MA Experiment 20000535 PARAMETER Experiment Name: Zm_Hybrid_Seed_Dev_P Parameter: Tissue Value: Embryo vs. Unfert Floret
aagcgaaacaaacggcgtgacgggagccaagagcccgagagcgccctccgcggccgccgcaccgcgtcgtcgttgtccccagccaacccaacccagcgcaatcccaaacgaatccagccccacctcagccgctgcgcggacctccgaatcccggcgccggtgcgcgcagggcaccgcagggcgcggcgcggccatggacatggacagcgtggagtgcctctccctcccggacgctgccatggacgtggacgacatcgaaggccgcccgcaccacggccatctcggcctcccgctccaccccgcccacctcccatcctcaggtgccggccgcgcgttccccaaggtgaatgccgggggcgccgtggcgggcccggcgggagcggcgggcacagcaggagcaggcgtggggccgccggcgaccagcgtgcacgagctgctcgagtgccccgtctgcaccaactccatgttcccgccaatccatcagtgtcaaaatggacatactttgtgttcgacatgcaaggccagggtgcacaacaggtgccctacatgcagacaagagcttggtgatatcaggtgcttagcattggaaaaagtagcagagtcacttgagcttccctgtaagtactgctctttagggtgcccagagatcttcccatactacagcaagataaagcacgaagcacagtgcagcttcaggccatatacctgcccctatgctggttctgaatgtgctgtggctggtgatattccattccttgttgcacatttgagggatgatcacaaagtcgatatgcacagcggctgcacgttcaaccatagatatgtcaagtccaacccgcgagaggttgaaaacgccacctggatgcttacggtattccattgttttgggcagtacttctgcctgcacttcgaggcattccagctcggaatggctccagtctacatggctttcctccggttcatgggtgatgagaatgatgcgaggaactacacatatagcctagaggttggtggtaacgggaggaagatggtgtgggaaggtactcctagaagcatccgtgacagccaccgcaaggtccgtgacagccatgatggcctcatcatccagaggaacatggcgctgttcttctcgggcggtgacaggaaggagctgaagctgagggtgactgggcggatctggaaggagcagaccaacccggacggggcctgcattcctaacctttgcagctgagcaagggagacgtttggaaagcaaaaaagaaagaaaatacggtgctgtttggctggcttgtctcaaaattgccacgttatgctttcatcatagtgtctgccgttaaaatgttgtagtagtaaaatcgtagggtgtaaaatgttttcttgtaaagtcattgtgtataccaaccaaattcaagaaagcttacaagttggcccataaatgcatgtgctacgttcttgtgt

SEQ ID NO: 7693 - protein, 409 aa, Zea mays subsp. mays
  peptide (1)..(409): Ceres Seq. ID no. 12408638
  misc_feature (59)..(409): Homolog of NCBI NO: 34904390 NR Description: unnamed protein product [Oryza sativa (japonica group)] >gi|8468001|dbj|BAA96602.1| unnamed protein product
  misc_feature (131)..(407): Homolog of NCBI NO: 11291752 NR Description: seven in absentia-like protein - Arabidopsis
  misc_feature (131)..(407): Homolog of NCBI NO: 18412133 NR Description: seven in absentia-like protein; protein id: supported by cDNA: 115713. [Arabidopsis thaliana] putative seven in absentia protein [Arabidopsis thaliana]
  misc_feature (65)..(406): Homolog of NCBI NO: 11291753 NR Description: SINAH1 protein [imported] - upland cotton
  misc_feature (131)..(407): Homolog of NCBI NO: 21536945 NR Description: seven in absentia-like protein [Arabidopsis
  misc_feature (138)..(409): Homolog of NCBI NO: 20136190 NR Description: ring finger E3 ligase SINAT5 [Arabidopsis
  misc_feature (112)..(409): Homolog of NCBI NO: 15234306 NR Description: putative zinc finger protein; protein id:
  misc_feature (138)..(376): Homolog of NCBI NO: 11291755 NR Description: SINA1 protein [imported] - Vitis vinifera
  misc_feature (141)..(396): Homolog of NCBI NO: 33354205 NR Description: putative developmental protein sina [Oryza sativa
  misc_feature (141)..(396): Homolog of NCBI NO: 34899096 NR Description: similar to RING zinc finger protein [Oryza sativa
SETNGVTGAKSPRAPSAAAAPRRRCPQPTQPSAIPNESSPTSAAARTSESRRRCAQGTAGRGAAMDMDSVECLSLPDAAMDVDDIEGRPHHGHLGLPLHPAHLPSSGAGRAFPKVNAGGAVAGPAGAAGTAGAGVGPPATSVHELLECPVCTNSMFPPIHQCQNGHTLCSTCKARVHNRCPTCRQELGDIRCLALEKVAESLELPCKYCSLGCPEIFPYYSKIKHEAQCSFRPYTCPYAGSECAVAGDIPFLVAHLRDDHKVDMHSGCTFNHRYVKSNPREVENATWMLTVFHCFGQYFCLHFEAFQLGMAPVYMAFLRFMGDENDARNYTYSLEVGGNGRKMVWEGTPRSIRDSHRKVRDSHDGLIIQRNMALFFSGGDRKELKLRVTGRIWKEQTNPDGACIPNLCS

SEQ ID NO: 7694 - protein, 345 aa, Zea mays subsp. mays
  peptide (1)..(345): Ceres Seq. ID no. 12408639
  misc_feature (1)..(345): Homolog of NCBI NO: 34904390 NR Description: unnamed protein product [Oryza sativa (japonica group)] >gi|8468001|dbj|BAA96602.1| unnamed protein product
  misc_feature (67)..(343): Homolog of NCBI NO: 11291752 NR Description: seven in absentia-like protein - Arabidopsis
  misc_feature (67)..(343): Homolog of NCBI NO: 18412133 NR Description: seven in absentia-like protein; protein id: supported by cDNA: 115713. [Arabidopsis thaliana] putative seven in absentia protein [Arabidopsis thaliana]
  misc_feature (1)..(342): Homolog of NCBI NO: 11291753 NR Description: SINAH1 protein [imported] - upland cotton
  misc_feature (67)..(343): Homolog of NCBI NO: 21536945 NR Description: seven in absentia-like protein [Arabidopsis
  misc_feature (74)..(345): Homolog of NCBI NO: 20136190 NR Description: ring finger E3 ligase SINAT5 [Arabidopsis
  misc_feature (48)..(345): Homolog of NCBI NO: 15234306 NR Description: putative zinc finger protein; protein id:
  misc_feature (74)..(312): Homolog of NCBI NO: 11291755 NR Description: SINA1 protein [imported] - Vitis vinifera
  misc_feature (77)..(332): Homolog of NCBI NO: 33354205 NR Description: putative developmental protein sina [Oryza sativa
  misc_feature (77)..(332): Homolog of NCBI NO: 34899096 NR Description: similar to RING zinc finger protein [Oryza sativa
MDMDSVECLSLPDAAMDVDDIEGRPHHGHLGLPLHPAHLPSSGAGRAFPKVNAGGAVAGPAGAAGTAGAGVGPPATSVHELLECPVCTNSMFPPIHQCQNGHTLCSTCKARVHNRCPTCRQELGDIRCLALEKVAESLELPCKYCSLGCPEIFPYYSKIKHEAQCSFRPYTCPYAGSECAVAGDIPFLVAHLRDDHKVDMHSGCTFNHRYVKSNPREVENATWMLTVFHCFGQYFCLHFEAFQLGMAPVYMAFLRFMGDENDARNYTYSLEVGGNGRKMVWEGTPRSIRDSHRKVRDSHDGLIIQRNMALFFSGGDRKELKLRVTGRIWKEQTNPDGACIPNLCS

SEQ ID NO: 7695 - protein, 343 aa, Zea mays subsp. mays
  peptide (1)..(343): Ceres Seq. ID no. 12408640
  misc_feature (75)..(330): Homolog of NCBI NO: 33354205 NR Description: putative developmental protein sina [Oryza sativa
  misc_feature (75)..(330): Homolog of NCBI NO: 34899096 NR Description: similar to RING zinc finger protein [Oryza sativa
  misc_feature (1)..(343): Homolog of NCBI NO: 34904390 NR Description: unnamed protein product [Oryza sativa (japonica group)] >gi|8468001|dbj|BAA96602.1| unnamed protein product
  misc_feature (65)..(341): Homolog of NCBI NO: 11291752 NR Description: seven in absentia-like protein - Arabidopsis
  misc_feature (65)..(341): Homolog of NCBI NO: 18412133 NR Description: seven in absentia-like protein; protein id: supported by cDNA: 115713. [Arabidopsis thaliana] putative seven in absentia protein [Arabidopsis thaliana]
  misc_feature (1)..(340): Homolog of NCBI NO: 11291753 NR Description: SINAH1 protein [imported] - upland cotton
  misc_feature (65)..(341): Homolog of NCBI NO: 21536945 NR Description: seven in absentia-like protein [Arabidopsis
  misc_feature (72)..(343): Homolog of NCBI NO: 20136190 NR Description: ring finger E3 ligase SINAT5 [Arabidopsis
  misc_feature (46)..(343): Homolog of NCBI NO: 15234306 NR Description: putative zinc finger protein; protein id:
  misc_feature (72)..(310): Homolog of NCBI NO: 11291755 NR Description: SINA1 protein [imported] - Vitis vinifera
MDSVECLSLPDAAMDVDDIEGRPHHGHLGLPLHPAHLPSSGAGRAFPKVNAGGAVAGPAGAAGTAGAGVGPPATSVHELLECPVCTNSMFPPIHQCQNGHTLCSTCKARVHNRCPTCRQELGDIRCLALEKVAESLELPCKYCSLGCPEIFPYYSKIKHEAQCSFRPYTCPYAGSECAVAGDIPFLVAHLRDDHKVDMHSGCTFNHRYVKSNPREVENATWMLTVFHCFGQYFCLHFEAFQLGMAPVYMAFLRFMGDENDARNYTYSLEVGGNGRKMVWEGTPRSIRDSHRKVRDSHDGLIIQRNMALFFSGGDRKELKLRVTGRIWKEQTNPDGACIPNLCS

SEQ ID NO: 7696 - DNA, 1335 bp, Zea mays subsp. mays
  misc_feature (1)..(1335): Ceres Seq. ID no. 12408633
  misc_feature: MA Experiment ID: 108528 Result: Down-regulated in Transcription
  misc_feature: MA Experiment 108528 PARAMETER Experiment Name: Zm_Imbibed_Seeds_P Parameter: Age (day) Value: 5 vs. 2
  misc_feature: MA Experiment 108528 PARAMETER Experiment Name: Zm_Imbibed_Seeds_P Parameter: Organism Value: Zea mays
  misc_feature: MA Experiment 108528 PARAMETER Experiment Name: Zm_Imbibed_Seeds_P Parameter: Plant Line Value: 35A19
  misc_feature: MA Experiment 108528 PARAMETER Experiment Name: Zm_Imbibed_Seeds_P Parameter: Tissue Value: Aerial vs. Embryo
  misc_feature: MA Experiment ID: 108529 Result: Down-regulated in Transcription
  misc_feature: MA Experiment 108529 PARAMETER Experiment Name: Zm_Imbibed_Seeds_P Parameter: Age (day) Value: 5 vs. 2
  misc_feature: MA Experiment 108529 PARAMETER Experiment Name: Zm_Imbibed_Seeds_P Parameter: Organism Value: Zea mays
  misc_feature: MA Experiment 108529 PARAMETER Experiment Name: Zm_Imbibed_Seeds_P Parameter: Plant Line Value: 35A19
  misc_feature: MA Experiment 108529 PARAMETER Experiment Name: Zm_Imbibed_Seeds_P Parameter: Tissue Value: Roots vs. Embryo
  misc_feature: MA Experiment ID: 108530 Result: Down-regulated in Transcription
  misc_feature: MA Experiment 108530 PARAMETER Experiment Name: Zm_Imbibed_Seeds_P Parameter: Age (day) Value: 6 vs. 2
  misc_feature: MA Experiment 108530 PARAMETER Experiment Name: Zm_Imbibed_Seeds_P Parameter: Organism Value: Zea mays
  misc_feature: MA Experiment 108530 PARAMETER Experiment Name: Zm_Imbibed_Seeds_P Parameter: Plant Line Value: 35A19
  misc_feature: MA Experiment 108530 PARAMETER Experiment Name: Zm_Imbibed_Seeds_P Parameter: Tissue Value: Aerial vs. Embryo
  misc_feature: MA Experiment ID: 108535 Result: Down-regulated in Transcription
  misc_feature: MA Experiment 108535 PARAMETER Experiment Name: Zm_Meristem_P Parameter: Age (day) Value: 8
  misc_feature: MA Experiment 108535 PARAMETER Experiment Name: Zm_Meristem_P Parameter: Organism Value: Zea mays
  misc_feature: MA Experiment 108535 PARAMETER Experiment Name: Zm_Meristem_P Parameter: Plant Line Value: 35A19
  misc_feature: MA Experiment 108535 PARAMETER Experiment Name: Zm_Meristem_P Parameter: Tissue Value: Root Meristem vs. Above Root Meristem
  misc_feature: MA Experiment ID: 108536 Result: Down-regulated in Transcription
  misc_feature: MA Experiment 108536 PARAMETER Experiment Name: Zm_Meristem_P Parameter: Age (day) Value: 8
  misc_feature: MA Experiment 108536 PARAMETER Experiment Name: Zm_Meristem_P Parameter: Organism Value: Zea mays
  misc_feature: MA Experiment 108536 PARAMETER Experiment Name: Zm_Meristem_P Parameter: Plant Line Value: 35A19
  misc_feature: MA Experiment 108536 PARAMETER Experiment Name: Zm_Meristem_P Parameter: Tissue Value: Shoot Meristem vs. Above Shoot Meristem
  misc_feature: MA Experiment ID: 108544 Result: Up-regulated in Transcription
  misc_feature: MA Experiment ID: 108546 Result: Down-regulated in Transcription
  misc_feature: MA Experiment 108546 PARAMETER Experiment Name: Zm_Imbibed_Seeds_P Parameter: Age (day) Value: 3 vs. 2
  misc_feature: MA Experiment 108546 PARAMETER Experiment Name: Zm_Imbibed_Seeds_P Parameter: Organism Value: Zea mays
  misc_feature: MA Experiment 108546 PARAMETER Experiment Name: Zm_Imbibed_Seeds_P Parameter: Plant Line Value: 35A19
  misc_feature: MA Experiment 108546 PARAMETER Experiment Name: Zm_Imbibed_Seeds_P Parameter: Tissue Value: Roots vs. Embryo
  misc_feature: MA Experiment ID: 108559 Result: Up-regulated in Transcription
  misc_feature: MA Experiment 108559 PARAMETER Experiment Name: Zm_5mM_NO_P Parameter: Age (day) Value: 8
  misc_feature: MA Experiment 108559 PARAMETER Experiment Name: Zm_5mM_NO_P Parameter: Organism Value: Zea mays
  misc_feature: MA Experiment 108559 PARAMETER Experiment Name: Zm_5mM_NO_P Parameter: Plant Line Value: 35A19
  misc_feature: MA Experiment 108559 PARAMETER Experiment Name: Zm_5mM_NO_P Parameter: Timepoint (hr) Value: 12
  misc_feature: MA Experiment 108559 PARAMETER Experiment Name: Zm_5mM_NO_P Parameter: Tissue Value: Aerial
  misc_feature: MA Experiment 108559 PARAMETER Experiment Name: Zm_5mM_NO_P Parameter: Treatment Value: 5mM NO vs. No Treatment
  misc_feature: MA Experiment ID: 20000535 Result: Down-regulated in Transcription
  misc_feature: MA Experiment 20000535 PARAMETER Experiment Name: Zm_Hybrid_Seed_Dev_P Parameter: DAP Value: 30 vs. 12
  misc_feature: MA Experiment 20000535 PARAMETER Experiment Name: Zm_Hybrid_Seed_Dev_P Parameter: Organism Value: Zea mays
  misc_feature: MA Experiment 20000535 PARAMETER Experiment Name: Zm_Hybrid_Seed_Dev_P Parameter: Plant Line Value: 35A19
  misc_feature: MA Experiment 20000535 PARAMETER Experiment Name: Zm_Hybrid_Seed_Dev_P Parameter: Tissue Value: Embryo vs. Unfert Floret
aaaaaaaactcaaacaaactcaagcctgccctgccctgccttgttaagcaaagcaacccagctgcgagacacgagagctagctagagagagatggcggccacggtttcgtccttcccggtggtgaacatggagaagctggagaccgaggagagggccacggccatggaggtcatccgcgacggctgcgagaactggggcttcttcgagctgctgaaccacggcatctcgcacgagctgatggacgaggtggagcggctgaccaaggcgcactacgccaccttccgggaggccaagttccaggagttcgcggcccggacgctggaggccggcgagaagggcgccgacgtcaaggacgtggactgggagagcaccttcttcgtccgccacctcccggcctccaacctcgccgacctccccgacgtcgacgaccgctacaggcaggtgatggagcagttcgcatcggagatccggaagctgtcggagaggctgctggacctgctgtgcgagaacctgggcctggagcccgggtacctgaaggcggccttcgcggggtcggacggcccgacgttcggcaccaaggtgagcgcgtacccgccgtgcccgcgcccggacctcgtcgacggccttcgcgcgcacaccgacgccggcggcatcgtgctgctgttccaggacgaccaggtgagcggcctgcagctgctcaggggcggggagtgggtggacgtgccgcccatgcgccacgccatcgtcgccaacgtcggcgaccagctggaggtcatcaccaacgggcggtacaagagcgtcatgcaccgcgtgctcacgcgccccgacggcaaccgcatgtccgtcgcgtccttctacaacccgggcgccgacgccgtcatcttcccggcgcccgcgctcgtcggcgccgccgaggaggaccgcgccgaggccgcgtacccgagcttcgtgttcgaggactacatgaacctgtacgtgcgccacaagttcgaggccaaggagcccaggttcgaggccatgaagtcggccatcgccaccgcgtgagaaagactgccttccgctgccggcttccttcgtggcgtcaagccttgaggcttgaacgaacaacgtacgtccatgtgcttatagtggcacagttgtgtgtgtaactaccgatcgtggaacggcctaatgtatttcggttgcctcagatcgatctatatgtgcgtatacattatgtactcaaaagtgtgtagcgtctggttaatgtacgagcagtgtgtatgtgaccaggacccggtgtgtagttgctactactaccatatccggtgaatgatcaaaccttttggtgtatt

SEQ ID NO: 7697 - protein, 317 aa, Zea mays subsp. mays
  peptide (1)..(317): Ceres Seq. ID no. 12408634
  misc_feature (158)..(258): Pfam Name: 2OG-Fe(II) oxygenase superfamily Pfam Description: 2OG-Fe(II) oxygenase superfamily
  misc_feature (3)..(313): Homolog of NCBI NO: 7433198 NR Description: probable 1-aminocyclopropane-1-carboxylate
  misc_feature (1)..(312): Homolog of NCBI NO: 12862572 NR Description: 1-aminocyclopropane-1-carboxylate oxidase
  misc_feature (1)..(312): Homolog of NCBI NO: 2492612 NR Description: 1-aminocyclopropane-1-carboxylate oxidase 1 (ACC
  misc_feature (5)..(316): Homolog of NCBI NO: 1326182 NR Description: 1-aminocyclopropane-1-carboxylate oxidase
  misc_feature (5)..(316): Homolog of NCBI NO: 2769652 NR Description: ACC oxidase [Musa acuminata]
  misc_feature (5)..(316): Homolog of NCBI NO: 38043946 NR Description: 1-aminocyclopropane-1-carboxylate oxidase [Musa
  misc_feature (7)..(312): Homolog of NCBI NO: 1771345 NR Description: 1-aminocyclopropane-1-carboxylate oxidase [Musa
  misc_feature (7)..(317): Homolog of NCBI NO: 25452785 NR Description: 1-aminocyclopropane-1-carboxylate oxidase 2 (ACC
  misc_feature (5)..(312): Homolog of NCBI NO: 398994 NR Description: 1-aminocyclopropane-1-carboxylate oxidase (ACC
  misc_feature (7)..(317): Homolog of NCBI NO: 398996 NR Description: 1-aminocyclopropane-1-carboxylate oxidase 1 (ACC
MAATVSSFPVVNMEKLETEERATAMEVIRDGCENWGFFELLNHGISHELMDEVERLTKAHYATFREAKFQEFAARTLEAGEKGADVKDVDWESTFFVRHLPASNLADLPDVDDRYRQVMEQFASEIRKLSERLLDLLCENLGLEPGYLKAAFAGSDGPTFGTKVSAYPPCPRPDLVDGLRAHTDAGGIVLLFQDDQVSGLQLLRGGEWVDVPPMRHAIVANVGDQLEVITNGRYKSVMHRVLTRPDGNRMSVASFYNPGADAVIFPAPALVGAAEEDRAEAAYPSFVFEDYMNLYVRHKFEAKEPRFEAMKSAIATA

SEQ ID NO: 7698 - protein, 305 aa, Zea mays subsp. mays
  peptide (1)..(305): Ceres Seq. ID no. 12408635
  misc_feature (146)..(246): Pfam Name: 2OG-Fe(II) oxygenase superfamily Pfam Description: 2OG-Fe(II) oxygenase superfamily
  misc_feature (1)..(301): Homolog of NCBI NO: 7433198 NR Description: probable 1-aminocyclopropane-1-carboxylate
  misc_feature (1)..(300): Homolog of NCBI NO: 12862572 NR Description: 1-aminocyclopropane-1-carboxylate oxidase
  misc_feature (1)..(300): Homolog of NCBI NO: 2492612 NR Description: 1-aminocyclopropane-1-carboxylate oxidase 1 (ACC
  misc_feature (1)..(304): Homolog of NCBI NO: 1326182 NR Description: 1-aminocyclopropane-1-carboxylate oxidase
  misc_feature (1)..(304): Homolog of NCBI NO: 2769652 NR Description: ACC oxidase [Musa acuminata]
  misc_feature (1)..(304): Homolog of NCBI NO: 38043946 NR Description: 1-aminocyclopropane-1-carboxylate oxidase [Musa
  misc_feature (1)..(300): Homolog of NCBI NO: 1771345 NR Description: 1-aminocyclopropane-1-carboxylate oxidase [Musa
  misc_feature (1)..(305): Homolog of NCBI NO: 25452785 NR Description: 1-aminocyclopropane-1-carboxylate oxidase 2 (ACC
  misc_feature (1)..(300): Homolog of NCBI NO: 398994 NR Description: 1-aminocyclopropane-1-carboxylate oxidase (ACC
  misc_feature (1)..(305): Homolog of NCBI NO: 398996 NR Description: 1-aminocyclopropane-1-carboxylate oxidase 1 (ACC
MEKLETEERATAMEVIRDGCENWGFFELLNHGISHELMDEVERLTKAHYATFREAKFQEFAARTLEAGEKGADVKDVDWESTFFVRHLPASNLADLPDVDDRYRQVMEQFASEIRKLSERLLDLLCENLGLEPGYLKAAFAGSDGPTFGTKVSAYPPCPRPDLVDGLRAHTDAGGIVLLFQDDQVSGLQLLRGGEWVDVPPMRHAIVANVGDQLEVITNGRYKSVMHRVLTRPDGNRMSVASFYNPGADAVIFPAPALVGAAEEDRAEAAYPSFVFEDYMNLYVRHKFEAKEPRFEAMKSAIATA

SEQ ID NO: 7699 - protein, 293 aa, Zea mays subsp. mays
  peptide (1)..(293): Ceres Seq. ID no. 12408636
  misc_feature (134)..(234): Pfam Name: 2OG-Fe(II) oxygenase superfamily Pfam Description: 2OG-Fe(II) oxygenase superfamily
  misc_feature (1)..(289): Homolog of NCBI NO: 7433198 NR Description: probable 1-aminocyclopropane-1-carboxylate
  misc_feature (1)..(288): Homolog of NCBI NO: 12862572 NR Description: 1-aminocyclopropane-1-carboxylate oxidase
  misc_feature (1)..(288): Homolog of NCBI NO: 2492612 NR Description: 1-aminocyclopropane-1-carboxylate oxidase 1 (ACC
  misc_feature (1)..(292): Homolog of NCBI NO: 1326182 NR Description: 1-aminocyclopropane-1-carboxylate oxidase
  misc_feature (1)..(292): Homolog of NCBI NO: 2769652 NR Description: ACC oxidase [Musa acuminata]
  misc_feature (1)..(292): Homolog of NCBI NO: 38043946 NR Description: 1-aminocyclopropane-1-carboxylate oxidase [Musa
  misc_feature (1)..(288): Homolog of NCBI NO: 1771345 NR Description: 1-aminocyclopropane-1-carboxylate oxidase [Musa
  misc_feature (1)..(293): Homolog of NCBI NO: 25452785 NR Description: 1-aminocyclopropane-1-carboxylate oxidase 2 (ACC
  misc_feature (1)..(288): Homolog of NCBI NO: 398994 NR Description: 1-aminocyclopropane-1-carboxylate oxidase (ACC
  misc_feature (1)..(293): Homolog of NCBI NO: 398996 NR Description: 1-aminocyclopropane-1-carboxylate oxidase 1 (ACC
MEVIRDGCENWGFFELLNHGISHELMDEVERLTKAHYATFREAKFQEFAARTLEAGEKGADVKDVDWESTFFVRHLPASNLADLPDVDDRYRQVMEQFASEIRKLSERLLDLLCENLGLEPGYLKAAFAGSDGPTFGTKVSAYPPCPRPDLVDGLRAHTDAGGIVLLFQDDQVSGLQLLRGGEWVDVPPMRHAIVANVGDQLEVITNGRYKSVMHRVLTRPDGNRMSVASFYNPGADAVIFPAPALVGAAEEDRAEAAYPSFVFEDYMNLYVRHKFEAKEPRFEAMKSAIATA

SEQ ID NO: 7700 - DNA, 1252 bp, Zea mays subsp. mays
  misc_feature (1)..(1252): Ceres Seq. ID no. 12343013
  misc_feature: MA Experiment ID: 108543 Result: Down-regulated in Transcription
ttaccattacggcattacctacaccgtcgcctaatttgccaacgcccgccgccgttccgatggaaaccgccgagccggcgcgcgtccaagccctcgctgaggccggcgtgttccgcctcccggcgcagtacatccagccgcctgagcacagaccgaccccctcgccttctcctattgccgcggcgctctccgtgccggtcgtcgacctctcaacctccaccgccaccgacgccgtccgcgccgcgtgcgcggactggggcgcctttcacgtggtcggccacggcgtgccgggggagctcctcgacgcggtgcgcgcggcagggctcgcgttcttccgcgcgcccatggaggacaagctccggttcgcctgcgacccggccaggggcgccgcctcggaagggtacggcagccgcatgctcgccaacgacgactccgtgctcgactggcgcgactactttgaccaccacacgctcccggagtcccgctgtgatcccgcccgctggcccgacttcgtccccggttacagagatactattgcaaaatacagccacagcatgaaggatcttgctaaaaaattgttgtgcatcatctcagaaaatctgagcctgccaccatcttatatacaagaggcggttggagaagttttccagaacattactattagctactattctccgtgtccacaacctgatcttgctcttgggttacaatctcattctgatatgggcgcaataacacttctgatacaagatgatgttggtgggcttgaagtattaaaggatggaatgtggatacctgtgcctgctttgcgtgatggcatccttgtgattctcgctgatcagacagagatcatcaccaatggaagatacaagagttcagttcatcgagctgttgtcaatgctgagcgtgcccgcttatcagtagcaacattttatgatccatcaaaatcaaggaaaatatgcactgccccgcagcttgtgagtgagaatgaaccacaaaagtatcgggatgtaatttatggtgactatgtctcatcttggtatagcaaaggtccagagggcaagcgaaacatcgatgccctcctgattcagcactagagccataggtatgccttaaaacagggttgggccactcatctgtttcctaaacttctaatgcatgtacaatatatcagtttccaactttaaacaatcaggataaggaaaccaacttgtatactggatgcagtgcaataaagtaccttttcattgtc

SEQ ID NO: 7701 - protein, 364 aa, Zea mays subsp. mays
  peptide (1)..(364): Ceres Seq. ID no. 12343014
  misc_feature (214)..(313): Pfam Name: 2OG-Fe(II) oxygenase superfamily Pfam Description: 2OG-Fe(II) oxygenase superfamily
  misc_feature (20)..(363): Homolog of NCBI NO: 34898354 NR Description: Similar to leucoanthocyanidin
  misc_feature (20)..(361): Homolog of NCBI NO: 20260150 NR Description: strong similarity to naringenin 3-dioxygenase
  misc_feature (103)..(361): Homolog of NCBI NO: 11045078 NR Description: naringenin 3-dioxygenase like protein [Brassica
  misc_feature (103)..(361): Homolog of NCBI NO: 18414636 NR Description: naringenin 3-dioxygenase like protein; protein At4g16330.1, supported by cDNA: 40793., supported by cDNA:
  misc_feature (115)..(361): Homolog of NCBI NO: 7433202 NR Description: hypothetical protein - Arabidopsis thaliana
  misc_feature (115)..(361): Homolog of NCBI NO: 21593639 NR Description: naringenin 3-dioxygenase like protein
  misc_feature (24)..(362): Homolog of NCBI NO: 15224472 NR Description: putative anthocyanidin synthase; protein id: supported by cDNA: 256433., supported by cDNA: gi_17065133, by cDNA: gi_20259907 [Arabidopsis thaliana]
  misc_feature (24)..(362): Homolog of NCBI NO: 21554535 NR Description: putative anthocyanidin synthase [Arabidopsis
  misc_feature (21)..(282): Homolog of NCBI NO: 34907994 NR Description: leucoanthocyanidin dioxygenase-like protein
  misc_feature (279)..(360): Homolog of NCBI NO: 34907994 NR Description: leucoanthocyanidin dioxygenase-like protein
TITALPTPSPNLPTPAAVPMETAEPARVQALAEAGVFRLPAQYIQPPEHRPTPSPSPIAAALSVPVVDLSTSTATDAVRAACADWGAFHVVGHGVPGELLDAVRAAGLAFFRAPMEDKLRFACDPARGAASEGYGSRMLANDDSVLDWRDYFDHHTLPESRCDPARWPDFVPGYRDTIAKYSHSMKDLAKKLLCIISENLSLPPSYIQEAVGEVFQNITISYYSPCPQPDLALGLQSHSDMGAITLLIQDDVGGLEVLKDGMWIPVPALRDGILVILADQTEIITNGRYKSSVHRAVVNAERARLSVATFYDPSKSRKICTAPQLVSENEPQKYRDVIYGDYVSSWYSKGPEGKRNIDALLIQH

SEQ ID NO: 7702 - protein, 345 aa, Zea mays subsp. mays
  peptide (1)..(345): Ceres Seq. ID no. 12343015
  misc_feature (195)..(294): Pfam Name: 2OG-Fe(II) oxygenase superfamily Pfam Description: 2OG-Fe(II) oxygenase superfamily
  misc_feature (1)..(344): Homolog of NCBI NO: 34898354 NR Description: Similar to leucoanthocyanidin
  misc_feature (1)..(342): Homolog of NCBI NO: 20260150 NR Description: strong similarity to naringenin 3-dioxygenase
  misc_feature (84)..(342): Homolog of NCBI NO: 11045078 NR Description: naringenin 3-dioxygenase like protein [Brassica
  misc_feature (84)..(342): Homolog of NCBI NO: 18414636 NR Description: naringenin 3-dioxygenase like protein; protein At4g16330.1, supported by cDNA: 40793., supported by cDNA:
  misc_feature (96)..(342): Homolog of NCBI NO: 7433202 NR Description: hypothetical protein - Arabidopsis thaliana
  misc_feature (96)..(342): Homolog of NCBI NO: 21593639 NR Description: naringenin 3-dioxygenase like protein
  misc_feature (5)..(343): Homolog of NCBI NO: 15224472 NR Description: putative anthocyanidin synthase; protein id: supported by cDNA: 256433., supported by cDNA: gi_17065133, by cDNA: gi_20259907 [Arabidopsis thaliana]
  misc_feature (5)..(343): Homolog of NCBI NO: 21554535 NR Description: putative anthocyanidin synthase [Arabidopsis
  misc_feature (2)..(263): Homolog of NCBI NO: 34907994 NR Description: leucoanthocyanidin dioxygenase-like protein
  misc_feature (260)..(341): Homolog of NCBI NO: 34907994 NR Description: leucoanthocyanidin dioxygenase-like protein
METAEPARVQALAEAGVFRLPAQYIQPPEHRPTPSPSPIAAALSVPVVDLSTSTATDAVRAACADWGAFHVVGHGVPGELLDAVRAAGLAFFRAPMEDKLRFACDPARGAASEGYGSRMLANDDSVLDWRDYFDHHTLPESRCDPARWPDFVPGYRDTIAKYSHSMKDLAKKLLCIISENLSLPPSYIQEAVGEVFQNITISYYSPCPQPDLALGLQSHSDMGAITLLIQDDVGGLEVLKDGMWIPVPALRDGILVILADQTEIITNGRYKSSVHRAVVNAERARLSVATFYDPSKSRKICTAPQLVSENEPQKYRDVIYGDYVSSWYSKGPEGKRNIDALLIQH

SEQ ID NO: 7703 - protein, 250 aa, Zea mays subsp. mays
  peptide (1)..(250): Ceres Seq. ID no. 12343016
  misc_feature (100)..(199): Pfam Name: 2OG-Fe(II) oxygenase superfamily Pfam Description: 2OG-Fe(II) oxygenase superfamily
  misc_feature (1)..(249): Homolog of NCBI NO: 34898354 NR Description: Similar to leucoanthocyanidin
  misc_feature (1)..(247): Homolog of NCBI NO: 20260150 NR Description: strong similarity to naringenin 3-dioxygenase
  misc_feature (1)..(247): Homolog of NCBI NO: 11045078 NR Description: naringenin 3-dioxygenase like protein [Brassica
  misc_feature (1)..(247): Homolog of NCBI NO: 18414636 NR Description: naringenin 3-dioxygenase like protein; protein At4g16330.1, supported by cDNA: 40793., supported by cDNA:
  misc_feature (1)..(247): Homolog of NCBI NO: 7433202 NR Description: hypothetical protein - Arabidopsis thaliana
  misc_feature (1)..(247): Homolog of NCBI NO: 21593639 NR Description: naringenin 3-dioxygenase like protein
  misc_feature (1)..(248): Homolog of NCBI NO: 15224472 NR Description: putative anthocyanidin synthase; protein id: supported by cDNA: 256433., supported by cDNA: gi_17065133, by cDNA: gi_20259907 [Arabidopsis thaliana]
  misc_feature (1)..(248): Homolog of NCBI NO: 21554535 NR Description: putative anthocyanidin synthase [Arabidopsis
  misc_feature (1)..(168): Homolog of NCBI NO: 34907994 NR Description: leucoanthocyanidin dioxygenase-like protein
  misc_feature (165)..(246): Homolog of NCBI NO: 34907994 NR Description: leucoanthocyanidin dioxygenase-like protein
MEDKLRFACDPARGAASEGYGSRMLANDDSVLDWRDYFDHHTLPESRCDPARWPDFVPGYRDTIAKYSHSMKDLAKKLLCIISENLSLPPSYIQEAVGEVFQNITISYYSPCPQPDLALGLQSHSDMGAITLLIQDDVGGLEVLKDGMWIPVPALRDGILVILADQTEIITNGRYKSSVHRAVVNAERARLSVATFYDPSKSRKICTAPQLVSENEPQKYRDVIYGDYVSSWYSKGPEGKRNIDALLIQH

SEQ ID NO: 7704 - DNA, 1774 bp, Zea mays subsp. mays
  misc_feature (1)..(1774): Ceres Seq. ID no. 12349251
  misc_feature: MA Experiment ID: 108543 Result: Up-regulated in Transcription
  misc_feature: MA Experiment ID: 108545 Result: Down-regulated in Transcription
  misc_feature: MA Experiment 108545 PARAMETER Experiment Name: Zm_Imbibed_Seeds_P Parameter: Age (day) Value: 3 vs. 2
  misc_feature: MA Experiment 108545 PARAMETER Experiment Name: Zm_Imbibed_Seeds_P Parameter: Organism Value: Zea mays
  misc_feature: MA Experiment 108545 PARAMETER Experiment Name: Zm_Imbibed_Seeds_P Parameter: Plant Line Value: 35A19
  misc_feature: MA Experiment 108545 PARAMETER Experiment Name: Zm_Imbibed_Seeds_P Parameter: Tissue Value: Aerial vs. Embryo
  misc_feature: MA Experiment ID: 20000477 Result: Down-regulated in Transcription
  misc_feature: MA Experiment 20000477 PARAMETER Experiment Name: Zm_5mM_SA_P Parameter: Age (day) Value: 10
  misc_feature: MA Experiment 20000477 PARAMETER Experiment Name: Zm_5mM_SA_P Parameter: Organism Value: Zea mays
  misc_feature: MA Experiment 20000477 PARAMETER Experiment Name: Zm_5mM_SA_P Parameter: Plant Line Value: 35A19
  misc_feature: MA Experiment 20000477 PARAMETER Experiment Name: Zm_5mM_SA_P Parameter: Timepoint (hr) Value: 48
  misc_feature: MA Experiment 20000477 PARAMETER Experiment Name: Zm_5mM_SA_P Parameter: Tissue Value: Aerial
  misc_feature: MA Experiment 20000477 PARAMETER Experiment Name: Zm_5mM_SA_P Parameter: Treatment Value: 5mM SA vs. No Treatment
  misc_feature: MA Experiment ID: 20000479 Result: Down-regulated in Transcription
  misc_feature: MA Experiment 20000479 PARAMETER Experiment Name: Zm_Drought_P Parameter: Age (day) Value: 10
  misc_feature: MA Experiment 20000479 PARAMETER Experiment Name: Zm_Drought_P Parameter: Organism Value: Zea mays
  misc_feature: MA Experiment 20000479 PARAMETER Experiment Name: Zm_Drought_P Parameter: Plant Line Value: 35A19
  misc_feature: MA Experiment 20000479 PARAMETER Experiment Name: Zm_Drought_P Parameter: Timepoint (hr) Value: 48
  misc_feature: MA Experiment 20000479 PARAMETER Experiment Name: Zm_Drought_P Parameter: Tissue Value: Aerial
  misc_feature: MA Experiment 20000479 PARAMETER Experiment Name: Zm_Drought_P Parameter: Treatment Value: Drought vs. No Drought
  misc_feature: MA Experiment ID: 20000480 Result: Down-regulated in Transcription
  misc_feature: MA Experiment 20000480 PARAMETER Experiment Name: Zm_Drought_P Parameter: Age (day) Value: 11
  misc_feature: MA Experiment 20000480 PARAMETER Experiment Name: Zm_Drought_P Parameter: Organism Value: Zea mays
  misc_feature: MA Experiment 20000480 PARAMETER Experiment Name: Zm_Drought_P Parameter: Plant Line Value: 35A19
  misc_feature: MA Experiment 20000480 PARAMETER Experiment Name: Zm_Drought_P Parameter: Timepoint (hr) Value: 72
  misc_feature: MA Experiment 20000480 PARAMETER Experiment Name: Zm_Drought_P Parameter: Tissue Value: Aerial
  misc_feature: MA Experiment 20000480 PARAMETER Experiment Name: Zm_Drought_P Parameter: Treatment Value: Drought vs. No Drought
  misc_feature: MA Experiment ID: 20000492 Result: Down-regulated in Transcription
  misc_feature: MA Experiment 20000492 PARAMETER Experiment Name: Zm_Hybrid_Seed_Dev_P Parameter: DAP Value: 12
  misc_feature: MA Experiment 20000492 PARAMETER Experiment Name: Zm_Hybrid_Seed_Dev_P Parameter: Organism Value: Zea mays
  misc_feature: MA Experiment 20000492 PARAMETER Experiment Name: Zm_Hybrid_Seed_Dev_P Parameter: Plant Line Value: 35A19
  misc_feature: MA Experiment 20000492 PARAMETER Experiment Name: Zm_Hybrid_Seed_Dev_P Parameter: Tissue Value: Fert Kernel vs. Unfert Floret
  misc_feature: MA Experiment ID: 20000535 Result: Down-regulated in Transcription
  misc_feature: MA Experiment 20000535 PARAMETER Experiment Name: Zm_Hybrid_Seed_Dev_P Parameter: DAP Value: 30 vs. 12
  misc_feature: MA Experiment 20000535 PARAMETER Experiment Name: Zm_Hybrid_Seed_Dev_P Parameter: Organism Value: Zea mays
  misc_feature: MA Experiment 20000535 PARAMETER Experiment Name: Zm_Hybrid_Seed_Dev_P Parameter: Plant Line Value: 35A19
  misc_feature: MA Experiment 20000535 PARAMETER Experiment Name: Zm_Hybrid_Seed_Dev_P Parameter: Tissue Value: Embryo vs. Unfert Floret
aatcgaaaatttggtcgaaataaacaagcagagcagaaaaccccccacacgctttagttggccgtccgtccgtccgtctctgaggagcacacagcagtcgattttaaactgcagctacagaggtcaggtcaggggacacagcctgagcggctggctggcgggggctagcgagcggcgccacagcgcagcacgcagagagccagggcggcggccatggcgagcgcggcgagtggcggcggcgggtcgctgaagcggatgggcccgctccgggtacagtactacatcgtgatgggcgcggtggcagcggcggtggtgctggccacgctgcgctacatgccggggccagccgtcccggcgaccaccgcccgtaccagcggaggcggcgtcgtgcgctcggccccagcagccgcggccgtccctgtgcccgtgcccgccgtggaggtagaaacgggggaggatgagcaggcgcagaggaggaggaggaggaggaagaagaagggtgacggggtcgtgctcttcaacttcggcgactccaacagcgacacgggcggcgtggcggcggtcatggggatccgcatcgcgccgccggagggcagggcctacttccaccaccccacggggcggctctccgacggacgcgtcatcctcgacttcatctgtgagagcctgggcatgccgcacctgagtccgttcatgaagccgctgggctccaacttctccaacggcgtcaacttcgccattgcagggtccacggccatgccgggagtaaccaccttctcgctggacgtgcaggtggatcagttcgtcttcttcaaggagagatgcctcgactccatcgagagaggtgagagtgccccgattgttgagaaggcgttcccagatgctatatacaccatggacatcgggcacaacgatataaacggtgttctccacttgccctatcatacaatgctcgaaaatctccccccagtaattgctgaaatcaagaaagccatcgagaggttgcacgagaatggagccaggaagttctggatacatggaacgggagcattagggtgcatgcctcagaagctttctatgccgagggatgacgacagcgacctcgatgagcatggatgcatcgcaagcattaataatgtctgcaagaagttcaattccttgctgagtgaagccttggacgagctgcgtttgacactgaaaagttcgactatcgtctttgtggatatgttcgctatcaagtatgatcttgttgccaaccacacgaaatatgggattgagaagccattgatgacatgttgtggtcatggaggccccccttacaactatgaccccaaggagagctgcatgacttcggacaaatacctgtgcaagcttggcgaaaagttcataagctgggacggggttcacttcactgatgctgcaaatggcattgtggcttccaaagtactcagtggtgagtacaacattcccagggtcaagctggccagcctcgtccccgttccaaaatctgacgattaatggtgatgcagcaccttaattggcctttagtttggcctatcaaggatgatgaagatgaaactactaacaaaactgacaccaccgaagtttaattattttgaggttcttacgttacatccattgtagaagaagactttccttttgtttacttctctttttgtacaatcggcgcatatgtatatcctagggttaatatatggcgatgcaggtgtctgtaccatgtataattttctttttgaattttgggtctgttggc

SEQ ID NO: 7705 - protein, 434 aa, Zea mays subsp. mays
  peptide (1)..(434): Ceres Seq. ID no. 12349252
  misc_feature (101)..(411): Pfam Name: GDSL-like Lipase/Acylhydrolase Pfam Description: GDSL-like Lipase/Acylhydrolase
  misc_feature (6)..(427): Homolog of NCBI NO: 34894838 NR Description: putative lipase homolog [Oryza sativa (japonica group)] >gi|13365800|dbj|BAB39238.1| putative lipase homolog
  misc_feature (51)..(421): Homolog of NCBI NO: 34894866 NR Description: putative lipase homolog [Oryza sativa (japonica group)] >gi|14164537|dbj|BAB55786.1| putative lipase homolog
  misc_feature (100)..(419): Homolog of NCBI NO: 15217506 NR Description: putative lipase; protein id: At1g09390.1
  misc_feature (100)..(419): Homolog of NCBI NO: 15223585 NR Description: nodule-specific protein, putative; protein id: [Arabidopsis thaliana] >gi|25404142|pir||D96608 hypothetical
  misc_feature (150)..(422): Homolog of NCBI NO: 34894844 NR Description: putative lipase homolog [Oryza sativa (japonica group)] >gi|13365803|dbj|BAB39241.1| putative lipase homolog
  misc_feature (105)..(400): Homolog of NCBI NO: 25336281 NR Description: lipase-like protein Lip-4 [imported] - thaliana (fragment) >gi|3220021|gb|AAC23651.1| lipase homolog
  misc_feature (100)..(262): Homolog of NCBI NO: 15228721 NR Description: putative protein; protein id: At3g62280.1
  misc_feature (286)..(423): Homolog of NCBI NO: 15228721 NR Description: putative protein; protein id: At3g62280.1
  misc_feature (101)..(419): Homolog of NCBI NO: 25405771 NR Description: hypothetical protein T22H22.20 [imported] - thaliana >gi|3776573|gb|AAC64890.1| Similar to nodulins and homolog F14J9.5 gi|3482914 from Arabidopsis thaliana BAC
  misc_feature (102)..(419): Homolog of NCBI NO: 18405064 NR Description: early nodule-specific protein, putative; protein At1g54790.1, supported by cDNA: 122943. [Arabidopsis thaliana]
MASAASGGGGSLKRMGPLRVQYYIVMGAVAAAVVLATLRYMPGPAVPATTARTSGGGVVRSAPAAAAVPVPVPAVEVETGEDEQAQRRRRRRKKKGDGVVLFNFGDSNSDTGGVAAVMGIRIAPPEGRAYFHHPTGRLSDGRVILDFICESLGMPHLSPFMKPLGSNFSNGVNFAIAGSTAMPGVTTFSLDVQVDQFVFFKERCLDSIERGESAPIVEKAFPDAIYTMDIGHNDINGVLHLPYHTMLENLPPVIAEIKKAIERLHENGARKFWIHGTGALGCMPQKLSMPRDDDSDLDEHGCIASINNVCKKFNSLLSEALDELRLTLKSSTIVFVDMFAIKYDLVANHTKYGIEKPLMTCCGHGGPPYNYDPKESCMTSDKYLCKLGEKFISWDGVHFTDAANGIVASKVLSGEYNIPRVKLASLVPVPKSDD

SEQ ID NO: 7706 - protein, 420 aa, Zea mays subsp. mays
  peptide (1)..(420): Ceres Seq. ID no. 12349253
  misc_feature (87)..(397): Pfam Name: GDSL-like Lipase/Acylhydrolase Pfam Description: GDSL-like Lipase/Acylhydrolase
  misc_feature (1)..(413): Homolog of NCBI NO: 34894838 NR Description: putative lipase homolog [Oryza sativa (japonica group)] >gi|13365800|dbj|BAB39238.1| putative lipase homolog
  misc_feature (37)..(407): Homolog of NCBI NO: 34894866 NR Description: putative lipase homolog [Oryza sativa (japonica group)] >gi|14164537|dbj|BAB55786.1| putative lipase homolog
  misc_feature (86)..(405): Homolog of NCBI NO: 15217506 NR Description: putative lipase; protein id: At1g09390.1
  misc_feature (86)..(405): Homolog of NCBI NO: 15223585 NR Description: nodule-specific protein, putative; protein id: [Arabidopsis thaliana] >gi|25404142|pir||D96608 hypothetical
  misc_feature (136)..(408): Homolog of NCBI NO: 34894844 NR Description: putative lipase homolog [Oryza sativa (japonica group)] >gi|13365803|dbj|BAB39241.1| putative lipase homolog
  misc_feature (91)..(386): Homolog of NCBI NO: 25336281 NR Description: lipase-like protein Lip-4 [imported] - thaliana (fragment) >gi|3220021|gb|AAC23651.1| lipase homolog
  misc_feature (86)..(248): Homolog of NCBI NO: 15228721 NR Description: putative protein; protein id: At3g62280.1
  misc_feature (272)..(409): Homolog of NCBI NO: 15228721 NR Description: putative protein; protein id: At3g62280.1
  misc_feature (87)..(405): Homolog of NCBI NO: 25405771 NR Description: hypothetical protein T22H22.20 [imported] - thaliana >gi|3776573|gb|AAC64890.1| Similar to nodulins and homolog F14J9.5 gi|3482914 from Arabidopsis thaliana BAC
  misc_feature (88)..(405): Homolog of NCBI NO: 18405064 NR Description: early nodule-specific protein, putative; protein At1g54790.1, supported by cDNA: 122943. [Arabidopsis thaliana]
MGPLRVQYYIVMGAVAAAVVLATLRYMPGPAVPATTARTSGGGVVRSAPAAAAVPVPVPAVEVETGEDEQAQRRRRRRKKKGDGVVLFNFGDSNSDTGGVAAVMGIRIAPPEGRAYFHHPTGRLSDGRVILDFICESLGMPHLSPFMKPLGSNFSNGVNFAIAGSTAMPGVTTFSLDVQVDQFVFFKERCLDSIERGESAPIVEKAFPDAIYTMDIGHNDINGVLHLPYHTMLENLPPVIAEIKKAIERLHENGARKFWIHGTGALGCMPQKLSMPRDDDSDLDEHGCIASINNVCKKFNSLLSEALDELRLTLKSSTIVFVDMFAIKYDLVANHTKYGIEKPLMTCCGHGGPPYNYDPKESCMTSDKYLCKLGEKFISWDGVHFTDAANGIVASKVLSGEYNIPRVKLASLVPVPKSDD

SEQ ID NO: 7707 - protein, 409 aa, Zea mays subsp. mays
  peptide (1)..(409): Ceres Seq. ID no. 12349254
  misc_feature (76)..(386): Pfam Name: GDSL-like Lipase/Acylhydrolase Pfam Description: GDSL-like Lipase/Acylhydrolase
  misc_feature (1)..(402): Homolog of NCBI NO: 34894838 NR Description: putative lipase homolog [Oryza sativa (japonica group)] >gi|13365800|dbj|BAB39238.1| putative lipase homolog
  misc_feature (26)..(396): Homolog of NCBI NO: 34894866 NR Description: putative lipase homolog [Oryza sativa (japonica group)] >gi|14164537|dbj|BAB55786.1| putative lipase homolog
  misc_feature (75)..(394): Homolog of NCBI NO: 15217506 NR Description: putative lipase; protein id: At1g09390.1
  misc_feature (75)..(394): Homolog of NCBI NO: 15223585 NR Description: nodule-specific protein, putative; protein id: [Arabidopsis thaliana] >gi|25404142|pir||D96608 hypothetical
  misc_feature (125)..(397): Homolog of NCBI NO: 34894844 NR Description: putative lipase homolog [Oryza sativa (japonica group)] >gi|13365803|dbj|BAB39241.1| putative lipase homolog
  misc_feature (80)..(375): Homolog of NCBI NO: 25336281 NR Description: lipase-like protein Lip-4 [imported] - thaliana (fragment) >gi|3220021|gb|AAC23651.1| lipase homolog
  misc_feature (75)..(237): Homolog of NCBI NO: 15228721 NR Description: putative protein; protein id: At3g62280.1
  misc_feature (261)..(398): Homolog of NCBI NO: 15228721 NR Description: putative protein; protein id: At3g62280.1
  misc_feature (76)..(394): Homolog of NCBI NO: 25405771 NR Description: hypothetical protein T22H22.20 [imported] - thaliana >gi|3776573|gb|AAC64890.1| Similar to nodulins and homolog F14J9.5 gi|3482914 from Arabidopsis thaliana BAC
  misc_feature (77)..(394): Homolog of NCBI NO: 18405064 NR Description: early nodule-specific protein, putative; protein At1g54790.1, supported by cDNA: 122943. [Arabidopsis thaliana]
MGAVAAAVVLATLRYMPGPAVPATTARTSGGGVVRSAPAAAAVPVPVPAVEVETGEDEQAQRRRRRRKKKGDGVVLFNFGDSNSDTGGVAAVMGIRIAPPEGRAYFHHPTGRLSDGRVILDFICESLGMPHLSPFMKPLGSNFSNGVNFAIAGSTAMPGVTTFSLDVQVDQFVFFKERCLDSIERGESAPIVEKAFPDAIYTMDIGHNDINGVLHLPYHTMLENLPPVIAEIKKAIERLHENGARKFWIHGTGALGCMPQKLSMPRDDDSDLDEHGCIASINNVCKKFNSLLSEALDELRLTLKSSTIVFVDMFAIKYDLVANHTKYGIEKPLMTCCGHGGPPYNYDPKESCMTSDKYLCKLGEKFISWDGVHFTDAANGIVASKVLSGEYNIPRVKLASLVPVPKSDD

SEQ ID NO: 7708 - DNA, 1291 bp, Zea mays subsp. mays
  misc_feature (1)..(1291): Ceres Seq. ID no. 13494949
  misc_feature: MA Experiment ID: 108544 Result: Up-regulated in Transcription
  misc_feature: MA Experiment ID: 108689 Result: Down-regulated in Transcription
  misc_feature: MA Experiment 108689 PARAMETER Experiment Name: Zm_Drought_Roots_P Parameter: Age (day) Value: 9
  misc_feature: MA Experiment 108689 PARAMETER Experiment Name: Zm_Drought_Roots_P Parameter: Organism Value: Zea mays
  misc_feature: MA Experiment 108689 PARAMETER Experiment Name: Zm_Drought_Roots_P Parameter: Plant Line Value: 35A19
  misc_feature: MA Experiment 108689 PARAMETER Experiment Name: Zm_Drought_Roots_P Parameter: Timepoint (hr) Value: 24
  misc_feature: MA Experiment 108689 PARAMETER Experiment Name: Zm_Drought_Roots_P Parameter: Tissue Value: Roots
  misc_feature: MA Experiment 108689 PARAMETER Experiment Name: Zm_Drought_Roots_P Parameter: Treatment Value: Drought vs. No Drought
gtttgtgatgaagcactgtcgtcgcccatgacgggaaaacggctccatatacgtactactaacgtacacaccacagcgactctccggccatgcagttgccggctgcacaacttgtgcaagtgcatgcatgcatggatttggatccatgcatggccacagcccacagcccacaggggaggggaaggtgaggccgcgccgcgaggaaccgcgtcgaccttgtcgtcgatgttggcttgcaaggcgagcccgagccggccgtgcgtcgtcccccttgtttgcctgctggtggtggcggccgcagtcgtcgtcgtcgctgcctcggcgccgccggcggaggcggcgttcgacgacaactacgtggcgcagtggggtagagatggttatcaccttgtcgtccggggcacgggaggcgaatgtcaccatggaccagagctctggtgcccgggttccggtccaagtccacgtacggctcagggttcttccacatgaggatgaagctgccctccgggtacacggccggcgtcgtcacgaccttctacctcatctcgcagccggaggatgggagccgcgacgaggtggacttggagttcctgggcgacaaggccggcgtgcccatcaccctccagaccaacgtcttcgtcgacggccgcggcgacagggagcagcggacgcgcctctggttcgaccccgccgccgacttccacgactacaagatcctctggaacccataccagctcgtgatgttcgtggacgacacgccggtccgggtgctgaggaacctgacgggcgccgtgccggggtacccgttcccggggaagcagacgatgctgatccgcgcgagcgtgtgggacggctccgactgggccacggacggcggccggaccaaggtggactggtccaggggccccttcaccgccggctaccggggcttcgacgtcgacggctgcgccaacaacgggagcgacgcgtgccaatcgcccgacctatggtggaacgccgccgagtaccggaacatcaccgcggagcagcgggcggcgtacgaggacgtgaagaggagttacatgaactacgactactgcgccgataaggccaggtttaacagcaccaccgtacccattgaatgcaactacgcttgagaagccagttaggagtggcggcgttgtatatcaacggtttatatatatatattatatatatatacacacacacgaaaaagatatgtcttcttatttgttgcaagggtttaaatatgcaaatgcttataaggactaaaaaaatatatttccatgtc

SEQ ID NO: 7709 - protein, 319 aa, Zea mays subsp. mays
  peptide (1)..(319): Ceres Seq. ID no. 13494950
MHGFGSMHGHSPQPTGEGKVRPRREEPRRPCRRCWLARRARAGRASSPLFACWWWRPQSSSSLPRRRRRRRRSTTTTWRSGVEMVITLSSGAREANVTMDQSSGARVPVQVHVRLRVLPHEDEAALRVHGRRRHDLLPHLAAGGWEPRRGGLGVPGRQGRRAHHPPDQRLRRRPRRQGAADAPLVRPRRRLPRLQDPLEPIPARDVRGRHAGPGAEEPDGRRAGVPVPGEADDADPRERVGRLRLGHGRRPDQGGLVQGPLHRRLPGLRRRRLRQQRERRVPIARPMVERRRVPEHHRGAAGGVRGREEELHELRLLRR

SEQ ID NO: 7710 - protein, 313 aa, Zea mays subsp. mays
  peptide (1)..(313): Ceres Seq. ID no. 13494951
MHGHSPQPTGEGKVRPRREEPRRPCRRCWLARRARAGRASSPLFACWWWRPQSSSSLPRRRRRRRRSTTTTWRSGVEMVITLSSGAREANVTMDQSSGARVPVQVHVRLRVLPHEDEAALRVHGRRRHDLLPHLAAGGWEPRRGGLGVPGRQGRRAHHPPDQRLRRRPRRQGAADAPLVRPRRRLPRLQDPLEPIPARDVRGRHAGPGAEEPDGRRAGVPVPGEADDADPRERVGRLRLGHGRRPDQGGLVQGPLHRRLPGLRRRRLRQQRERRVPIARPMVERRRVPEHHRGAAGGVRGREEELHELRLLRR

SEQ ID NO: 7711 - protein, 240 aa, Zea mays subsp. mays
  peptide (1)..(240): Ceres Seq. ID no. 13494952
  misc_feature (11)..(162): Pfam Name: Glycosyl hydrolases family 16 Pfam Description: Glycosyl hydrolases family 16
  misc_feature (11)..(237): Homolog of NCBI NO: 15230246 NR Description: xyloglucan endotransglycosylase, putative
  misc_feature (11)..(239): Homolog of NCBI NO: 22328589 NR Description: xyloglucan endotransglycosylase, putative
  misc_feature (11)..(239): Homolog of NCBI NO: 38605518 NR Description: Putative xyloglucan
  misc_feature (11)..(239): Homolog of NCBI NO: 15235587 NR Description: xyloglucan endotransglycosylase, putative
  misc_feature (11)..(237): Homolog of NCBI NO: 5070246 NR Description: xyloglucan endo-transglycosylase-like protein
  misc_feature (11)..(237): Homolog of NCBI NO: 15240733 NR Description: xyloglucan endotransglycosylase (EXGT-A4) thaliana] >gi|5139002|dbj|BAA81669.1| endoxyloglucan transferase thaliana] >gi|5533315|gb|AAD45126.1|AF163822_1 endoxyloglucan
  misc_feature (11)..(237): Homolog of NCBI NO: 22947847 NR Description: xyloglucan endotransglycosylase [Malus x
  misc_feature (11)..(237): Homolog of NCBI NO: 15225605 NR Description: xyloglucan endotransglycosylase (ext/EXGT-A1)
  misc_feature (11)..(237): Homolog of NCBI NO: 27228078 NR Description: xyloglucan endotransglycosylase precursor
  misc_feature (11)..(237): Homolog of NCBI NO: 950299 NR Description: xyloglucan endotransglycosylase precursor
MSPWTRALVPGFRSKSTYGSGFFHMRMKLPSGYTAGVVTTFYLISQPEDGSRDEVDLEFLGDKAGVPITLQTNVFVDGRGDREQRTRLWFDPAADFHDYKILWNPYQLVMFVDDTPVRVLRNLTGAVPGYPFPGKQTMLIRASVWDGSDWATDGGRTKVDWSRGPFTAGYRGFDVDGCANNGSDACQSPDLWWNAAEYRNITAEQRAAYEDVKRSYMNYDYCADKARFNSTTVPIECNYA

SEQ ID NO: 7712 - DNA, 1467 bp, Zea mays subsp. mays
  misc_feature (1)..(1467): Ceres Seq. ID no. 12408629
  misc_feature: MA Experiment ID: 108522 Result: Down-regulated in Transcription
  misc_feature: MA Experiment 108522 PARAMETER Experiment Name: Zm_42deg_Heat_P Parameter: Age (day) Value: 8
  misc_feature: MA Experiment 108522 PARAMETER Experiment Name: Zm_42deg_Heat_P Parameter: Organism Value: Zea mays
  misc_feature: MA Experiment 108522 PARAMETER Experiment Name: Zm_42deg_Heat_P Parameter: Plant Line Value: 35A19
  misc_feature: MA Experiment 108522 PARAMETER Experiment Name: Zm_42deg_Heat_P Parameter: Temperature (deg C) Value: 42 vs. 22
  misc_feature: MA Experiment 108522 PARAMETER Experiment Name: Zm_42deg_Heat_P Parameter: Timepoint (hr) Value: 1
  misc_feature: MA Experiment 108522 PARAMETER Experiment Name: Zm_42deg_Heat_P Parameter: Tissue Value: Aerial
  misc_feature: MA Experiment ID: 108528 Result: Up-regulated in Transcription
  misc_feature: MA Experiment 108528 PARAMETER Experiment Name: Zm_Imbibed_Seeds_P Parameter: Age (day) Value: 5 vs. 2
  misc_feature: MA Experiment 108528 PARAMETER Experiment Name: Zm_Imbibed_Seeds_P Parameter: Organism Value: Zea mays
  misc_feature: MA Experiment 108528 PARAMETER Experiment Name: Zm_Imbibed_Seeds_P Parameter: Plant Line Value: 35A19
  misc_feature: MA Experiment 108528 PARAMETER Experiment Name: Zm_Imbibed_Seeds_P Parameter: Tissue Value: Aerial vs. Embryo
  misc_feature: MA Experiment ID: 108529 Result: Down-regulated in Transcription
  misc_feature: MA Experiment 108529 PARAMETER Experiment Name: Zm_Imbibed_Seeds_P Parameter: Age (day) Value: 5 vs. 2
  misc_feature: MA Experiment 108529 PARAMETER Experiment Name: Zm_Imbibed_Seeds_P Parameter: Organism Value: Zea mays
  misc_feature: MA Experiment 108529 PARAMETER Experiment Name: Zm_Imbibed_Seeds_P Parameter: Plant Line Value: 35A19
  misc_feature: MA Experiment 108529 PARAMETER Experiment Name: Zm_Imbibed_Seeds_P Parameter: Tissue Value: Roots vs. Embryo
  misc_feature: MA Experiment ID: 108535 Result: Up-regulated in Transcription
  misc_feature: MA Experiment 108535 PARAMETER Experiment Name: Zm_Meristem_P Parameter: Age (day) Value: 8
  misc_feature: MA Experiment 108535 PARAMETER Experiment Name: Zm_Meristem_P Parameter: Organism Value: Zea mays
  misc_feature: MA Experiment 108535 PARAMETER Experiment Name: Zm_Meristem_P Parameter: Plant Line Value: 35A19
  misc_feature: MA Experiment 108535 PARAMETER Experiment Name: Zm_Meristem_P Parameter: Tissue Value: Root Meristem vs. Above Root Meristem
  misc_feature: MA Experiment ID: 108543 Result: Down-regulated in Transcription
  misc_feature: MA Experiment ID: 108546 Result: Down-regulated in Transcription
  misc_feature: MA Experiment 108546 PARAMETER Experiment Name: Zm_Imbibed_Seeds_P Parameter: Age (day) Value: 3 vs. 2
  misc_feature: MA Experiment 108546 PARAMETER Experiment Name: Zm_Imbibed_Seeds_P Parameter: Organism Value: Zea mays
  misc_feature: MA Experiment 108546 PARAMETER Experiment Name: Zm_Imbibed_Seeds_P Parameter: Plant Line Value: 35A19
  misc_feature: MA Experiment 108546 PARAMETER Experiment Name: Zm_Imbibed_Seeds_P Parameter: Tissue Value: Roots vs. Embryo
  misc_feature: MA Experiment ID: 108547 Result: Up-regulated in Transcription
  misc_feature: MA Experiment 108547 PARAMETER Experiment Name: Zm_Imbibed_Seeds_P Parameter: Age (day) Value: 4 vs. 2
  misc_feature: MA Experiment 108547 PARAMETER Experiment Name: Zm_Imbibed_Seeds_P Parameter: Organism Value: Zea mays
  misc_feature: MA Experiment 108547 PARAMETER Experiment Name: Zm_Imbibed_Seeds_P Parameter: Plant Line Value: 35A19
  misc_feature: MA Experiment 108547 PARAMETER Experiment Name: Zm_Imbibed_Seeds_P Parameter: Tissue Value: Aerial vs. Embryo
atccgagttgccagccaattttgcatccccaccaccaatccaccaccccacacccagtgacagagacagaaggccggacggctacgcgacgcgacggagatggagcacacgaatcatcgccgccgccgtcaagctttggccaccgtgtcggcgacgacgacgctcctgctgcttctcctctgcctcgcggcgttgacgacggcagaggcgctgcgcgagcacagggacgagggcggcgctagcagcagtggcggaagcggaagcggctgcggcagcaacgccgccggcggcaagcaatcgccggccgtgtgggtgttcggggactcgtacgcggacacggggaacctgggcgacctcgggcgggagctgacccgcgagtggtacgacccgtacgggaccaccttccccggccggcccgccggccgcttctccgacggccgcgtcctcaccgacttcatagcctccgcgatgggagtgccaacgccggtggcgtacaagctgcgcaggggcgccgcgcgcgggctcgtggcgcgcggcatgaacttcgccgtcggcggcgcgggcgtgctggacaccggcaacttccagcgcaacatcggcgagcagatcgacctgttccaggcgcagcgcccgccgccgccgtcgccctccgcccgcggctgcgacgccggggtcgccgtcgtcgtcgtctccggcaacgactactcctacgccgccgacaaggacaacagcacaagcgccgcgatcgcctacatcccagcggtggtgcggcagctccgggagcagctgcggcggctgcgcgacgaggcgggcatgcgcaaggtggtggtcaccaacctgcaccccatggggtgcacgccgctcttcacccgcgctctcaactacacggcctgcgacccgctggccaacgccggcgccgcgcagcacaacgcggcgcttcagtccgtgctcgccgcgctcgacccggccaaccgcaccttcctcctcctcgacctcaacacgcccttcgccgccttagtcgacggcgcggcggcggcgacggcggaggagaggttcgcggagccgaggcggccgtgctgcgagagcttcagcgccgacggccactgcgggcagcaggacgacagcggcaggcggcagtacacgctgtgtagcgacccgagcaagcatttttactgggacgacgtccacccgacgcaggccgcgtgggccgccgtctcccgaacgttcaggcccatgattcaaggagttccttctgtctacctgatcacagctttgtttcgatcagatgagataaaaactagcactacttatcaaaagaaccaatcaatcaagggtggagagctaaccgagttgttggattagtgaaattctcctgtcattgttactctaaaaatggctggattttttgtattaaaaaaaatccacggtgcgagatgttggaataaaaaagcgatcttcagttcagtg

SEQ ID NO: 7713 - protein, 420 aa, Zea mays subsp. mays
  peptide (1)..(420): Ceres Seq. ID no. 12408630
  misc_feature (70)..(372): Pfam Name: GDSL-like Lipase/Acylhydrolase Pfam Description: GDSL-like Lipase/Acylhydrolase
  misc_feature (55)..(375): Homolog of NCBI NO: 34903978 NR Description: unnamed protein product [Oryza sativa (japonica group)] >gi|7523500|dbj|BAA94228.1| unnamed protein product
  misc_feature (68)..(373): Homolog of NCBI NO: 18390708 NR Description: expressed protein; protein id: At1g06990.1,
  misc_feature (70)..(372): Homolog of NCBI NO: 10241432 NR Description: putative lipase/acylhydrolase [Oryza sativa
  misc_feature (70)..(372): Homolog of NCBI NO: 28393114 NR Description: putative lipase acylhydrolase [Arabidopsis
  misc_feature (64)..(378): Homolog of NCBI NO: 20260298 NR Description: unknown protein [Arabidopsis thaliana]
  misc_feature (121)..(372): Homolog of NCBI NO: 6143883 NR Description: unknown protein [Arabidopsis thaliana]
  misc_feature (58)..(372): Homolog of NCBI NO: 15242810 NR Description: putative protein; protein id: At5g03600.1
  misc_feature (70)..(372): Homolog of NCBI NO: 15232799 NR Description: putative lipase acylhydrolase; protein id: [Arabidopsis thaliana] >gi|6681326|gb|AAF23243.1|AC015985_1
  misc_feature (70)..(377): Homolog of NCBI NO: 15242811 NR Description: putative protein; protein id: At5g03610.1, by cDNA: 13022., supported by cDNA: gi_13430833 [Arabidopsis
  misc_feature (68)..(373): Homolog of NCBI NO: 25336267 NR Description: hypothetical protein [imported] - Arabidopsis
MEHTNHRRRRQALATVSATTTLLLLLLCLAALTTAEALREHRDEGGASSSGGSGSGCGSNAAGGKQSPAVWVFGDSYADTGNLGDLGRELTREWYDPYGTTFPGRPAGRFSDGRVLTDFIASAMGVPTPVAYKLRRGAARGLVARGMNFAVGGAGVLDTGNFQRNIGEQIDLFQAQRPPPPSPSARGCDAGVAVVVVSGNDYSYAADKDNSTSAAIAYIPAVVRQLREQLRRLRDEAGMRKVVVTNLHPMGCTPLFTRALNYTACDPLANAGAAQHNAALQSVLAALDPANRTFLLLDLNTPFAALVDGAAAATAEERFAEPRRPCCESFSADGHCGQQDDSGRRQYTLCSDPSKHFYWDDVHPTQAAWAAVSRTFRPMIQGVPSVYLITALFRSDEIKTSTTYQKNQSIKGGELTELLD

SEQ ID NO: 7714 - protein, 297 aa, Zea mays subsp. mays
  peptide (1)..(297): Ceres Seq. ID no. 12408631
  misc_feature (1)..(249): Pfam Name: GDSL-like Lipase/Acylhydrolase Pfam Description: GDSL-like Lipase/Acylhydrolase
  misc_feature (1)..(254): Homolog of NCBI NO: 15242811 NR Description: putative protein; protein id: At5g03610.1, by cDNA: 13022., supported by cDNA: gi_13430833 [Arabidopsis
  misc_feature (1)..(249): Homolog of NCBI NO: 10241432 NR Description: putative lipase/acylhydrolase [Oryza sativa
  misc_feature (1)..(249): Homolog of NCBI NO: 15232799 NR Description: putative lipase acylhydrolase; protein id: [Arabidopsis thaliana] >gi|6681326|gb|AAF23243.1|AC015985_1
  misc_feature (1)..(249): Homolog of NCBI NO: 28393114 NR Description: putative lipase acylhydrolase [Arabidopsis
  misc_feature (1)..(249): Homolog of NCBI NO: 15242810 NR Description: putative protein; protein id: At5g03600.1
  misc_feature (1)..(255): Homolog of NCBI NO: 20260298 NR Description: unknown protein [Arabidopsis thaliana]
  misc_feature (1)..(249): Homolog of NCBI NO: 6143883 NR Description: unknown protein [Arabidopsis thaliana]
  misc_feature (1)..(252): Homolog of NCBI NO: 34903978 NR Description: unnamed protein product [Oryza sativa (japonica group)] >gi|7523500|dbj|BAA94228.1| unnamed protein product
  misc_feature (1)..(250): Homolog of NCBI NO: 18390708 NR Description: expressed protein; protein id: At1g06990.1,
  misc_feature (1)..(250): Homolog of NCBI NO: 25336267 NR Description: hypothetical protein [imported] - Arabidopsis
MGVPTPVAYKLRRGAARGLVARGMNFAVGGAGVLDTGNFQRNIGEQIDLFQAQRPPPPSPSARGCDAGVAVVVVSGNDYSYAADKDNSTSAAIAYIPAVVRQLREQLRRLRDEAGMRKVVVTNLHPMGCTPLFTRALNYTACDPLANAGAAQHNAALQSVLAALDPANRTFLLLDLNTPFAALVDGAAAATAEERFAEPRRPCCESFSADGHCGQQDDSGRRQYTLCSDPSKHFYWDDVHPTQAAWAAVSRTFRPMIQGVPSVYLITALFRSDEIKTSTTYQKNQSIKGGELTELLD

SEQ ID NO: 7715 - protein, 274 aa, Zea mays subsp. mays
  peptide (1)..(274): Ceres Seq. ID no. 12408632
  misc_feature (1)..(226): Pfam Name: GDSL-like Lipase/Acylhydrolase Pfam Description: GDSL-like Lipase/Acylhydrolase
  misc_feature (1)..(231): Homolog of NCBI NO: 15242811 NR Description: putative protein; protein id: At5g03610.1, by cDNA: 13022., supported by cDNA: gi_13430833 [Arabidopsis
  misc_feature (1)..(226): Homolog of NCBI NO: 10241432 NR Description: putative lipase/acylhydrolase [Oryza sativa
  misc_feature (1)..(226): Homolog of NCBI NO: 15232799 NR Description: putative lipase acylhydrolase; protein id: [Arabidopsis thaliana] >gi|6681326|gb|AAF23243.1|AC015985_1
  misc_feature (1)..(226): Homolog of NCBI NO: 28393114 NR Description: putative lipase acylhydrolase [Arabidopsis
  misc_feature (1)..(226): Homolog of NCBI NO: 15242810 NR Description: putative protein; protein id: At5g03600.1
  misc_feature (1)..(232): Homolog of NCBI NO: 20260298 NR Description: unknown protein [Arabidopsis thaliana]
  misc_feature (1)..(226): Homolog of NCBI NO: 6143883 NR Description: unknown protein [Arabidopsis thaliana]
  misc_feature (1)..(229): Homolog of NCBI NO: 34903978 NR Description: unnamed protein product [Oryza sativa (japonica group)] >gi|7523500|dbj|BAA94228.1| unnamed protein product
  misc_feature (1)..(227): Homolog of NCBI NO: 18390708 NR Description: expressed protein; protein id: At1g06990.1,
  misc_feature (1)..(227): Homolog of NCBI NO: 25336267 NR Description: hypothetical protein [imported] - Arabidopsis
MNFAVGGAGVLDTGNFQRNIGEQIDLFQAQRPPPPSPSARGCDAGVAVVVVSGNDYSYAADKDNSTSAAIAYIPAVVRQLREQLRRLRDEAGMRKVVVTNLHPMGCTPLFTRALNYTACDPLANAGAAQHNAALQSVLAALDPANRTFLLLDLNTPFAALVDGAAAATAEERFAEPRRPCCESFSADGHCGQQDDSGRRQYTLCSDPSKHFYWDDVHPTQAAWAAVSRTFRPMIQGVPSVYLITALFRSDEIKTSTTYQKNQSIKGGELTELLD

SEQ ID NO: 7716 - DNA, 1407 bp, Zea mays subsp. mays
  misc_feature (1)..(1407): Ceres Seq. ID no. 12344326
  misc_feature: MA Experiment ID: 108522 Result: Down-regulated in Transcription
  misc_feature: MA Experiment 108522 PARAMETER Experiment Name: Zm_42deg_Heat_P Parameter: Age (day) Value: 8
  misc_feature: MA Experiment 108522 PARAMETER Experiment Name: Zm_42deg_Heat_P Parameter: Organism Value: Zea mays
  misc_feature: MA Experiment 108522 PARAMETER Experiment Name: Zm_42deg_Heat_P Parameter: Plant Line Value: 35A19
  misc_feature: MA Experiment 108522 PARAMETER Experiment Name: Zm_42deg_Heat_P Parameter: Temperature (deg C) Value: 42 vs. 22
  misc_feature: MA Experiment 108522 PARAMETER Experiment Name: Zm_42deg_Heat_P Parameter: Timepoint (hr) Value: 1
  misc_feature: MA Experiment 108522 PARAMETER Experiment Name: Zm_42deg_Heat_P Parameter: Tissue Value: Aerial
  misc_feature: MA Experiment ID: 108543 Result: Down-regulated in Transcription
  misc_feature: MA Experiment ID: 20000487 Result: Up-regulated in Transcription
  misc_feature: MA Experiment 20000487 PARAMETER Experiment Name: Zm_50mM_NH4NO3_L_to_H_P Parameter: Organism Value: Zea mays
  misc_feature: MA Experiment 20000487 PARAMETER Experiment Name: Zm_50mM_NH4NO3_L_to_H_P Parameter: Timepoint (hr) Value: 4
  misc_feature: MA Experiment 20000487 PARAMETER Experiment Name: Zm_50mM_NH4NO3_L_to_H_P Parameter: Tissue Value: Leaves
  misc_feature: MA Experiment 20000487 PARAMETER Experiment Name: Zm_50mM_NH4NO3_L_to_H_P Parameter: Treatment Value: 50mM NH4NO3 vs. 100mM Mannitol
  misc_feature: MA Experiment ID: 20000488 Result: Up-regulated in Transcription
  misc_feature: MA Experiment 20000488 PARAMETER Experiment Name: Zm_50mM_NH4NO3_L_to_H_P Parameter: Organism Value: Zea mays
  misc_feature: MA Experiment 20000488 PARAMETER Experiment Name: Zm_50mM_NH4NO3_L_to_H_P Parameter: Timepoint (hr) Value: 8
  misc_feature: MA Experiment 20000488 PARAMETER Experiment Name: Zm_50mM_NH4NO3_L_to_H_P Parameter: Tissue Value: Leaves
  misc_feature: MA Experiment 20000488 PARAMETER Experiment Name: Zm_50mM_NH4NO3_L_to_H_P Parameter: Treatment Value: 50mM NH4NO3 vs. 100mM Mannitol
  misc_feature: MA Experiment ID: 20000626 Result: Up-regulated in Transcription
  misc_feature: MA Experiment 20000626 PARAMETER Experiment Name: Zm_Herbicide-Treatments_P Parameter: Timepoint (hr) Value: 12
  misc_feature: MA Experiment 20000626 PARAMETER Experiment Name: Zm_Herbicide-Treatments_P Parameter: Tissue Value: Aerial
  misc_feature: MA Experiment 20000626 PARAMETER Experiment Name: Zm_Herbicide-Treatments_P Parameter: Treatment Value: Roundup vs. No Treatment
aataaaccccgcgccgccgctgccgcctcctgtcccggtcggatcctccgcgccgctcgcgccgccctcatcttcccagccccaacgcgacgcaccacaagggccctcgccatgtcgaagaaagtaggacgagcgaagaaagcagcgggcggcggcgagctgtcccgcttcctggagtcgcatctccagaccattagcgacaccttccagatgatggcggagtcggctccgggggccttggaccggacggagtggtctgaggtcgttaagctcggcgaccaggtctccaggcaggccaccgtcgctggaatgctctggagcggtgacttgcctgatgtagagaccctcaaagagaacatcgttgcttatttcaacatcctacagggatttcttttggtttgccacggaagcatggtcggtgctgggcctactctacacaagtccatctttgggtctgcaaaagacgtggttgactctagcttctcattgttcaagcatgctgtctctgcttatgaatctcgcagccctgaccgcaacacaactataccccaggtcacaggaactgtatgggaagcttgtgctgctctcaagaaggtgcctgcatcaaactgcattgccataggacgagccatgaccaggataggtgtgtgtctgaaagatgttctccgagaaatgaatgagctccctattggtgattctggtgttagtactgctgagaagtcttccaatggtgttgtcgacacaacgagttgttctgatagagatgagaggtctgatcttgatttagatgatgatgacgacgacgacgacgacgagttcactgaagaagaggttgctgttgccaagttggttattaacgtggtatctgattccttggttgtagtgaaagaggcaattcgtttcattactggtttgctcaggagctctggtaacaaagacaaagatgaggacaaagttgagccaatggagaaattgctgagccactgcaaggagatcgcggaccaggtcaatgatcttggggcttctgtatacccaccacaagactcgtctgagatggagctcgctataaaaagactgtacaatggcatcaacgggatgcgcaaggaaatagggaacctcggtggcgcacctgagagcacctttgccgcccttgaaggattcgaaaagtgccttggatctctgcgggccaggttagctgatgatgtggtgaacgagatggaaggtcttaatattagccattagcacgtactgttcagatttttccatagcagtgttatgccagtatatcttctggttttgcacgatggaaggagcttctgtggtttcagtaaatgaggcgtccggtctctgtactgatggcgttgttgcgggtcatcgattgtaaaggaagtgggcctggattgctgc

SEQ ID NO: 7717 - protein, 413 aa, Zea mays subsp. mays
  peptide (1)..(413): Ceres Seq. ID no. 12344327
  misc_feature (53)..(411): Homolog of NCBI NO: 15219987 NR Description: unknown protein; protein id: At1g22970.1,
  misc_feature (53)..(237): Homolog of NCBI NO: 15223962 NR Description: unknown protein; protein id: At1g71150.1
  misc_feature (42)..(228): Homolog of NCBI NO: 18395185 NR Description: unknown protein; protein id: At1g22980.1
  misc_feature (105)..(228): Homolog of NCBI NO: 25372690 NR Description: F19G10.7 protein - Arabidopsis thaliana
  misc_feature (218)..(407): Homolog of NCBI NO: 15223962 NR Description: unknown protein; protein id: At1g71150.1
NKPRAAAAASCPGRILRAARAALIFPAPTRRTTRALAMSKKVGRAKKAAGGGELSRFLESHLQTISDTFQMMAESAPGALDRTEWSEVVKLGDQVSRQATVAGMLWSGDLPDVETLKENIVAYFNILQGFLLVCHGSMVGAGPTLHKSIFGSAKDVVDSSFSLFKHAVSAYESRSPDRNTTIPQVTGTVWEACAALKKVPASNCIAIGRAMTRIGVCLKDVLREMNELPIGDSGVSTAEKSSNGVVDTTSCSDRDERSDLDLDDDDDDDDDEFTEEEVAVAKLVINVVSDSLVVVKEAIRFITGLLRSSGNKDKDEDKVEPMEKLLSHCKEIADQVNDLGASVYPPQDSSEMELAIKRLYNGINGMRKEIGNLGGAPESTFAALEGFEKCLGSLRARLADDVVNEMEGLNISH

SEQ ID NO: 7718 - protein, 376 aa, Zea mays subsp. mays
  peptide (1)..(376): Ceres Seq. ID no. 12344328
  misc_feature (16)..(374): Homolog of NCBI NO: 15219987 NR Description: unknown protein; protein id: At1g22970.1,
  misc_feature (16)..(200): Homolog of NCBI NO: 15223962 NR Description: unknown protein; protein id: At1g71150.1
  misc_feature (5)..(191): Homolog of NCBI NO: 18395185 NR Description: unknown protein; protein id: At1g22980.1
  misc_feature (68)..(191): Homolog of NCBI NO: 25372690 NR Description: F19G10.7 protein - Arabidopsis thaliana
  misc_feature (181)..(370): Homolog of NCBI NO: 15223962 NR Description: unknown protein; protein id: At1g71150.1
MSKKVGRAKKAAGGGELSRFLESHLQTISDTFQMMAESAPGALDRTEWSEVVKLGDQVSRQATVAGMLWSGDLPDVETLKENIVAYFNILQGFLLVCHGSMVGAGPTLHKSIFGSAKDVVDSSFSLFKHAVSAYESRSPDRNTTIPQVTGTVWEACAALKKVPASNCIAIGRAMTRIGVCLKDVLREMNELPIGDSGVSTAEKSSNGVVDTTSCSDRDERSDLDLDDDDDDDDDEFTEEEVAVAKLVINVVSDSLVVVKEAIRFITGLLRSSGNKDKDEDKVEPMEKLLSHCKEIADQVNDLGASVYPPQDSSEMELAIKRLYNGINGMRKEIGNLGGAPESTFAALEGFEKCLGSLRARLADDVVNEMEGLNISH

SEQ ID NO: 7719 - protein, 343 aa, Zea mays subsp. mays
  peptide (1)..(343): Ceres Seq. ID no. 12344329
  misc_feature (1)..(341): Homolog of NCBI NO: 15219987 NR Description: unknown protein; protein id: At1g22970.1,
  misc_feature (1)..(167): Homolog of NCBI NO: 15223962 NR Description: unknown protein; protein id: At1g71150.1
  misc_feature (1)..(158): Homolog of NCBI NO: 18395185 NR Description: unknown protein; protein id: At1g22980.1
  misc_feature (35)..(158): Homolog of NCBI NO: 25372690 NR Description: F19G10.7 protein - Arabidopsis thaliana
  misc_feature (148)..(337): Homolog of NCBI NO: 15223962 NR Description: unknown protein; protein id: At1g71150.1
MMAESAPGALDRTEWSEVVKLGDQVSRQATVAGMLWSGDLPDVETLKENIVAYFNILQGFLLVCHGSMVGAGPTLHKSIFGSAKDVVDSSFSLFKHAVSAYESRSPDRNTTIPQVTGTVWEACAALKKVPASNCIAIGRAMTRIGVCLKDVLREMNELPIGDSGVSTAEKSSNGVVDTTSCSDRDERSDLDLDDDDDDDDDEFTEEEVAVAKLVINVVSDSLVVVKEAIRFITGLLRSSGNKDKDEDKVEPMEKLLSHCKEIADQVNDLGASVYPPQDSSEMELAIKRLYNGINGMRKEIGNLGGAPESTFAALEGFEKCLGSLRARLADDVVNEMEGLNISH

SEQ ID NO: 7720 - DNA, 1388 bp, Zea mays subsp. mays
  misc_feature (1)..(1388): Ceres Seq. ID no. 12364160
  misc_feature: MA Experiment ID: 108504 Result: Up-regulated in Transcription
  misc_feature: MA Experiment 108504 PARAMETER Experiment Name: Zm_Drought_P Parameter: Age (day) Value: 8
  misc_feature: MA Experiment 108504 PARAMETER Experiment Name: Zm_Drought_P Parameter: Organism Value: Zea mays
  misc_feature: MA Experiment 108504 PARAMETER Experiment Name: Zm_Drought_P Parameter: Plant Line Value: 35A19
  misc_feature: MA Experiment 108504 PARAMETER Experiment Name: Zm_Drought_P Parameter: Timepoint (hr) Value: 12
  misc_feature: MA Experiment 108504 PARAMETER Experiment Name: Zm_Drought_P Parameter: Tissue Value: Aerial
  misc_feature: MA Experiment 108504 PARAMETER Experiment Name: Zm_Drought_P Parameter: Treatment Value: Drought vs. No Drought
  misc_feature: MA Experiment ID: 108513 Result: Up-regulated in Transcription
  misc_feature: MA Experiment 108513 PARAMETER Experiment Name: Zm_100uM_ABA_P Parameter: Age (day) Value: 8
  misc_feature: MA Experiment 108513 PARAMETER Experiment Name: Zm_100uM_ABA_P Parameter: Organism Value: Zea mays
  misc_feature: MA Experiment 108513 PARAMETER Experiment Name: Zm_100uM_ABA_P Parameter: Plant Line Value: 35A19
  misc_feature: MA Experiment 108513 PARAMETER Experiment Name: Zm_100uM_ABA_P Parameter: Timepoint (hr) Value: 6
  misc_feature: MA Experiment 108513 PARAMETER Experiment Name: Zm_100uM_ABA_P Parameter: Tissue Value: Aerial
  misc_feature: MA Experiment 108513 PARAMETER Experiment Name: Zm_100uM_ABA_P Parameter: Treatment Value: 100uM ABA vs. No Treatment
  misc_feature: MA Experiment ID: 108523 Result: Down-regulated in Transcription
  misc_feature: MA Experiment 108523 PARAMETER Experiment Name: Zm_42deg_Heat_P Parameter: Age (day) Value: 8
  misc_feature: MA Experiment 108523 PARAMETER Experiment Name: Zm_42deg_Heat_P Parameter: Organism Value: Zea mays
  misc_feature: MA Experiment 108523 PARAMETER Experiment Name: Zm_42deg_Heat_P Parameter: Plant Line Value: 35A19
  misc_feature: MA Experiment 108523 PARAMETER Experiment Name: Zm_42deg_Heat_P Parameter: Temperature (deg C) Value: 42 vs. 22
  misc_feature: MA Experiment 108523 PARAMETER Experiment Name: Zm_42deg_Heat_P Parameter: Timepoint (hr) Value: 6
  misc_feature: MA Experiment 108523 PARAMETER Experiment Name: Zm_42deg_Heat_P Parameter: Tissue Value: Aerial
  misc_feature: MA Experiment ID: 108535 Result: Down-regulated in Transcription
  misc_feature: MA Experiment 108535 PARAMETER Experiment Name: Zm_Meristem_P Parameter: Age (day) Value: 8
  misc_feature: MA Experiment 108535 PARAMETER Experiment Name: Zm_Meristem_P Parameter: Organism Value: Zea mays
  misc_feature: MA Experiment 108535 PARAMETER Experiment Name: Zm_Meristem_P Parameter: Plant Line Value: 35A19
  misc_feature: MA Experiment 108535 PARAMETER Experiment Name: Zm_Meristem_P Parameter: Tissue Value: Root Meristem vs. Above Root Meristem
  misc_feature: MA Experiment ID: 108539 Result: Up-regulated in Transcription
  misc_feature: MA Experiment 108539 PARAMETER Experiment Name: Zm_20percent_PEG_P Parameter: Age (day) Value: 8
  misc_feature: MA Experiment 108539 PARAMETER Experiment Name: Zm_20percent_PEG_P Parameter: Organism Value: Zea mays
  misc_feature: MA Experiment 108539 PARAMETER Experiment Name: Zm_20percent_PEG_P Parameter: Plant Line Value: 35A19
  misc_feature: MA Experiment 108539 PARAMETER Experiment Name: Zm_20percent_PEG_P Parameter: Timepoint (hr) Value: 1
  misc_feature: MA Experiment 108539 PARAMETER Experiment Name: Zm_20percent_PEG_P Parameter: Tissue Value: Aerial
  misc_feature: MA Experiment 108539 PARAMETER Experiment Name: Zm_20percent_PEG_P Parameter: Treatment Value: 20percent PEG vs. No Treatment
  misc_feature: MA Experiment ID: 108540 Result: Up-regulated in Transcription
  misc_feature: MA Experiment 108540 PARAMETER Experiment Name: Zm_20percent_PEG_P Parameter: Age (day) Value: 8
  misc_feature: MA Experiment 108540 PARAMETER Experiment Name: Zm_20percent_PEG_P Parameter: Organism Value: Zea mays
  misc_feature: MA Experiment 108540 PARAMETER Experiment Name: Zm_20percent_PEG_P Parameter: Plant Line Value: 35A19
  misc_feature: MA Experiment 108540 PARAMETER Experiment Name: Zm_20percent_PEG_P Parameter: Timepoint (hr) Value: 6
  misc_feature: MA Experiment 108540 PARAMETER Experiment Name: Zm_20percent_PEG_P Parameter: Tissue Value: Aerial
  misc_feature: MA Experiment 108540 PARAMETER Experiment Name: Zm_20percent_PEG_P Parameter: Treatment Value: 20percent PEG vs. No Treatment
  misc_feature: MA Experiment ID: 108545 Result: Down-regulated in Transcription
  misc_feature: MA Experiment 108545 PARAMETER Experiment Name: Zm_Imbibed_Seeds_P Parameter: Age (day) Value: 3 vs. 2
  misc_feature: MA Experiment 108545 PARAMETER Experiment Name: Zm_Imbibed_Seeds_P Parameter: Organism Value: Zea mays
  misc_feature: MA Experiment 108545 PARAMETER Experiment Name: Zm_Imbibed_Seeds_P Parameter: Plant Line Value: 35A19
  misc_feature: MA Experiment 108545 PARAMETER Experiment Name: Zm_Imbibed_Seeds_P Parameter: Tissue Value: Aerial vs. Embryo
  misc_feature: MA Experiment ID: 108559 Result: Down-regulated in Transcription
  misc_feature: MA Experiment 108559 PARAMETER Experiment Name: Zm_5mM_NO_P Parameter: Age (day) Value: 8
  misc_feature: MA Experiment 108559 PARAMETER Experiment Name: Zm_5mM_NO_P Parameter: Organism Value: Zea mays
  misc_feature: MA Experiment 108559 PARAMETER Experiment Name: Zm_5mM_NO_P Parameter: Plant Line Value: 35A19
  misc_feature: MA Experiment 108559 PARAMETER Experiment Name: Zm_5mM_NO_P Parameter: Timepoint (hr) Value: 12
  misc_feature: MA Experiment 108559 PARAMETER Experiment Name: Zm_5mM_NO_P Parameter: Tissue Value: Aerial
  misc_feature: MA Experiment 108559 PARAMETER Experiment Name: Zm_5mM_NO_P Parameter: Treatment Value: 5mM NO vs. No Treatment
  misc_feature: MA Experiment ID: 20000108 Result: Down-regulated in Transcription
  misc_feature: MA Experiment 20000108 PARAMETER Experiment Name: Zm_Root-Tips_P Parameter: Age (day) Value: 12
  misc_feature: MA Experiment 20000108 PARAMETER Experiment Name: Zm_Root-Tips_P Parameter: Organism Value: Zea mays
  misc_feature: MA Experiment 20000108 PARAMETER Experiment Name: Zm_Root-Tips_P Parameter: Tissue Value: Root tips vs. Root mid region    35
  misc_feature: MA Experiment 20000108 PARAMETER Experiment Name: Zm_Root-Tips_P Parameter: Tissue Value: Root tips vs. Root mid region   Sequence Listing-Misc Features (4)
  misc_feature: MA Experiment ID: 20000488 Result: Down-regulated in Transcription
  misc_feature: MA Experiment 20000488 PARAMETER Experiment Name: Zm_50mM_NH4NO3_L_to_H_P Parameter: Organism Value: Zea mays
  misc_feature: MA Experiment 20000488 PARAMETER Experiment Name: Zm_50mM_NH4NO3_L_to_H_P Parameter: Timepoint (hr) Value: 8
  misc_feature: MA Experiment 20000488 PARAMETER Experiment Name: Zm_50mM_NH4NO3_L_to_H_P Parameter: Tissue Value: Leaves
  misc_feature: MA Experiment 20000488 PARAMETER Experiment Name: Zm_50mM_NH4NO3_L_to_H_P Parameter: Treatment Value: 50mM NH4NO3 vs. 100mM Mannitol
  misc_feature: MA Experiment ID: 20000535 Result: Up-regulated in Transcription
  misc_feature: MA Experiment 20000535 PARAMETER Experiment Name: Zm_Hybrid_Seed_Dev_P Parameter: DAP Value: 30 vs. 12
  misc_feature: MA Experiment 20000535 PARAMETER Experiment Name: Zm_Hybrid_Seed_Dev_P Parameter: Organism Value: Zea mays
  misc_feature: MA Experiment 20000535 PARAMETER Experiment Name: Zm_Hybrid_Seed_Dev_P Parameter: Plant Line Value: 35A19
  misc_feature: MA Experiment 20000535 PARAMETER Experiment Name: Zm_Hybrid_Seed_Dev_P Parameter: Tissue Value: Embryo vs. Unfert Floret
aaaacatcctcctctcctcgcagacatcttatccctcccgatcgaggccccgtttcctcctcctccggccaccgcacttagctgtcttaacttgccgttcggttcgcagcctcacgcccatggctaggaagtgctctagctgtgggaacaacggccacaactcgaggacctgcagcgggcacggcgccgggggcgggggcgtgaggctgttcggggtgcagctgcacgtggggtcctcgcccgtggccatgaagaagtgcttcagcatggagtgcctgtcgtcgtcggcgtccgccgcgccggcgtactacgcggccgctctccgccgcgaccaacagcgcctcgncgtcggcctcctcctcctcgtcgctcgtctcggtggaggaggcccccgagaagatggcccacgggtacctctccgacgggctcatgggcagggcggcgcaggagaggaagaagggcgttccatggacggaggacgagcacaggcgattcctggcgggcctggagaagctcgggaagggcgactggcgaggcatctcccggcacttcgtgacgacgcggaccccgacgcaggtggccagccacgcccagaagtacttcctccggcagagcagcctgacgcacaagaagcgcaggtccagcctcttcgacgtggtggagaacgccgagagggcggcgacgagctccatcaagggcatggagcgcctgcggctcaaggacgccatcacgaccgcgaccgcgactggctccgcagaacccggaaccgggacgacggcacagctcccgccggccctgtcgctcggcgtcggcaggcccaccagcgaggcccgaccacgccgcgctgcctccgagcagcctgctgtccctgcagctgccgcggtgctcgggcgggaattgggccgcacggcgccgagcctggcccctggcgccgccgaaacacagccacccttcttcgtcgctgacggcggcaaaggctggtggcctggcgccggacctggagctgaagatctcgaccgcccggcagagcgagcaccagcagcaggtccagatggggccatcgctgccgccgccgccgccgccgccgcagaggacgccctttctggggaccatcagggtcacatgacatgaccggcaaagacggcggcggttagtagggaatatcctgctggtaggagaagagcttttgcccatctgaagctggagaaggttgcttcaaaagataggacggggtgggaaaactggaaagaaggaagcttttggcagcgtgtgcgtgtgtgtgtgttgctggcacctggcagtggcagccgagacgacgatggcgtcgtgtatcatgtgggtgttgtgtatatcatatcatcatcatccgaaagatggaaactttactg

SEQ ID NO: 7721 - protein, 320 aa, Zea mays subsp. mays
  peptide (1)..(320): Ceres Seq. ID no. 12364161
  misc_feature (42)..(59): Pfam Name: Zinc knuckle Pfam Description: Zinc knuckle
  misc_feature (40)..(105): Homolog of NCBI NO: 34906444 NR Description: P0671B11.14 [Oryza sativa (japonica
  misc_feature (40)..(78): Homolog of NCBI NO: 34912404 NR Description: putative Myb-related transcription factor [Oryza
  misc_feature (40)..(95): Homolog of NCBI NO: 34906364 NR Description: unnamed protein product [Oryza sativa (japonica group)] >gi|9558504|dbj|BAB03423.1| unnamed protein product
  misc_feature (40)..(107): Homolog of NCBI NO: 15241963 NR Description: putative protein; protein id: At5g56840.1
  misc_feature (40)..(93): Homolog of NCBI NO: 15238083 NR Description: Myb-related transcription activator-like; protein At5g47390.1, supported by cDNA: 102806., supported by cDNA:
  misc_feature (34)..(81): Homolog of NCBI NO: 15240300 NR Description: transcriptional activator - like protein; protein At5g61620.1 [Arabidopsis thaliana] >gi|9758477|dbj|BAB09006.1|
  misc_feature (115)..(115): Xaa is any aa, unknown or other
NILLSSQTSYPSRSRPRFLLLRPPHLAVLTCRSVRSLTPMARKCSSCGNNGHNSRTCSGHGAGGGGVRLFGVQLHVGSSPVAMKKCFSMECLSSSASAAPAYYAAALRRDQQRLXVGLLLLVARLGGGGPREDGPRVPLRRAHGQGGAGEEEGRSMDGGRAQAIPGGPGEAREGRLARHLPALRDDADPDAGGQPRPEVLPPAEQPDAQEAQVQPLRRGGERREGGDELHQGHGAPAAQGRHHDRDRDWLRRTRNRDDGTAPAGPVARRRQAHQRGPTTPRCLRAACCPCSCRGARAGIGPHGAEPGPWRRRNTATLLRR

SEQ ID NO: 7722 - protein, 281 aa, Zea mays subsp. mays
  peptide (1)..(281): Ceres Seq. ID no. 12364162
  misc_feature (3)..(20): Pfam Name: Zinc knuckle Pfam Description: Zinc knuckle
  misc_feature (1)..(66): Homolog of NCBI NO: 34906444 NR Description: P0671B11.14 [Oryza sativa (japonica
  misc_feature (1)..(39): Homolog of NCBI NO: 34912404 NR Description: putative Myb-related transcription factor [Oryza
  misc_feature (1)..(56): Homolog of NCBI NO: 34906364 NR Description: unnamed protein product [Oryza sativa (japonica group)] >gi|9558504|dbj|BAB03423.1| unnamed protein product
  misc_feature (1)..(68): Homolog of NCBI NO: 15241963 NR Description: putative protein; protein id: At5g56840.1
  misc_feature (1)..(54): Homolog of NCBI NO: 15238083 NR Description: Myb-related transcription activator-like; protein At5g47390.1, supported by cDNA: 102806., supported by cDNA:
  misc_feature (1)..(42): Homolog of NCBI NO: 15240300 NR Description: transcriptional activator - like protein; protein At5g61620.1 [Arabidopsis thaliana] >gi|9758477|dbj|BAB09006.1|
  misc_feature (76)..(76): Xaa is any aa, unknown or other
MARKCSSCGNNGHNSRTCSGHGAGGGGVRLFGVQLHVGSSPVAMKKCFSMECLSSSASAAPAYYAAALRRDQQRLXVGLLLLVARLGGGGPREDGPRVPLRRAHGQGGAGEEEGRSMDGGRAQAIPGGPGEAREGRLARHLPALRDDADPDAGGQPRPEVLPPAEQPDAQEAQVQPLRRGGERREGGDELHQGHGAPAAQGRHHDRDRDWLRRTRNRDDGTAPAGPVARRRQAHQRGPTTPRCLRAACCPCSCRGARAGIGPHGAEPGPWRRRNTATLLRR

SEQ ID NO: 7723 - protein, 243 aa, Zea mays subsp. mays
  peptide (1)..(243): Ceres Seq. ID no. 12364163
  misc_feature (21)..(68): Pfam Name: Myb-like DNA-binding domain Pfam Description: Myb-like DNA-binding domain
  misc_feature (1)..(98): Homolog of NCBI NO: 34906444 NR Description: P0671B11.14 [Oryza sativa (japonica
  misc_feature (1)..(118): Homolog of NCBI NO: 34912404 NR Description: putative Myb-related transcription factor [Oryza
  misc_feature (17)..(116): Homolog of NCBI NO: 34906364 NR Description: unnamed protein product [Oryza sativa (japonica group)] >gi|9558504|dbj|BAB03423.1| unnamed protein product
  misc_feature (4)..(96): Homolog of NCBI NO: 15241963 NR Description: putative protein; protein id: At5g56840.1
  misc_feature (1)..(87): Homolog of NCBI NO: 15238083 NR Description: Myb-related transcription activator-like; protein At5g47390.1, supported by cDNA: 102806., supported by cDNA:
  misc_feature (1)..(91): Homolog of NCBI NO: 12406995 NR Description: MCB2 protein [Hordeum vulgare subsp. vulgare]
  misc_feature (4)..(111): Homolog of NCBI NO: 15240300 NR Description: transcriptional activator - like protein; protein At5g61620.1 [Arabidopsis thaliana] >gi|9758477|dbj|BAB09006.1|
  misc_feature (1)..(184): Homolog of NCBI NO: 28812130 NR Description: P0443G08.23 [Oryza sativa (japonica
  misc_feature (1)..(87): Homolog of NCBI NO: 24850307 NR Description: transcription factor MYBS3 [Oryza sativa
  misc_feature (1)..(87): Homolog of NCBI NO: 37536856 NR Description: putative Myb-related protein [Oryza sativa
MAHGYLSDGLMGRAAQERKKGVPWTEDEHRRFLAGLEKLGKGDWRGISRHFVTTRTPTQVASHAQKYFLRQSSLTHKKRRSSLFDVVENAERAATSSIKGMERLRLKDAITTATATGSAEPGTGTTAQLPPALSLGVGRPTSEARPRRAASEQPAVPAAAAVLGRELGRTAPSLAPGAAETQPPFFVADGGKGWWPGAGPGAEDLDRPAERAPAAGPDGAIAAAAAAAAAEDALSGDHQGHMT

SEQ ID NO: 7724 - DNA, 1542 bp, Zea mays subsp. mays
  misc_feature (1)..(1542): Ceres Seq. ID no. 12365770
  misc_feature: MA Experiment ID: 108523 Result: Down-regulated in Transcription
  misc_feature: MA Experiment 108523 PARAMETER Experiment Name: Zm_42deg_Heat_P Parameter: Age (day) Value: 8
  misc_feature: MA Experiment 108523 PARAMETER Experiment Name: Zm_42deg_Heat_P Parameter: Organism Value: Zea mays
  misc_feature: MA Experiment 108523 PARAMETER Experiment Name: Zm_42deg_Heat_P Parameter: Plant Line Value: 35A19
  misc_feature: MA Experiment 108523 PARAMETER Experiment Name: Zm_42deg_Heat_P Parameter: Temperature (deg C) Value: 42 vs. 22
  misc_feature: MA Experiment 108523 PARAMETER Experiment Name: Zm_42deg_Heat_P Parameter: Timepoint (hr) Value: 6
  misc_feature: MA Experiment 108523 PARAMETER Experiment Name: Zm_42deg_Heat_P Parameter: Tissue Value: Aerial
  misc_feature: MA Experiment ID: 108529 Result: Down-regulated in Transcription
  misc_feature: MA Experiment 108529 PARAMETER Experiment Name: Zm_Imbibed_Seeds_P Parameter: Age (day) Value: 5 vs. 2
  misc_feature: MA Experiment 108529 PARAMETER Experiment Name: Zm_Imbibed_Seeds_P Parameter: Organism Value: Zea mays
  misc_feature: MA Experiment 108529 PARAMETER Experiment Name: Zm_Imbibed_Seeds_P Parameter: Plant Line Value: 35A19
  misc_feature: MA Experiment 108529 PARAMETER Experiment Name: Zm_Imbibed_Seeds_P Parameter: Tissue Value: Roots vs. Embryo
  misc_feature: MA Experiment ID: 108536 Result: Down-regulated in Transcription
  misc_feature: MA Experiment 108536 PARAMETER Experiment Name: Zm_Meristem_P Parameter: Age (day) Value: 8
  misc_feature: MA Experiment 108536 PARAMETER Experiment Name: Zm_Meristem_P Parameter: Organism Value: Zea mays
  misc_feature: MA Experiment 108536 PARAMETER Experiment Name: Zm_Meristem_P Parameter: Plant Line Value: 35A19
  misc_feature: MA Experiment 108536 PARAMETER Experiment Name: Zm_Meristem_P Parameter: Tissue Value: Shoot Meristem vs. Above Shoot Meristem
  misc_feature: MA Experiment ID: 108543 Result: Up-regulated in Transcription
  misc_feature: MA Experiment ID: 108546 Result: Down-regulated in Transcription
  misc_feature: MA Experiment 108546 PARAMETER Experiment Name: Zm_Imbibed_Seeds_P Parameter: Age (day) Value: 3 vs. 2
  misc_feature: MA Experiment 108546 PARAMETER Experiment Name: Zm_Imbibed_Seeds_P Parameter: Organism Value: Zea mays
  misc_feature: MA Experiment 108546 PARAMETER Experiment Name: Zm_Imbibed_Seeds_P Parameter: Plant Line Value: 35A19
  misc_feature: MA Experiment 108546 PARAMETER Experiment Name: Zm_Imbibed_Seeds_P Parameter: Tissue Value: Roots vs. Embryo
  misc_feature: MA Experiment ID: 108556 Result: Down-regulated in Transcription
  misc_feature: MA Experiment 108556 PARAMETER Experiment Name: Zm_Drought_P Parameter: Age (day) Value: 9
  misc_feature: MA Experiment 108556 PARAMETER Experiment Name: Zm_Drought_P Parameter: Organism Value: Zea mays
  misc_feature: MA Experiment 108556 PARAMETER Experiment Name: Zm_Drought_P Parameter: Plant Line Value: 35A19
  misc_feature: MA Experiment 108556 PARAMETER Experiment Name: Zm_Drought_P Parameter: Timepoint (hr) Value: 24
  misc_feature: MA Experiment 108556 PARAMETER Experiment Name: Zm_Drought_P Parameter: Tissue Value: Aerial
  misc_feature: MA Experiment 108556 PARAMETER Experiment Name: Zm_Drought_P Parameter: Treatment Value: Drought vs. No Drought
  misc_feature: MA Experiment ID: 108597 Result: Down-regulated in Transcription
  misc_feature: MA Experiment 108597 PARAMETER Experiment Name: Zm_100uM_ABA_P Parameter: Age (day) Value: 9
  misc_feature: MA Experiment 108597 PARAMETER Experiment Name: Zm_100uM_ABA_P Parameter: Organism Value: Zea mays
  misc_feature: MA Experiment 108597 PARAMETER Experiment Name: Zm_100uM_ABA_P Parameter: Plant Line Value: 35A19
  misc_feature: MA Experiment 108597 PARAMETER Experiment Name: Zm_100uM_ABA_P Parameter: Timepoint (hr) Value: 24
  misc_feature: MA Experiment 108597 PARAMETER Experiment Name: Zm_100uM_ABA_P Parameter: Tissue Value: Aerial
  misc_feature: MA Experiment 108597 PARAMETER Experiment Name: Zm_100uM_ABA_P Parameter: Treatment Value: 100uM ABA vs. No Treatment
  misc_feature: MA Experiment ID: 108687 Result: Up-regulated in Transcription
  misc_feature: MA Experiment 108687 PARAMETER Experiment Name: Zm_Embryos-Flowers__P Parameter: Tissue Value: Embryo vs. Aerial+
  misc_feature: MA Experiment ID: 108688 Result: Down-regulated in Transcription
  misc_feature: MA Experiment 108688 PARAMETER Experiment Name: Zm_Embryos-Flowers__P Parameter: Tissue Value: Immature Flowers vs. Aerial+
  misc_feature: MA Experiment ID: 20000477 Result: Down-regulated in Transcription
  misc_feature: MA Experiment 20000477 PARAMETER Experiment Name: Zm_5mM_SA_P Parameter: Age (day) Value: 10
  misc_feature: MA Experiment 20000477 PARAMETER Experiment Name: Zm_5mM_SA_P Parameter: Organism Value: Zea mays
  misc_feature: MA Experiment 20000477 PARAMETER Experiment Name: Zm_5mM_SA_P Parameter: Plant Line Value: 35A19
  misc_feature: MA Experiment 20000477 PARAMETER Experiment Name: Zm_5mM_SA_P Parameter: Timepoint (hr) Value: 48
  misc_feature: MA Experiment 20000477 PARAMETER Experiment Name: Zm_5mM_SA_P Parameter: Tissue Value: Aerial
  misc_feature: MA Experiment 20000477 PARAMETER Experiment Name: Zm_5mM_SA_P Parameter: Treatment Value: 5mM SA vs. No Treatment
  misc_feature: MA Experiment ID: 20000478 Result: Down-regulated in Transcription
  misc_feature: MA Experiment 20000478 PARAMETER Experiment Name: Zm_5mM_SA_P Parameter: Age (day) Value: 11
  misc_feature: MA Experiment 20000478 PARAMETER Experiment Name: Zm_5mM_SA_P Parameter: Organism Value: Zea mays
  misc_feature: MA Experiment 20000478 PARAMETER Experiment Name: Zm_5mM_SA_P Parameter: Plant Line Value: 35A19
  misc_feature: MA Experiment 20000478 PARAMETER Experiment Name: Zm_5mM_SA_P Parameter: Timepoint (hr) Value: 72
  misc_feature: MA Experiment 20000478 PARAMETER Experiment Name: Zm_5mM_SA_P Parameter: Tissue Value: Aerial
  misc_feature: MA Experiment 20000478 PARAMETER Experiment Name: Zm_5mM_SA_P Parameter: Treatment Value: 5mM SA vs. No Treatment
  misc_feature: MA Experiment ID: 20000479 Result: Down-regulated in Transcription
  misc_feature: MA Experiment 20000479 PARAMETER Experiment Name: Zm_Drought_P Parameter: Age (day) Value: 10
  misc_feature: MA Experiment 20000479 PARAMETER Experiment Name: Zm_Drought_P Parameter: Organism Value: Zea mays
  misc_feature: MA Experiment 20000479 PARAMETER Experiment Name: Zm_Drought_P Parameter: Plant Line Value: 35A19
  misc_feature: MA Experiment 20000479 PARAMETER Experiment Name: Zm_Drought_P Parameter: Timepoint (hr) Value: 48
  misc_feature: MA Experiment 20000479 PARAMETER Experiment Name: Zm_Drought_P Parameter: Tissue Value: Aerial
  misc_feature: MA Experiment 20000479 PARAMETER Experiment Name: Zm_Drought_P Parameter: Treatment Value: Drought vs. No Drought
  misc_feature: MA Experiment ID: 20000480 Result: Down-regulated in Transcription
  misc_feature: MA Experiment 20000480 PARAMETER Experiment Name: Zm_Drought_P Parameter: Age (day) Value: 11
  misc_feature: MA Experiment 20000480 PARAMETER Experiment Name: Zm_Drought_P Parameter: Organism Value: Zea mays
  misc_feature: MA Experiment 20000480 PARAMETER Experiment Name: Zm_Drought_P Parameter: Plant Line Value: 35A19
  misc_feature: MA Experiment 20000480 PARAMETER Experiment Name: Zm_Drought_P Parameter: Timepoint (hr) Value: 72
  misc_feature: MA Experiment 20000480 PARAMETER Experiment Name: Zm_Drought_P Parameter: Tissue Value: Aerial
  misc_feature: MA Experiment 20000480 PARAMETER Experiment Name: Zm_Drought_P Parameter: Treatment Value: Drought vs. No Drought
  misc_feature: MA Experiment ID: 20000533 Result: Down-regulated in Transcription
  misc_feature: MA Experiment 20000533 PARAMETER Experiment Name: Zm_0.001percent_MeJA_P Parameter: Age (day) Value: 11
  misc_feature: MA Experiment 20000533 PARAMETER Experiment Name: Zm_0.001percent_MeJA_P Parameter: Organism Value: Zea mays
  misc_feature: MA Experiment 20000533 PARAMETER Experiment Name: Zm_0.001percent_MeJA_P Parameter: Plant Line Value: 35A19
  misc_feature: MA Experiment 20000533 PARAMETER Experiment Name: Zm_0.001percent_MeJA_P Parameter: Timepoint (hr) Value: 72
  misc_feature: MA Experiment 20000533 PARAMETER Experiment Name: Zm_0.001percent_MeJA_P Parameter: Tissue Value: Aerial
  misc_feature: MA Experiment 20000533 PARAMETER Experiment Name: Zm_0.001percent_MeJA_P Parameter: Treatment Value: 0.001percent MeJA vs. No Treatment
  misc_feature: MA Experiment ID: 20000534 Result: Down-regulated in Transcription
  misc_feature: MA Experiment 20000534 PARAMETER Experiment Name: Zm_Hybrid_Pollen_P Parameter: Age (day) Value: 8
  misc_feature: MA Experiment 20000534 PARAMETER Experiment Name: Zm_Hybrid_Pollen_P Parameter: Organism Value: Zea mays
  misc_feature: MA Experiment 20000534 PARAMETER Experiment Name: Zm_Hybrid_Pollen_P Parameter: Plant Line Value: 35A19
  misc_feature: MA Experiment 20000534 PARAMETER Experiment Name: Zm_Hybrid_Pollen_P Parameter: Tissue Value: Pollen vs. Aerial
  misc_feature: MA Experiment ID: 20000535 Result: Up-regulated in Transcription
  misc_feature: MA Experiment 20000535 PARAMETER Experiment Name: Zm_Hybrid_Seed_Dev_P Parameter: DAP Value: 30 vs. 12
  misc_feature: MA Experiment 20000535 PARAMETER Experiment Name: Zm_Hybrid_Seed_Dev_P Parameter: Organism Value: Zea mays
  misc_feature: MA Experiment 20000535 PARAMETER Experiment Name: Zm_Hybrid_Seed_Dev_P Parameter: Plant Line Value: 35A19
  misc_feature: MA Experiment 20000535 PARAMETER Experiment Name: Zm_Hybrid_Seed_Dev_P Parameter: Tissue Value: Embryo vs. Unfert Floret
  misc_feature: MA Experiment ID: 20000626 Result: Down-regulated in Transcription
  misc_feature: MA Experiment 20000626 PARAMETER Experiment Name: Zm_Herbicide-Treatments_P Parameter: Timepoint (hr) Value: 12
  misc_feature: MA Experiment 20000626 PARAMETER Experiment Name: Zm_Herbicide-Treatments_P Parameter: Tissue Value: Aerial
  misc_feature: MA Experiment 20000626 PARAMETER Experiment Name: Zm_Herbicide-Treatments_P Parameter: Treatment Value: Roundup vs. No Treatment
agtccccgtgcgccacgccacctgccagtactagctcgcccgctcgatcgcgcccatcaatcaatcaattctcgacctcactactcgatctcgtctcatcagtgtgagtgtccgagcacggcagcacgcgcaatggacgctctgctcgtgactacgaccttcctcgtccccgtgggtggcgctcctcctcgggtccgggtccgggtccgcggcggcgctgccgcgcgccttcttcgtgttcggtaactccctcgtggacaacggcaacaacaactacctgatgacgacggcgcgcgccgacgcgccgccctacgggatcgacttccccacgcacatggccacggggcggttctccaacgggctgaacatccccgacatcatcagcgagcacctcggctcccagcccgcgctgccgtacctgagccccgacctccgcggcgcccagctcctggtcggcgccaacttcgcgtccgccggcgtcggcatcctcaacgacaccgacatacagttcgtgaacatcatcaggatcggacagcagctgcgcaacttccaggagtaccagcagaggctggcggcgttcgtcggcgaggacgcggcgcggcaggccgtcaacgacgcgctcgtgctcatcacgctcggcggcaacgacttcgtcaacaactactacctggtgcccttctccgtccgctctcgccagtttgccatccaggactacgtcccctacctcatctccgagtacaggaagatcctcacgcggctgtacgagctcggggcccggcgcgtggtggtgacgggcaccgggatgatcgggtgcgtgccggcggagctcgccatgcacagcgtcgacggcgagtgcgcgcgcgacctcacggaggcggccgacctcttcaacccgcagctggtgcagatgctctccgagctcaacgccgacatcggcgccgacgtcttcatcgccgccaacaccaaccgggtcagcttcgacttcatgttcaacccgcaggactacgggttcgtgacgtccaaggtggcatgctgcgggcagggcccctacaacgggatcgggctgtgcacgccggcgtccaacgtgtgccccaaccgggacgtgtacgcgtactgggacgcgttccaccccacggagcgcgccaaccggatcatcgtcggccagttcatgcacggatccaccgaccacatcagccccatgaacatcagcaccatcctcgccatggacaacaggaactaggccctgcgcgtggcgtgcctcgacctcgatccatccatctctagccggctgggattgagatgccaatctgcactgccatggatccgtcccgacactggcagctataatactacgagacgacacacatagctactgcatgcatgcgtaatactactagtataagttcgtgtcattggtaattggttatgttcatgaagcttcttttttgtggtttagattgacgtgaattgatggtgagaaattaatcctttattagagatgcatgggttcaatataatacagctgtatgtcaagtttcttcg

SEQ ID NO: 7725 - protein, 319 aa, Zea mays subsp. mays
  peptide (1)..(319): Ceres Seq. ID no. 12365771
  misc_feature (1)..(295): Pfam Name: GDSL-like Lipase/Acylhydrolase Pfam Description: GDSL-like Lipase/Acylhydrolase
  misc_feature (1)..(318): Homolog of NCBI NO: 32489520 NR Description: OSJNBa0043L24.11 [Oryza sativa (japonica
  misc_feature (1)..(317): Homolog of NCBI NO: 15229265 NR Description: putative GDSL-motif lipase/acylhydrolase; protein
  misc_feature (1)..(316): Homolog of NCBI NO: 22758315 NR Description: putative early nodulin gene (Enod) related
  misc_feature (1)..(316): Homolog of NCBI NO: 37535146 NR Description: putative early nodulin gene (Enod) related
  misc_feature (1)..(317): Homolog of NCBI NO: 15242808 NR Description: putative protein; protein id: At5g33370.1,
  misc_feature (1)..(316): Homolog of NCBI NO: 28071322 NR Description: P0705A05.30 [Oryza sativa (japonica
  misc_feature (1)..(318): Homolog of NCBI NO: 15235421 NR Description: Proline-rich APG - like protein; protein id:
  misc_feature (1)..(315): Homolog of NCBI NO: 15238814 NR Description: putative protein; protein id: At5g18430.1
  misc_feature (1)..(312): Homolog of NCBI NO: 34909504 NR Description: putative GDSL-motif lipase/hydrolase-like protein
  misc_feature (1)..(315): Homolog of NCBI NO: 15227849 NR Description: putative GDSL-motif lipase/hydrolase; protein id:
MTTARADAPPYGIDFPTHMATGRFSNGLNIPDIISEHLGSQPALPYLSPDLRGAQLLVGANFASAGVGILNDTDIQFVNIIRIGQQLRNFQEYQQRLAAFVGEDAARQAVNDALVLITLGGNDFVNNYYLVPFSVRSRQFAIQDYVPYLISEYRKILTRLYELGARRVVVTGTGMIGCVPAELAMHSVDGECARDLTEAADLFNPQLVQMLSELNADIGADVFIAANTNRVSFDFMFNPQDYGFVTSKVACCGQGPYNGIGLCTPASNVCPNRDVYAYWDAFHPTERANRIIVGQFMHGSTDHISPMNISTILAMDNRN

SEQ ID NO: 7726 - protein, 301 aa, Zea mays subsp. mays
  peptide (1)..(301): Ceres Seq. ID no. 12365772
  misc_feature (1)..(277): Pfam Name: GDSL-like Lipase/Acylhydrolase Pfam Description: GDSL-like Lipase/Acylhydrolase
  misc_feature (1)..(300): Homolog of NCBI NO: 32489520 NR Description: OSJNBa0043L24.11 [Oryza sativa (japonica
  misc_feature (1)..(299): Homolog of NCBI NO: 15229265 NR Description: putative GDSL-motif lipase/acylhydrolase; protein
  misc_feature (1)..(298): Homolog of NCBI NO: 22758315 NR Description: putative early nodulin gene (Enod) related
  misc_feature (1)..(298): Homolog of NCBI NO: 37535146 NR Description: putative early nodulin gene (Enod) related
  misc_feature (1)..(299): Homolog of NCBI NO: 15242808 NR Description: putative protein; protein id: At5g33370.1,
  misc_feature (1)..(298): Homolog of NCBI NO: 28071322 NR Description: P0705A05.30 [Oryza sativa (japonica
  misc_feature (1)..(300): Homolog of NCBI NO: 15235421 NR Description: Proline-rich APG - like protein; protein id:
  misc_feature (1)..(297): Homolog of NCBI NO: 15238814 NR Description: putative protein; protein id: At5g18430.1
  misc_feature (1)..(294): Homolog of NCBI NO: 34909504 NR Description: putative GDSL-motif lipase/hydrolase-like protein
  misc_feature (1)..(297): Homolog of NCBI NO: 15227849 NR Description: putative GDSL-motif lipase/hydrolase; protein id:
MATGRFSNGLNIPDIISEHLGSQPALPYLSPDLRGAQLLVGANFASAGVGILNDTDIQFVNIIRIGQQLRNFQEYQQRLAAFVGEDAARQAVNDALVLITLGGNDFVNNYYLVPFSVRSRQFAIQDYVPYLISEYRKILTRLYELGARRVVVTGTGMIGCVPAELAMHSVDGECARDLTEAADLFNPQLVQMLSELNADIGADVFIAANTNRVSFDFMFNPQDYGFVTSKVACCGQGPYNGIGLCTPASNVCPNRDVYAYWDAFHPTERANRIIVGQFMHGSTDHISPMNISTILAMDNRN

SEQ ID NO: 7727 - DNA, 1673 bp, Zea mays subsp. mays
  misc_feature (1)..(1673): Ceres Seq. ID no. 12369078
  misc_feature: MA Experiment ID: 108535 Result: Up-regulated in Transcription
  misc_feature: MA Experiment 108535 PARAMETER Experiment Name: Zm_Meristem_P Parameter: Age (day) Value: 8
  misc_feature: MA Experiment 108535 PARAMETER Experiment Name: Zm_Meristem_P Parameter: Organism Value: Zea mays
  misc_feature: MA Experiment 108535 PARAMETER Experiment Name: Zm_Meristem_P Parameter: Plant Line Value: 35A19
  misc_feature: MA Experiment 108535 PARAMETER Experiment Name: Zm_Meristem_P Parameter: Tissue Value: Root Meristem vs. Above Root Meristem
  misc_feature: MA Experiment ID: 20000535 Result: Up-regulated in Transcription
  misc_feature: MA Experiment 20000535 PARAMETER Experiment Name: Zm_Hybrid_Seed_Dev_P Parameter: DAP Value: 30 vs. 12
  misc_feature: MA Experiment 20000535 PARAMETER Experiment Name: Zm_Hybrid_Seed_Dev_P Parameter: Organism Value: Zea mays
  misc_feature: MA Experiment 20000535 PARAMETER Experiment Name: Zm_Hybrid_Seed_Dev_P Parameter: Plant Line Value: 35A19
  misc_feature: MA Experiment 20000535 PARAMETER Experiment Name: Zm_Hybrid_Seed_Dev_P Parameter: Tissue Value: Embryo vs. Unfert Floret
atagaccccgcgcatggacggcctccatccactccgcccagcacccgcacctcgtcagtcgtcaccgagaagcagaagcagcagctgctgcctgctggtcgttcgttcgcctcgttctctccgcctccccccaccccccgcctcgcttcctcctccgcgcttccttcgccgaggcgtcagcgtcagcgagggcgtataaagcgctccccctccgcgcgcgtccgcacaatcgccaccgcctctccgctcctcgacaagaccaatggcggctgctgcgtcctccgctctgcacgccgttggcgccgtcgcctccgccaagcctagatccgtcgcccccgcggtggcgacgaggaggagcgtgcgcgtggcgcccgcggccaagcgaggaccaggctcgggaggaggcaggctcgtggctcgcagcgccgttgcagccaaggcggatgaggcggccgcggcggcgggatccaagtcaggcggccatgagttgctgatgtttgaggcccttcgtgaagccttgatagaagagatgaatttggatccaacagtgtgcgtcatgggtgaagatgttggtcattatggaggttcatacaaggtgaccaaagggttggctgagatgttcggagatctccgggtccttgatacccctatcgccgagaactccttcactggcatgggagttggagcagcaatgaaggggctgaggcctgttgtggaaggcatgaacatgggtttccttctccttgcctacaaccagatctcgaacaactgcggcatgcttcactacacctcaggcggccagttcaagatcccggtcgtgatccgaggccccggcggtgtcggtcgccagctcggtgccgagcactcgcagcggctagagtcgtacttccagtcgattcctggccttcagatggttgcctgctccactccttacaacgcaaagggcctgatgaaggcggccataaggagcgagaaccccgtggtgctgtttgagcacgtcctcttgtacaacctgaaggagaaaatccccgacgaggagtacatctgctgcctggaggaggcggagatggtgcggccaggtgagcacgtgaccatcctcacgtactcccgcatgaggtaccacgtgatgcaggctgccaagacgctggtgaacaaggggtacgaccccgaggtcatcgacatcaggtcgctgaagccgttcgacctgcacacgatcgggaactcgatcaagaagacccaccgcgtgctgatcgtggaggagtgcatgcggacgggcggcatcggcgccagcctgcggtcggccatcatcgacaacttctgggactacctggacgcccccatcatgtgcctgtcgtcgcaggacgtgccgaccccgtacgccgcgacgctggaggacgccaccgtggtgcagcccgcgcagatcgtggccgccgtcgagcagatctgccaatgatcagtgatatcatggctttgttgagtacctgatctgtggagtcagattaccgtggttttgtttctctgtcgcatcgcgactgtcaccgtgccttagacaagacatgtttttgtattttgcaacgcagaagccatactcgtactggatgccgtttgtgggtggcctatttgttcattgtgcaaagttggatgccatactcgtacactattattatcaggtt

SEQ ID NO: 7728 - protein, 396 aa, Zea mays subsp. mays
  peptide (1)..(396): Ceres Seq. ID no. 12369079
  misc_feature (265)..(387): Pfam Name: Transketolase, C-terminal domain Pfam Description: Transketolase, C-terminal domain
  misc_feature (3)..(396): Homolog of NCBI NO: 15226781 NR Description: putative pyruvate dehydrogenase E1 beta subunit; id: At2g34590.1, supported by cDNA: 38439., supported by cDNA: [Arabidopsis thaliana] >gi|25284457|pir||E84758 probable E1 beta
  misc_feature (3)..(396): Homolog of NCBI NO: 21593379 NR Description: putative pyruvate dehydrogenase E1 beta subunit
  misc_feature (2)..(396): Homolog of NCBI NO: 2454184 NR Description: pyruvate dehydrogenase E1 beta subunit thaliana] >gi|21593321|gb|AAM65270.1| pyruvate dehydrogenase E1
  misc_feature (2)..(396): Homolog of NCBI NO: 15220670 NR Description: pyruvate dehydrogenase E1 beta subunit, putative; id: At1g30120.1, supported by cDNA: 38062., supported by cDNA: supported by cDNA: gi_20334775, supported by cDNA: beta subunit,
  misc_feature (110)..(396): Homolog of NCBI NO: 2982328 NR Description: pyruvate dehydrogenase E1 beta subunit [Picea
  misc_feature (75)..(396): Homolog of NCBI NO: 22711921 NR Description: pyruvate dehydrogenase E1 component beta subunit globosum] >gi|22416925|gb|AAM96525.1| beta subunit of pyruvate
  misc_feature (75)..(396): Homolog of NCBI NO: 22297748 NR Description: pyruvate dehydrogenase E1 component beta subunit
  misc_feature (75)..(394): Homolog of NCBI NO: 23041427 NR Description: hypothetical protein [Trichodesmium erythraeum
  misc_feature (75)..(394): Homolog of NCBI NO: 17227618 NR Description: pyruvate dehydrogenase E1 beta subunit [Nostoc
  misc_feature (75)..(394): Homolog of NCBI NO: 16330037 NR Description: pyruvate dehydrogenase E1 beta subunit sp. PCC 6803] >gi|7431577|pir||S77342 probable pyruvate
MAAAASSALHAVGAVASAKPRSVAPAVATRRSVRVAPAAKRGPGSGGGRLVARSAVAAKADEAAAAAGSKSGGHELLMFEALREALIEEMNLDPTVCVMGEDVGHYGGSYKVTKGLAEMFGDLRVLDTPIAENSFTGMGVGAAMKGLRPVVEGMNMGFLLLAYNQISNNCGMLHYTSGGQFKIPVVIRGPGGVGRQLGAEHSQRLESYFQSIPGLQMVACSTPYNAKGLMKAAIRSENPVVLFEHVLLYNLKEKIPDEEYICCLEEAEMVRPGEHVTILTYSRMRYHVMQAAKTLVNKGYDPEVIDIRSLKPFDLHTIGNSIKKTHRVLIVEECMRTGGIGASLRSAIIDNFWDYLDAPIMCLSSQDVPTPYAATLEDATVVQPAQIVAAVEQICQ

SEQ ID NO: 7729 - protein, 319 aa, Zea mays subsp. mays
  peptide (1)..(319): Ceres Seq. ID no. 12369080
  misc_feature (188)..(310): Pfam Name: Transketolase, C-terminal domain Pfam Description: Transketolase, C-terminal domain
  misc_feature (1)..(319): Homolog of NCBI NO: 15226781 NR Description: putative pyruvate dehydrogenase E1 beta subunit; id: At2g34590.1, supported by cDNA: 38439., supported by cDNA: [Arabidopsis thaliana] >gi|25284457|pir||E84758 probable E1 beta
  misc_feature (1)..(319): Homolog of NCBI NO: 21593379 NR Description: putative pyruvate dehydrogenase E1 beta subunit
  misc_feature (1)..(319): Homolog of NCBI NO: 2454184 NR Description: pyruvate dehydrogenase E1 beta subunit thaliana] >gi|21593321|gb|AAM65270.1| pyruvate dehydrogenase E1
  misc_feature (1)..(319): Homolog of NCBI NO: 15220670 NR Description: pyruvate dehydrogenase E1 beta subunit, putative; id: At1g30120.1, supported by cDNA: 38062., supported by cDNA: supported by cDNA: gi_20334775, supported by cDNA: beta subunit,
  misc_feature (33)..(319): Homolog of NCBI NO: 2982328 NR Description: pyruvate dehydrogenase E1 beta subunit [Picea
  misc_feature (1)..(319): Homolog of NCBI NO: 22711921 NR Description: pyruvate dehydrogenase E1 component beta subunit globosum] >gi|22416925|gb|AAM96525.1| beta subunit of pyruvate
  misc_feature (1)..(319): Homolog of NCBI NO: 22297748 NR Description: pyruvate dehydrogenase E1 component beta subunit
  misc_feature (1)..(317): Homolog of NCBI NO: 23041427 NR Description: hypothetical protein [Trichodesmium erythraeum
  misc_feature (1)..(317): Homolog of NCBI NO: 17227618 NR Description: pyruvate dehydrogenase E1 beta subunit [Nostoc
  misc_feature (1)..(317): Homolog of NCBI NO: 16330037 NR Description: pyruvate dehydrogenase E1 beta subunit sp. PCC 6803] >gi|7431577|pir||S77342 probable pyruvate
MFEALREALIEEMNLDPTVCVMGEDVGHYGGSYKVTKGLAEMFGDLRVLDTPIAENSFTGMGVGAAMKGLRPVVEGMNMGFLLLAYNQISNNCGMLHYTSGGQFKIPVVIRGPGGVGRQLGAEHSQRLESYFQSIPGLQMVACSTPYNAKGLMKAAIRSENPVVLFEHVLLYNLKEKIPDEEYICCLEEAEMVRPGEHVTILTYSRMRYHVMQAAKTLVNKGYDPEVIDIRSLKPFDLHTIGNSIKKTHRVLIVEECMRTGGIGASLRSAIIDNFWDYLDAPIMCLSSQDVPTPYAATLEDATVVQPAQIVAAVEQICQ

SEQ ID NO: 7730 - protein, 307 aa, Zea mays subsp. mays
  peptide (1)..(307): Ceres Seq. ID no. 12369081
  misc_feature (176)..(298): Pfam Name: Transketolase, C-terminal domain Pfam Description: Transketolase, C-terminal domain
  misc_feature (1)..(307): Homolog of NCBI NO: 22711921 NR Description: pyruvate dehydrogenase E1 component beta subunit globosum] >gi|22416925|gb|AAM96525.1| beta subunit of pyruvate
  misc_feature (1)..(307): Homolog of NCBI NO: 22297748 NR Description: pyruvate dehydrogenase E1 component beta subunit
  misc_feature (1)..(305): Homolog of NCBI NO: 23041427 NR Description: hypothetical protein [Trichodesmium erythraeum
  misc_feature (1)..(307): Homolog of NCBI NO: 21593379 NR Description: putative pyruvate dehydrogenase E1 beta subunit
  misc_feature (1)..(307): Homolog of NCBI NO: 15220670 NR Description: pyruvate dehydrogenase E1 beta subunit, putative; id: At1g30120.1, supported by cDNA: 38062., supported by cDNA: supported by cDNA: gi_20334775, supported by cDNA: beta subunit,
  misc_feature (21)..(307): Homolog of NCBI NO: 2982328 NR Description: pyruvate dehydrogenase E1 beta subunit [Picea
  misc_feature (1)..(307): Homolog of NCBI NO: 2454184 NR Description: pyruvate dehydrogenase E1 beta subunit thaliana] >gi|21593321|gb|AAM65270.1| pyruvate dehydrogenase E1
  misc_feature (1)..(307): Homolog of NCBI NO: 15226781 NR Description: putative pyruvate dehydrogenase E1 beta subunit; id: At2g34590.1, supported by cDNA: 38439., supported by cDNA: [Arabidopsis thaliana] >gi|25284457|pir||E84758 probable E1 beta
  misc_feature (1)..(305): Homolog of NCBI NO: 17227618 NR Description: pyruvate dehydrogenase E1 beta subunit [Nostoc
  misc_feature (1)..(305): Homolog of NCBI NO: 16330037 NR Description: pyruvate dehydrogenase E1 beta subunit sp. PCC 6803] >gi|7431577|pir||S77342 probable pyruvate
MNLDPTVCVMGEDVGHYGGSYKVTKGLAEMFGDLRVLDTPIAENSFTGMGVGAAMKGLRPVVEGMNMGFLLLAYNQISNNCGMLHYTSGGQFKIPVVIRGPGGVGRQLGAEHSQRLESYFQSIPGLQMVACSTPYNAKGLMKAAIRSENPVVLFEHVLLYNLKEKIPDEEYICCLEEAEMVRPGEHVTILTYSRMRYHVMQAAKTLVNKGYDPEVIDIRSLKPFDLHTIGNSIKKTHRVLIVEECMRTGGIGASLRSAIIDNFWDYLDAPIMCLSSQDVPTPYAATLEDATVVQPAQIVAAVEQICQ

SEQ ID NO: 7731 - DNA, 1102 bp, Zea mays subsp. mays
  misc_feature (1)..(1102): Ceres Seq. ID no. 12413211
  misc_feature: MA Experiment ID: 108504 Result: Up-regulated in Transcription
  misc_feature: MA Experiment 108504 PARAMETER Experiment Name: Zm_Drought_P Parameter: Age (day) Value: 8
  misc_feature: MA Experiment 108504 PARAMETER Experiment Name: Zm_Drought_P Parameter: Organism Value: Zea mays
  misc_feature: MA Experiment 108504 PARAMETER Experiment Name: Zm_Drought_P Parameter: Plant Line Value: 35A19
  misc_feature: MA Experiment 108504 PARAMETER Experiment Name: Zm_Drought_P Parameter: Timepoint (hr) Value: 12
  misc_feature: MA Experiment 108504 PARAMETER Experiment Name: Zm_Drought_P Parameter: Tissue Value: Aerial
  misc_feature: MA Experiment 108504 PARAMETER Experiment Name: Zm_Drought_P Parameter: Treatment Value: Drought vs. No Drought
  misc_feature: MA Experiment ID: 108526 Result: Up-regulated in Transcription
  misc_feature: MA Experiment 108526 PARAMETER Experiment Name: Zm_5mM_NO_P Parameter: Age (day) Value: 8
  misc_feature: MA Experiment 108526 PARAMETER Experiment Name: Zm_5mM_NO_P Parameter: Organism Value: Zea mays
  misc_feature: MA Experiment 108526 PARAMETER Experiment Name: Zm_5mM_NO_P Parameter: Plant Line Value: 35A19
  misc_feature: MA Experiment 108526 PARAMETER Experiment Name: Zm_5mM_NO_P Parameter: Timepoint (hr) Value: 1
  misc_feature: MA Experiment 108526 PARAMETER Experiment Name: Zm_5mM_NO_P Parameter: Tissue Value: Aerial
  misc_feature: MA Experiment 108526 PARAMETER Experiment Name: Zm_5mM_NO_P Parameter: Treatment Value: 5mM NO vs. No Treatment
  misc_feature: MA Experiment ID: 108527 Result: Up-regulated in Transcription
  misc_feature: MA Experiment 108527 PARAMETER Experiment Name: Zm_5mM_NO_P Parameter: Age (day) Value: 8
  misc_feature: MA Experiment 108527 PARAMETER Experiment Name: Zm_5mM_NO_P Parameter: Organism Value: Zea mays
  misc_feature: MA Experiment 108527 PARAMETER Experiment Name: Zm_5mM_NO_P Parameter: Plant Line Value: 35A19
  misc_feature: MA Experiment 108527 PARAMETER Experiment Name: Zm_5mM_NO_P Parameter: Timepoint (hr) Value: 6
  misc_feature: MA Experiment 108527 PARAMETER Experiment Name: Zm_5mM_NO_P Parameter: Tissue Value: Aerial
  misc_feature: MA Experiment 108527 PARAMETER Experiment Name: Zm_5mM_NO_P Parameter: Treatment Value: 5mM NO vs. No Treatment
  misc_feature: MA Experiment ID: 108528 Result: Up-regulated in Transcription
  misc_feature: MA Experiment 108528 PARAMETER Experiment Name: Zm_Imbibed_Seeds_P Parameter: Age (day) Value: 5 vs. 2
  misc_feature: MA Experiment 108528 PARAMETER Experiment Name: Zm_Imbibed_Seeds_P Parameter: Organism Value: Zea mays
  misc_feature: MA Experiment 108528 PARAMETER Experiment Name: Zm_Imbibed_Seeds_P Parameter: Plant Line Value: 35A19
  misc_feature: MA Experiment 108528 PARAMETER Experiment Name: Zm_Imbibed_Seeds_P Parameter: Tissue Value: Aerial vs. Embryo
  misc_feature: MA Experiment ID: 108530 Result: Up-regulated in Transcription
  misc_feature: MA Experiment 108530 PARAMETER Experiment Name: Zm_Imbibed_Seeds_P Parameter: Age (day) Value: 6 vs. 2
  misc_feature: MA Experiment 108530 PARAMETER Experiment Name: Zm_Imbibed_Seeds_P Parameter: Organism Value: Zea mays
  misc_feature: MA Experiment 108530 PARAMETER Experiment Name: Zm_Imbibed_Seeds_P Parameter: Plant Line Value: 35A19
  misc_feature: MA Experiment 108530 PARAMETER Experiment Name: Zm_Imbibed_Seeds_P Parameter: Tissue Value: Aerial vs. Embryo
  misc_feature: MA Experiment ID: 108535 Result: Up-regulated in Transcription
  misc_feature: MA Experiment 108535 PARAMETER Experiment Name: Zm_Meristem_P Parameter: Age (day) Value: 8
  misc_feature: MA Experiment 108535 PARAMETER Experiment Name: Zm_Meristem_P Parameter: Organism Value: Zea mays
  misc_feature: MA Experiment 108535 PARAMETER Experiment Name: Zm_Meristem_P Parameter: Plant Line Value: 35A19
  misc_feature: MA Experiment 108535 PARAMETER Experiment Name: Zm_Meristem_P Parameter: Tissue Value: Root Meristem vs. Above Root Meristem
  misc_feature: MA Experiment ID: 108536 Result: Up-regulated in Transcription
  misc_feature: MA Experiment 108536 PARAMETER Experiment Name: Zm_Meristem_P Parameter: Age (day) Value: 8
  misc_feature: MA Experiment 108536 PARAMETER Experiment Name: Zm_Meristem_P Parameter: Organism Value: Zea mays
  misc_feature: MA Experiment 108536 PARAMETER Experiment Name: Zm_Meristem_P Parameter: Plant Line Value: 35A19
  misc_feature: MA Experiment 108536 PARAMETER Experiment Name: Zm_Meristem_P Parameter: Tissue Value: Shoot Meristem vs. Above Shoot Meristem
  misc_feature: MA Experiment ID: 108540 Result: Up-regulated in Transcription
  misc_feature: MA Experiment 108540 PARAMETER Experiment Name: Zm_20percent_PEG_P Parameter: Age (day) Value: 8
  misc_feature: MA Experiment 108540 PARAMETER Experiment Name: Zm_20percent_PEG_P Parameter: Organism Value: Zea mays
  misc_feature: MA Experiment 108540 PARAMETER Experiment Name: Zm_20percent_PEG_P Parameter: Plant Line Value: 35A19
  misc_feature: MA Experiment 108540 PARAMETER Experiment Name: Zm_20percent_PEG_P Parameter: Timepoint (hr) Value: 6
  misc_feature: MA Experiment 108540 PARAMETER Experiment Name: Zm_20percent_PEG_P Parameter: Tissue Value: Aerial
  misc_feature: MA Experiment 108540 PARAMETER Experiment Name: Zm_20percent_PEG_P Parameter: Treatment Value: 20percent PEG vs. No Treatment
  misc_feature: MA Experiment ID: 108556 Result: Up-regulated in Transcription
  misc_feature: MA Experiment 108556 PARAMETER Experiment Name: Zm_Drought_P Parameter: Age (day) Value: 9
  misc_feature: MA Experiment 108556 PARAMETER Experiment Name: Zm_Drought_P Parameter: Organism Value: Zea mays
  misc_feature: MA Experiment 108556 PARAMETER Experiment Name: Zm_Drought_P Parameter: Plant Line Value: 35A19
  misc_feature: MA Experiment 108556 PARAMETER Experiment Name: Zm_Drought_P Parameter: Timepoint (hr) Value: 24
  misc_feature: MA Experiment 108556 PARAMETER Experiment Name: Zm_Drought_P Parameter: Tissue Value: Aerial
  misc_feature: MA Experiment 108556 PARAMETER Experiment Name: Zm_Drought_P Parameter: Treatment Value: Drought vs. No Drought
  misc_feature: MA Experiment ID: 108559 Result: Up-regulated in Transcription
  misc_feature: MA Experiment 108559 PARAMETER Experiment Name: Zm_5mM_NO_P Parameter: Age (day) Value: 8
  misc_feature: MA Experiment 108559 PARAMETER Experiment Name: Zm_5mM_NO_P Parameter: Organism Value: Zea mays
  misc_feature: MA Experiment 108559 PARAMETER Experiment Name: Zm_5mM_NO_P Parameter: Plant Line Value: 35A19
  misc_feature: MA Experiment 108559 PARAMETER Experiment Name: Zm_5mM_NO_P Parameter: Timepoint (hr) Value: 12
  misc_feature: MA Experiment 108559 PARAMETER Experiment Name: Zm_5mM_NO_P Parameter: Tissue Value: Aerial
  misc_feature: MA Experiment 108559 PARAMETER Experiment Name: Zm_5mM_NO_P Parameter: Treatment Value: 5mM NO vs. No Treatment
  misc_feature: MA Experiment ID: 108689 Result: Up-regulated in Transcription
  misc_feature: MA Experiment 108689 PARAMETER Experiment Name: Zm_Drought_Roots_P Parameter: Age (day) Value: 9
  misc_feature: MA Experiment 108689 PARAMETER Experiment Name: Zm_Drought_Roots_P Parameter: Organism Value: Zea mays
  misc_feature: MA Experiment 108689 PARAMETER Experiment Name: Zm_Drought_Roots_P Parameter: Plant Line Value: 35A19
  misc_feature: MA Experiment 108689 PARAMETER Experiment Name: Zm_Drought_Roots_P Parameter: Timepoint (hr) Value: 24
  misc_feature: MA Experiment 108689 PARAMETER Experiment Name: Zm_Drought_Roots_P Parameter: Tissue Value: Roots
  misc_feature: MA Experiment 108689 PARAMETER Experiment Name: Zm_Drought_Roots_P Parameter: Treatment Value: Drought vs. No Drought
  misc_feature: MA Experiment ID: 20000108 Result: Down-regulated in Transcription
  misc_feature: MA Experiment 20000108 PARAMETER Experiment Name: Zm_Root-Tips_P Parameter: Age (day) Value: 12
  misc_feature: MA Experiment 20000108 PARAMETER Experiment Name: Zm_Root-Tips_P Parameter: Organism Value: Zea mays
  misc_feature: MA Experiment 20000108 PARAMETER Experiment Name: Zm_Root-Tips_P Parameter: Tissue Value: Root tips vs. Root mid region    35
  misc_feature: MA Experiment 20000108 PARAMETER Experiment Name: Zm_Root-Tips_P Parameter: Tissue Value: Root tips vs. Root mid region   Sequence Listing-Misc Features (4)
  misc_feature: MA Experiment ID: 20000480 Result: Up-regulated in Transcription
  misc_feature: MA Experiment 20000480 PARAMETER Experiment Name: Zm_Drought_P Parameter: Age (day) Value: 11
  misc_feature: MA Experiment 20000480 PARAMETER Experiment Name: Zm_Drought_P Parameter: Organism Value: Zea mays
  misc_feature: MA Experiment 20000480 PARAMETER Experiment Name: Zm_Drought_P Parameter: Plant Line Value: 35A19
  misc_feature: MA Experiment 20000480 PARAMETER Experiment Name: Zm_Drought_P Parameter: Timepoint (hr) Value: 72
  misc_feature: MA Experiment 20000480 PARAMETER Experiment Name: Zm_Drought_P Parameter: Tissue Value: Aerial
  misc_feature: MA Experiment 20000480 PARAMETER Experiment Name: Zm_Drought_P Parameter: Treatment Value: Drought vs. No Drought
  misc_feature: MA Experiment ID: 20000488 Result: Up-regulated in Transcription
  misc_feature: MA Experiment 20000488 PARAMETER Experiment Name: Zm_50mM_NH4NO3_L_to_H_P Parameter: Organism Value: Zea mays
  misc_feature: MA Experiment 20000488 PARAMETER Experiment Name: Zm_50mM_NH4NO3_L_to_H_P Parameter: Timepoint (hr) Value: 8
  misc_feature: MA Experiment 20000488 PARAMETER Experiment Name: Zm_50mM_NH4NO3_L_to_H_P Parameter: Tissue Value: Leaves
  misc_feature: MA Experiment 20000488 PARAMETER Experiment Name: Zm_50mM_NH4NO3_L_to_H_P Parameter: Treatment Value: 50mM NH4NO3 vs. 100mM Mannitol
  misc_feature: MA Experiment ID: 20000492 Result: Up-regulated in Transcription
  misc_feature: MA Experiment 20000492 PARAMETER Experiment Name: Zm_Hybrid_Seed_Dev_P Parameter: DAP Value: 12
  misc_feature: MA Experiment 20000492 PARAMETER Experiment Name: Zm_Hybrid_Seed_Dev_P Parameter: Organism Value: Zea mays
  misc_feature: MA Experiment 20000492 PARAMETER Experiment Name: Zm_Hybrid_Seed_Dev_P Parameter: Plant Line Value: 35A19
  misc_feature: MA Experiment 20000492 PARAMETER Experiment Name: Zm_Hybrid_Seed_Dev_P Parameter: Tissue Value: Fert Kernel vs. Unfert Floret
  misc_feature: MA Experiment ID: 20000535 Result: Up-regulated in Transcription
  misc_feature: MA Experiment 20000535 PARAMETER Experiment Name: Zm_Hybrid_Seed_Dev_P Parameter: DAP Value: 30 vs. 12
  misc_feature: MA Experiment 20000535 PARAMETER Experiment Name: Zm_Hybrid_Seed_Dev_P Parameter: Organism Value: Zea mays
  misc_feature: MA Experiment 20000535 PARAMETER Experiment Name: Zm_Hybrid_Seed_Dev_P Parameter: Plant Line Value: 35A19
  misc_feature: MA Experiment 20000535 PARAMETER Experiment Name: Zm_Hybrid_Seed_Dev_P Parameter: Tissue Value: Embryo vs. Unfert Floret
  misc_feature: MA Experiment ID: 20000632 Result: Down-regulated in Transcription
  misc_feature: MA Experiment 20000632 PARAMETER Experiment Name: Zm_Herbicide-Treatments_P Parameter: Timepoint (hr) Value: 4
  misc_feature: MA Experiment 20000632 PARAMETER Experiment Name: Zm_Herbicide-Treatments_P Parameter: Tissue Value: Aerial
  misc_feature: MA Experiment 20000632 PARAMETER Experiment Name: Zm_Herbicide-Treatments_P Parameter: Treatment Value: Glean vs. No Treatment
  misc_feature: MA Experiment ID: 20000633 Result: Down-regulated in Transcription
  misc_feature: MA Experiment 20000633 PARAMETER Experiment Name: Zm_Herbicide-Treatments_P Parameter: Timepoint (hr) Value: 4
  misc_feature: MA Experiment 20000633 PARAMETER Experiment Name: Zm_Herbicide-Treatments_P Parameter: Tissue Value: Aerial
  misc_feature: MA Experiment 20000633 PARAMETER Experiment Name: Zm_Herbicide-Treatments_P Parameter: Treatment Value: Trimec vs. No Treatment
ataaaactaacccacctaaaaccacggtccacgaccctcgcttcacttgtcacggactcgcgtccacaaaccacaaccagctcactcaagaacaaagaacccaacccatggcttctcccaagccgctcctcctgctcgccacctcgttcctgagctgcggcctcctggtggccgccgacttacgccccaatgaccctgaccgtggtgaacaactgcccctacccggtgtggccgggcatccaggccaactccgggcacgacgtcctggagggcggcggcttcttcctcccgccgctctcccacaagtccttcccggcgccggcccacccctggtccggccgcatctgggcgcgcacgggctgcgcgggcgccggcgcgcagctccactgcgccacgggcgactgcggcgggcggctccagtgcggcgggctcggcggcgcggcgcccgcgacgctggcgcaggtgaacctccaccacggcaacgaccagacctcgtacggcgtgagcgtggtggacggcttcaacgtgggcctgtccgtgaccccgcacgagggccgcggcaactgccccgtcctcgcctgccgcaagaacctcaccgagacctgccccggcgagctgcagctgcgctccccggccggcagcgtcctcgcgtgcaagagcggctgcgaggccttccgcaccgacgagctgtgctgccgcaacatgtacaacagcccgcacacctgccgcgcctccaagtactcggagttcttcaagcgagagtgcccgcaggccttcacctacgcgcacgacagcccctngctcacccacgagtgcgccgcgccgcgcgagctcaaggtcatcttctgccactagagctcggagctcggagggcgccgccgccgtcaacaagtgtcgctagtagaggtagtaggatttgcggtgcgtgtgttgtctagtgtgtgctggaatagctgtggctgtgttcccgtcgtgtctgtggcctgtgtaggctgtctgtagtatactgggttgttggatgtatgcgttctggccgcaagactgatgtcatgctgttgctgcttactacagtttgcagtctgaaataaaaacttgtttgatg

SEQ ID NO: 7732 - protein, 311 aa, Zea mays subsp. mays
  peptide (1)..(311): Ceres Seq. ID no. 12413212
  misc_feature (266)..(266): Xaa is any aa, unknown or other
KTNPPKTTVHDPRFTCHGLASTNHNQLTQEQRTQPMASPKPLLLLATSFLSCGLLVAADLRPNDPDRGEQLPLPGVAGHPGQLRARRPGGRRLLPPAALPQVLPGAGPPLVRPHLGAHGLRGRRRAAPLRHGRLRRAAPVRRARRRGARDAGAGEPPPRQRPDLVRRERGGRLQRGPVRDPARGPRQLPRPRLPQEPHRDLPRRAAAALPGRQRPRVQERLRGLPHRRAVLPQHVQQPAHLPRLQVLGVLQARVPAGLHLRARQPXAHPRVRRAARAQGHLLPLELGARRAPPPSTSVASRGSRICGACVV

SEQ ID NO: 7733 - protein, 276 aa, Zea mays subsp. mays
  peptide (1)..(276): Ceres Seq. ID no. 12413213
  misc_feature (231)..(231): Xaa is any aa, unknown or other
MASPKPLLLLATSFLSCGLLVAADLRPNDPDRGEQLPLPGVAGHPGQLRARRPGGRRLLPPAALPQVLPGAGPPLVRPHLGAHGLRGRRRAAPLRHGRLRRAAPVRRARRRGARDAGAGEPPPRQRPDLVRRERGGRLQRGPVRDPARGPRQLPRPRLPQEPHRDLPRRAAAALPGRQRPRVQERLRGLPHRRAVLPQHVQQPAHLPRLQVLGVLQARVPAGLHLRARQPXAHPRVRRAARAQGHLLPLELGARRAPPPSTSVASRGSRICGACVV

SEQ ID NO: 7734 - protein, 221 aa, Zea mays subsp. mays
  peptide (1)..(221): Ceres Seq. ID no. 12413214
  misc_feature (7)..(221): Pfam Name: Thaumatin family Pfam Description: Thaumatin family
  misc_feature (1)..(221): Homolog of NCBI NO: 34908134 NR Description: osmotin-like protein [Oryza sativa (japonica
  misc_feature (1)..(221): Homolog of NCBI NO: 5823278 NR Description: osmotin-like protein [Benincasa hispida]
  misc_feature (3)..(221): Homolog of NCBI NO: 2501182 NR Description: OSMOTIN-LIKE PROTEIN PRECURSOR
  misc_feature (3)..(221): Homolog of NCBI NO: 27373045 NR Description: cytokinin-binding protein [Brassica oleracea]
  misc_feature (3)..(221): Homolog of NCBI NO: 15226956 NR Description: putative thaumatin; protein id: At2g28790.1, by cDNA: 2058. [Arabidopsis thaliana] >gi|25296202|pir||H84688
  misc_feature (3)..(221): Homolog of NCBI NO: 27373047 NR Description: cytokinin binding protein [Arabidopsis thaliana]
  misc_feature (3)..(221): Homolog of NCBI NO: 21554129 NR Description: putative thaumatin [Arabidopsis thaliana]
  misc_feature (2)..(220): Homolog of NCBI NO: 37531042 NR Description: putative thaumatin-like protein [Oryza sativa
  misc_feature (2)..(220): Homolog of NCBI NO: 7442175 NR Description: thaumatin-like protein - turnip
  misc_feature (2)..(220): Homolog of NCBI NO: 15221033 NR Description: pathogenesis-related group 5 protein, putative; id: At1g18250.1, supported by cDNA: gi_536824 [Arabidopsis
  misc_feature (204)..(204): Xaa is any aa, unknown or other
MTLTVVNNCPYPVWPGIQANSGHDVLEGGGFFLPPLSHKSFPAPAHPWSGRIWARTGCAGAGAQLHCATGDCGGRLQCGGLGGAAPATLAQVNLHHGNDQTSYGVSVVDGFNVGLSVTPHEGRGNCPVLACRKNLTETCPGELQLRSPAGSVLACKSGCEAFRTDELCCRNMYNSPHTCRASKYSEFFKRECPQAFTYAHDSPXLTHECAAPRELKVIFCH

SEQ ID NO: 7735 - DNA, 600 bp, Zea mays subsp. mays
  misc_feature (1)..(600): Ceres Seq. ID no. 12365691
  misc_feature: MA Experiment ID: 108504 Result: Down-regulated in Transcription
  misc_feature: MA Experiment 108504 PARAMETER Experiment Name: Zm_Drought_P Parameter: Age (day) Value: 8
  misc_feature: MA Experiment 108504 PARAMETER Experiment Name: Zm_Drought_P Parameter: Organism Value: Zea mays
  misc_feature: MA Experiment 108504 PARAMETER Experiment Name: Zm_Drought_P Parameter: Plant Line Value: 35A19
  misc_feature: MA Experiment 108504 PARAMETER Experiment Name: Zm_Drought_P Parameter: Timepoint (hr) Value: 12
  misc_feature: MA Experiment 108504 PARAMETER Experiment Name: Zm_Drought_P Parameter: Tissue Value: Aerial
  misc_feature: MA Experiment 108504 PARAMETER Experiment Name: Zm_Drought_P Parameter: Treatment Value: Drought vs. No Drought
  misc_feature: MA Experiment ID: 108515 Result: Down-regulated in Transcription
  misc_feature: MA Experiment 108515 PARAMETER Experiment Name: Zm_2mM_SA_P Parameter: Age (day) Value: 8
  misc_feature: MA Experiment 108515 PARAMETER Experiment Name: Zm_2mM_SA_P Parameter: Organism Value: Zea mays
  misc_feature: MA Experiment 108515 PARAMETER Experiment Name: Zm_2mM_SA_P Parameter: Plant Line Value: 35A19
  misc_feature: MA Experiment 108515 PARAMETER Experiment Name: Zm_2mM_SA_P Parameter: Timepoint (hr) Value: 12
  misc_feature: MA Experiment 108515 PARAMETER Experiment Name: Zm_2mM_SA_P Parameter: Tissue Value: Aerial
  misc_feature: MA Experiment 108515 PARAMETER Experiment Name: Zm_2mM_SA_P Parameter: Treatment Value: 2mM SA vs. No Treatment
  misc_feature: MA Experiment ID: 108523 Result: Down-regulated in Transcription
  misc_feature: MA Experiment 108523 PARAMETER Experiment Name: Zm_42deg_Heat_P Parameter: Age (day) Value: 8
  misc_feature: MA Experiment 108523 PARAMETER Experiment Name: Zm_42deg_Heat_P Parameter: Organism Value: Zea mays
  misc_feature: MA Experiment 108523 PARAMETER Experiment Name: Zm_42deg_Heat_P Parameter: Plant Line Value: 35A19
  misc_feature: MA Experiment 108523 PARAMETER Experiment Name: Zm_42deg_Heat_P Parameter: Temperature (deg C) Value: 42 vs. 22
  misc_feature: MA Experiment 108523 PARAMETER Experiment Name: Zm_42deg_Heat_P Parameter: Timepoint (hr) Value: 6
  misc_feature: MA Experiment 108523 PARAMETER Experiment Name: Zm_42deg_Heat_P Parameter: Tissue Value: Aerial
  misc_feature: MA Experiment ID: 108535 Result: Up-regulated in Transcription
  misc_feature: MA Experiment 108535 PARAMETER Experiment Name: Zm_Meristem_P Parameter: Age (day) Value: 8
  misc_feature: MA Experiment 108535 PARAMETER Experiment Name: Zm_Meristem_P Parameter: Organism Value: Zea mays
  misc_feature: MA Experiment 108535 PARAMETER Experiment Name: Zm_Meristem_P Parameter: Plant Line Value: 35A19
  misc_feature: MA Experiment 108535 PARAMETER Experiment Name: Zm_Meristem_P Parameter: Tissue Value: Root Meristem vs. Above Root Meristem
  misc_feature: MA Experiment ID: 108543 Result: Up-regulated in Transcription
  misc_feature: MA Experiment ID: 108544 Result: Down-regulated in Transcription
  misc_feature: MA Experiment ID: 108556 Result: Down-regulated in Transcription
  misc_feature: MA Experiment 108556 PARAMETER Experiment Name: Zm_Drought_P Parameter: Age (day) Value: 9
  misc_feature: MA Experiment 108556 PARAMETER Experiment Name: Zm_Drought_P Parameter: Organism Value: Zea mays
  misc_feature: MA Experiment 108556 PARAMETER Experiment Name: Zm_Drought_P Parameter: Plant Line Value: 35A19
  misc_feature: MA Experiment 108556 PARAMETER Experiment Name: Zm_Drought_P Parameter: Timepoint (hr) Value: 24
  misc_feature: MA Experiment 108556 PARAMETER Experiment Name: Zm_Drought_P Parameter: Tissue Value: Aerial
  misc_feature: MA Experiment 108556 PARAMETER Experiment Name: Zm_Drought_P Parameter: Treatment Value: Drought vs. No Drought
  misc_feature: MA Experiment ID: 108597 Result: Down-regulated in Transcription
  misc_feature: MA Experiment 108597 PARAMETER Experiment Name: Zm_100uM_ABA_P Parameter: Age (day) Value: 9
  misc_feature: MA Experiment 108597 PARAMETER Experiment Name: Zm_100uM_ABA_P Parameter: Organism Value: Zea mays
  misc_feature: MA Experiment 108597 PARAMETER Experiment Name: Zm_100uM_ABA_P Parameter: Plant Line Value: 35A19
  misc_feature: MA Experiment 108597 PARAMETER Experiment Name: Zm_100uM_ABA_P Parameter: Timepoint (hr) Value: 24
  misc_feature: MA Experiment 108597 PARAMETER Experiment Name: Zm_100uM_ABA_P Parameter: Tissue Value: Aerial
  misc_feature: MA Experiment 108597 PARAMETER Experiment Name: Zm_100uM_ABA_P Parameter: Treatment Value: 100uM ABA vs. No Treatment
  misc_feature: MA Experiment ID: 20000477 Result: Down-regulated in Transcription
  misc_feature: MA Experiment 20000477 PARAMETER Experiment Name: Zm_5mM_SA_P Parameter: Age (day) Value: 10
  misc_feature: MA Experiment 20000477 PARAMETER Experiment Name: Zm_5mM_SA_P Parameter: Organism Value: Zea mays
  misc_feature: MA Experiment 20000477 PARAMETER Experiment Name: Zm_5mM_SA_P Parameter: Plant Line Value: 35A19
  misc_feature: MA Experiment 20000477 PARAMETER Experiment Name: Zm_5mM_SA_P Parameter: Timepoint (hr) Value: 48
  misc_feature: MA Experiment 20000477 PARAMETER Experiment Name: Zm_5mM_SA_P Parameter: Tissue Value: Aerial
  misc_feature: MA Experiment 20000477 PARAMETER Experiment Name: Zm_5mM_SA_P Parameter: Treatment Value: 5mM SA vs. No Treatment
  misc_feature: MA Experiment ID: 20000480 Result: Down-regulated in Transcription
  misc_feature: MA Experiment 20000480 PARAMETER Experiment Name: Zm_Drought_P Parameter: Age (day) Value: 11
  misc_feature: MA Experiment 20000480 PARAMETER Experiment Name: Zm_Drought_P Parameter: Organism Value: Zea mays
  misc_feature: MA Experiment 20000480 PARAMETER Experiment Name: Zm_Drought_P Parameter: Plant Line Value: 35A19
  misc_feature: MA Experiment 20000480 PARAMETER Experiment Name: Zm_Drought_P Parameter: Timepoint (hr) Value: 72
  misc_feature: MA Experiment 20000480 PARAMETER Experiment Name: Zm_Drought_P Parameter: Tissue Value: Aerial
  misc_feature: MA Experiment 20000480 PARAMETER Experiment Name: Zm_Drought_P Parameter: Treatment Value: Drought vs. No Drought
  misc_feature: MA Experiment ID: 20000626 Result: Down-regulated in Transcription
  misc_feature: MA Experiment 20000626 PARAMETER Experiment Name: Zm_Herbicide-Treatments_P Parameter: Timepoint (hr) Value: 12
  misc_feature: MA Experiment 20000626 PARAMETER Experiment Name: Zm_Herbicide-Treatments_P Parameter: Tissue Value: Aerial
  misc_feature: MA Experiment 20000626 PARAMETER Experiment Name: Zm_Herbicide-Treatments_P Parameter: Treatment Value: Roundup vs. No Treatment
  misc_feature: MA Experiment ID: 20000632 Result: Down-regulated in Transcription
  misc_feature: MA Experiment 20000632 PARAMETER Experiment Name: Zm_Herbicide-Treatments_P Parameter: Timepoint (hr) Value: 4
  misc_feature: MA Experiment 20000632 PARAMETER Experiment Name: Zm_Herbicide-Treatments_P Parameter: Tissue Value: Aerial
  misc_feature: MA Experiment 20000632 PARAMETER Experiment Name: Zm_Herbicide-Treatments_P Parameter: Treatment Value: Glean vs. No Treatment
  misc_feature: MA Experiment ID: 20001614 Result: Up-regulated in Transcription
  misc_feature: MA Experiment 20001614 PARAMETER Experiment Name: Zm_50ppm_KNO3_L-to-H_P Parameter: Age (day) Value: 21
  misc_feature: MA Experiment 20001614 PARAMETER Experiment Name: Zm_50ppm_KNO3_L-to-H_P Parameter: Organism Value: Zea mays
  misc_feature: MA Experiment 20001614 PARAMETER Experiment Name: Zm_50ppm_KNO3_L-to-H_P Parameter: Plant Line Value: 35A19
  misc_feature: MA Experiment 20001614 PARAMETER Experiment Name: Zm_50ppm_KNO3_L-to-H_P Parameter: Timepoint (hr) Value: 48
  misc_feature: MA Experiment 20001614 PARAMETER Experiment Name: Zm_50ppm_KNO3_L-to-H_P Parameter: Tissue Value: Roots
  misc_feature: MA Experiment 20001614 PARAMETER Experiment Name: Zm_50ppm_KNO3_L-to-H_P Parameter: Treatment Value: 50ppm KNO3 vs. 50ppm KCl
ggcaccagagtcatcgcggcgtgttcaaatcccacaatcttcttgtagcacaccactgtcttcgtccaactcggcggcgatgtctgggcgcggcaagggcggcaaggggctgggcaagggtggtgcgaaacgccaccgtaaggttctccgcgacaacatccagggtatcacgaagccggcaatccggaggctggcgaggaggggcggcgtgaagcgtatctccgggcttatctacgaggagacccgcggcgtgctcaagatcttcctcgagaatgtcatccgcgacgcggtcacctacaccgagcacgctcgccgcaagaccgtcaccgccatggatgttgtgtacgccctcaagcgccagggccgcactctgtacgggttcggtggttgagcgcatctcttccctcgtctgcagcggctgccggtggcgtttcctcagttccctctgccttgcttggcttgatgtagagagttatcagattaaaatatctctgatgtgcttcgttattgggtggaatcatgtgtcccagcagtgctgggaaatcgagatcaagatgtatctttctttgcagtaatgaaatgttaaaatcgagatcaaaa

SEQ ID NO: 7736 - protein, 129 aa, Zea mays subsp. mays
  peptide (1)..(129): Ceres Seq. ID no. 12365692
  misc_feature (21)..(129): Homolog of NCBI NO: 34876368 NR Description: similar to germinal histone H4 gene [Rattus
  misc_feature (27)..(129): Homolog of NCBI NO: 15226944 NR Description: histone H4; protein id: At2g28740.1, supported by
  misc_feature (21)..(129): Homolog of NCBI NO: 17540668 NR Description: Histone H4 family member [Caenorhabditis elegans]
  misc_feature (27)..(129): Homolog of NCBI NO: 462243 NR Description: Histone H4 >gi|421921|pir||S32769 histone H4 - >gi|297150|emb|CAA48923.1| histone H4 [Lycopersicon esculentum] histone H4 [Lycopersicon esculentum] >gi|2746721|gb|AAB94924.1|
  misc_feature (27)..(129): Homolog of NCBI NO: 1806283 NR Description: Histone H4 homologue [Sesbania rostrata]
  misc_feature (27)..(129): Homolog of NCBI NO: 4504301 NR Description: H4 histone family, member A [Homo sapiens] H4 histone family, member B [Homo sapiens] H4 histone family, member C [Homo sapiens]
  misc_feature (27)..(129): Homolog of NCBI NO: 27692960 NR Description: Similar to germinal histone H4 gene [Mus musculus]
  misc_feature (27)..(129): Homolog of NCBI NO: 27692935 NR Description: Similar to germinal histone H4 gene [Mus musculus]
  misc_feature (27)..(129): Homolog of NCBI NO: 37590121 NR Description: Hist1h4h protein [Mus musculus]
  misc_feature (27)..(129): Homolog of NCBI NO: 17352498 NR Description: histone H4; Bicoid interacting protein 2; histone melanogaster] >gi|17975542|ref|NP_524352.1| Histone H4
APESSRRVQIPQSSCSTPLSSSNSAAMSGRGKGGKGLGKGGAKRHRKVLRDNIQGITKPAIRRLARRGGVKRISGLIYEETRGVLKIFLENVIRDAVTYTEHARRKTVTAMDVVYALKRQGRTLYGFGG

SEQ ID NO: 7737 - protein, 103 aa, Zea mays subsp. mays
  peptide (1)..(103): Ceres Seq. ID no. 12365693
  misc_feature (1)..(103): Homolog of NCBI NO: 34876368 NR Description: similar to germinal histone H4 gene [Rattus
  misc_feature (1)..(103): Homolog of NCBI NO: 15226944 NR Description: histone H4; protein id: At2g28740.1, supported by
  misc_feature (1)..(103): Homolog of NCBI NO: 17540668 NR Description: Histone H4 family member [Caenorhabditis elegans]
  misc_feature (1)..(103): Homolog of NCBI NO: 462243 NR Description: Histone H4 >gi|421921|pir||S32769 histone H4 - >gi|297150|emb|CAA48923.1| histone H4 [Lycopersicon esculentum] histone H4 [Lycopersicon esculentum] >gi|2746721|gb|AAB94924.1|
  misc_feature (1)..(103): Homolog of NCBI NO: 1806283 NR Description: Histone H4 homologue [Sesbania rostrata]
  misc_feature (1)..(103): Homolog of NCBI NO: 4504301 NR Description: H4 histone family, member A [Homo sapiens] H4 histone family, member B [Homo sapiens] H4 histone family, member C [Homo sapiens]
  misc_feature (1)..(103): Homolog of NCBI NO: 27692960 NR Description: Similar to germinal histone H4 gene [Mus musculus]
  misc_feature (1)..(103): Homolog of NCBI NO: 27692935 NR Description: Similar to germinal histone H4 gene [Mus musculus]
  misc_feature (1)..(103): Homolog of NCBI NO: 37590121 NR Description: Hist1h4h protein [Mus musculus]
  misc_feature (1)..(103): Homolog of NCBI NO: 17352498 NR Description: histone H4; Bicoid interacting protein 2; histone melanogaster] >gi|17975542|ref|NP_524352.1| Histone H4
MSGRGKGGKGLGKGGAKRHRKVLRDNIQGITKPAIRRLARRGGVKRISGLIYEETRGVLKIFLENVIRDAVTYTEHARRKTVTAMDVVYALKRQGRTLYGFGG

SEQ ID NO: 7738 - protein, 100 aa, Zea mays subsp. mays
  peptide (1)..(100): Ceres Seq. ID no. 12365694
MSSATRSPTPSTLAARPSPPWMLCTPSSARAALCTGSVVERISSLVCSGCRWRFLSSLCLAWLDVESYQIKISLMCFVIGWNHVSQQCWEIEIKMYLSLQ

SEQ ID NO: 7739 - DNA, 1068 bp, Zea mays subsp. mays
  misc_feature (1)..(1068): Ceres Seq. ID no. 12373184
  misc_feature: MA Experiment ID: 108504 Result: Up-regulated in Transcription
  misc_feature: MA Experiment 108504 PARAMETER Experiment Name: Zm_Drought_P Parameter: Age (day) Value: 8
  misc_feature: MA Experiment 108504 PARAMETER Experiment Name: Zm_Drought_P Parameter: Organism Value: Zea mays
  misc_feature: MA Experiment 108504 PARAMETER Experiment Name: Zm_Drought_P Parameter: Plant Line Value: 35A19
  misc_feature: MA Experiment 108504 PARAMETER Experiment Name: Zm_Drought_P Parameter: Timepoint (hr) Value: 12
  misc_feature: MA Experiment 108504 PARAMETER Experiment Name: Zm_Drought_P Parameter: Tissue Value: Aerial
  misc_feature: MA Experiment 108504 PARAMETER Experiment Name: Zm_Drought_P Parameter: Treatment Value: Drought vs. No Drought
  misc_feature: MA Experiment ID: 108534 Result: Up-regulated in Transcription
  misc_feature: MA Experiment 108534 PARAMETER Experiment Name: Zm_4deg_Cold_P Parameter: Age (hr) Value: 8
  misc_feature: MA Experiment 108534 PARAMETER Experiment Name: Zm_4deg_Cold_P Parameter: Organism Value: Zea mays
  misc_feature: MA Experiment 108534 PARAMETER Experiment Name: Zm_4deg_Cold_P Parameter: Plant Line Value: 35A19
  misc_feature: MA Experiment 108534 PARAMETER Experiment Name: Zm_4deg_Cold_P Parameter: Temperature (deg C) Value: 4 vs. 22
  misc_feature: MA Experiment 108534 PARAMETER Experiment Name: Zm_4deg_Cold_P Parameter: Timepoint (hr) Value: 6
  misc_feature: MA Experiment 108534 PARAMETER Experiment Name: Zm_4deg_Cold_P Parameter: Tissue Value: Aerial
  misc_feature: MA Experiment ID: 108540 Result: Up-regulated in Transcription
  misc_feature: MA Experiment 108540 PARAMETER Experiment Name: Zm_20percent_PEG_P Parameter: Age (day) Value: 8
  misc_feature: MA Experiment 108540 PARAMETER Experiment Name: Zm_20percent_PEG_P Parameter: Organism Value: Zea mays
  misc_feature: MA Experiment 108540 PARAMETER Experiment Name: Zm_20percent_PEG_P Parameter: Plant Line Value: 35A19
  misc_feature: MA Experiment 108540 PARAMETER Experiment Name: Zm_20percent_PEG_P Parameter: Timepoint (hr) Value: 6
  misc_feature: MA Experiment 108540 PARAMETER Experiment Name: Zm_20percent_PEG_P Parameter: Tissue Value: Aerial
  misc_feature: MA Experiment 108540 PARAMETER Experiment Name: Zm_20percent_PEG_P Parameter: Treatment Value: 20percent PEG vs. No Treatment
  misc_feature: MA Experiment ID: 108543 Result: Up-regulated in Transcription
  misc_feature: MA Experiment ID: 108556 Result: Up-regulated in Transcription
  misc_feature: MA Experiment 108556 PARAMETER Experiment Name: Zm_Drought_P Parameter: Age (day) Value: 9
  misc_feature: MA Experiment 108556 PARAMETER Experiment Name: Zm_Drought_P Parameter: Organism Value: Zea mays
  misc_feature: MA Experiment 108556 PARAMETER Experiment Name: Zm_Drought_P Parameter: Plant Line Value: 35A19
  misc_feature: MA Experiment 108556 PARAMETER Experiment Name: Zm_Drought_P Parameter: Timepoint (hr) Value: 24
  misc_feature: MA Experiment 108556 PARAMETER Experiment Name: Zm_Drought_P Parameter: Tissue Value: Aerial
  misc_feature: MA Experiment 108556 PARAMETER Experiment Name: Zm_Drought_P Parameter: Treatment Value: Drought vs. No Drought
  misc_feature: MA Experiment ID: 108689 Result: Up-regulated in Transcription
  misc_feature: MA Experiment 108689 PARAMETER Experiment Name: Zm_Drought_Roots_P Parameter: Age (day) Value: 9
  misc_feature: MA Experiment 108689 PARAMETER Experiment Name: Zm_Drought_Roots_P Parameter: Organism Value: Zea mays
  misc_feature: MA Experiment 108689 PARAMETER Experiment Name: Zm_Drought_Roots_P Parameter: Plant Line Value: 35A19
  misc_feature: MA Experiment 108689 PARAMETER Experiment Name: Zm_Drought_Roots_P Parameter: Timepoint (hr) Value: 24
  misc_feature: MA Experiment 108689 PARAMETER Experiment Name: Zm_Drought_Roots_P Parameter: Tissue Value: Roots
  misc_feature: MA Experiment 108689 PARAMETER Experiment Name: Zm_Drought_Roots_P Parameter: Treatment Value: Drought vs. No Drought
  misc_feature: MA Experiment ID: 20000492 Result: Down-regulated in Transcription
  misc_feature: MA Experiment 20000492 PARAMETER Experiment Name: Zm_Hybrid_Seed_Dev_P Parameter: DAP Value: 12
  misc_feature: MA Experiment 20000492 PARAMETER Experiment Name: Zm_Hybrid_Seed_Dev_P Parameter: Organism Value: Zea mays
  misc_feature: MA Experiment 20000492 PARAMETER Experiment Name: Zm_Hybrid_Seed_Dev_P Parameter: Plant Line Value: 35A19
  misc_feature: MA Experiment 20000492 PARAMETER Experiment Name: Zm_Hybrid_Seed_Dev_P Parameter: Tissue Value: Fert Kernel vs. Unfert Floret
  misc_feature: MA Experiment ID: 20000535 Result: Down-regulated in Transcription
  misc_feature: MA Experiment 20000535 PARAMETER Experiment Name: Zm_Hybrid_Seed_Dev_P Parameter: DAP Value: 30 vs. 12
  misc_feature: MA Experiment 20000535 PARAMETER Experiment Name: Zm_Hybrid_Seed_Dev_P Parameter: Organism Value: Zea mays
  misc_feature: MA Experiment 20000535 PARAMETER Experiment Name: Zm_Hybrid_Seed_Dev_P Parameter: Plant Line Value: 35A19
  misc_feature: MA Experiment 20000535 PARAMETER Experiment Name: Zm_Hybrid_Seed_Dev_P Parameter: Tissue Value: Embryo vs. Unfert Floret
  misc_feature: MA Experiment ID: 20000626 Result: Down-regulated in Transcription
  misc_feature: MA Experiment 20000626 PARAMETER Experiment Name: Zm_Herbicide-Treatments_P Parameter: Timepoint (hr) Value: 12
  misc_feature: MA Experiment 20000626 PARAMETER Experiment Name: Zm_Herbicide-Treatments_P Parameter: Tissue Value: Aerial
  misc_feature: MA Experiment 20000626 PARAMETER Experiment Name: Zm_Herbicide-Treatments_P Parameter: Treatment Value: Roundup vs. No Treatment
  misc_feature: MA Experiment ID: 20000629 Result: Down-regulated in Transcription
  misc_feature: MA Experiment 20000629 PARAMETER Experiment Name: Zm_Herbicide-Treatments_P Parameter: Timepoint (hr) Value: 12
  misc_feature: MA Experiment 20000629 PARAMETER Experiment Name: Zm_Herbicide-Treatments_P Parameter: Tissue Value: Aerial
  misc_feature: MA Experiment 20000629 PARAMETER Experiment Name: Zm_Herbicide-Treatments_P Parameter: Treatment Value: Trimec vs. No Treatment
atctctctctctctctctcttcctgcgcccacacgcacgtttccactccgaccgggccagagccccgccgggcagtttccgttcgctgttgcgatccacctcctgcctgcacatcccctcccccgagttcgagccggagggccgaagagtagatctgcggcggcggccagaggatggccgtcaactgggagctgcggggctgctgcgaccacgaccagaggatcttcatcgccgccgtcggcgtctccaccgtcgtcatcctcctcctctggaggacgttcctgctcacgccgttcaagctcatcaccgtcttcctccacgagaccagccacgcgcttgcctgcaagctcacttgcggcgatgtagaaggcatgcaggtccatgcgaatgagggtggcgttactcaaacccggggtggcatatattggataatcttgcccgctggatatctgggttcatcattttggggaatggtcttcatacttgcatccacaaatctcctcactacaagaattgcagcgggttgtttcatacttgcattgtttattgttctttttgttgcagaaaatgtaagacttgtttgaattgtgcagtggtttcttcgctggctctgccttggattcattgtgttcattgctgttgtttgggtcatacaagaatttacatctttccatgttctgaaatatgtgatcttattcataggtgtgatgaacagcttattttcagtttacgatatttatgatgacttgatatcccgaagagttaacacaagtgatgctgaaaagtttgctgaaatctgcccttgcccctgcaatggttttgcatggggtgttatatggggattcatctcgtttatctttctctgcgcttcaatataccttggactggtcatattgtcttgagggttcgccattttgatctgacaatcgactctggttggctttttcgaagcttcgttgctcgaggttttggttcaagcttacaaggttctggtggttgtacagtatacatgtgcagggtaaacatgtacatccattataagttaatttggtggggattattcatggg

SEQ ID NO: 7740 - protein, 136 aa, Zea mays subsp. mays
  peptide (1)..(136): Ceres Seq. ID no. 12373185
  misc_feature (4)..(136): Homolog of NCBI NO: 15219816 NR Description: hypothetical protein; protein id: At1g67060.1
  misc_feature (1)..(136): Homolog of NCBI NO: 23619420 NR Description: hypothetical protein, conserved [Plasmodium
  misc_feature (12)..(136): Homolog of NCBI NO: 40740899 NR Description: hypothetical protein AN4854.2 [Aspergillus
  misc_feature (67)..(136): Homolog of NCBI NO: 23485893 NR Description: hypothetical protein [Plasmodium yoelii yoelii]
  misc_feature (4)..(64): Homolog of NCBI NO: 26449599 NR Description: unknown protein [Arabidopsis thaliana]
  misc_feature (16)..(136): Homolog of NCBI NO: 24212750 NR Description: conserved hypothetical protein [Leptospira serovar lai str. 56601] >gi|24193391|gb|AAN47249.1|AE011197_1 hypothetical protein [Leptospira interrogans serovar lai str.
MAVNWELRGCCDHDQRIFIAAVGVSTVVILLLWRTFLLTPFKLITVFLHETSHALACKLTCGDVEGMQVHANEGGVTQTRGGIYWIILPAGYLGSSFWGMVFILASTNLLTTRIAAGCFILALFIVLFVAENVRLV

SEQ ID NO: 7741 - protein, 129 aa, Zea mays subsp. mays
  peptide (1)..(129): Ceres Seq. ID no. 12373186
SLSLSLFLRPHARFHSDRARAPPGSFRSLLRSTSCLHIPSPEFEPEGRRVDLRRRPEDGRQLGAAGLLRPRPEDLHRRRRRLHRRHPPPLEDVPAHAVQAHHRLPPRDQPRACLQAHLRRCRRHAGPCE

SEQ ID NO: 7742 - protein, 121 aa, Zea mays subsp. mays
  peptide (1)..(121): Ceres Seq. ID no. 12373187
  misc_feature (61)..(120): Pfam Name: Lipoprotein amino terminal region Pfam Description: Lipoprotein amino terminal region
ISLSLSLPAPTRTFPLRPGQSPAGQFPFAVAIHLLPAHPLPRVRAGGPKSRSAAAARGWPSTGSCGAAATTTRGSSSPPSASPPSSSSSSGGRSCSRRSSSSPSSSTRPATRLPASSLAAM

SEQ ID NO: 7743 - DNA, 1754 bp, Zea mays subsp. mays
  misc_feature (1)..(1754): Ceres Seq. ID no. 12344330
  misc_feature: MA Experiment ID: 108504 Result: Up-regulated in Transcription
  misc_feature: MA Experiment 108504 PARAMETER Experiment Name: Zm_Drought_P Parameter: Age (day) Value: 8
  misc_feature: MA Experiment 108504 PARAMETER Experiment Name: Zm_Drought_P Parameter: Organism Value: Zea mays
  misc_feature: MA Experiment 108504 PARAMETER Experiment Name: Zm_Drought_P Parameter: Plant Line Value: 35A19
  misc_feature: MA Experiment 108504 PARAMETER Experiment Name: Zm_Drought_P Parameter: Timepoint (hr) Value: 12
  misc_feature: MA Experiment 108504 PARAMETER Experiment Name: Zm_Drought_P Parameter: Tissue Value: Aerial
  misc_feature: MA Experiment 108504 PARAMETER Experiment Name: Zm_Drought_P Parameter: Treatment Value: Drought vs. No Drought
  misc_feature: MA Experiment ID: 108527 Result: Up-regulated in Transcription
  misc_feature: MA Experiment 108527 PARAMETER Experiment Name: Zm_5mM_NO_P Parameter: Age (day) Value: 8
  misc_feature: MA Experiment 108527 PARAMETER Experiment Name: Zm_5mM_NO_P Parameter: Organism Value: Zea mays
  misc_feature: MA Experiment 108527 PARAMETER Experiment Name: Zm_5mM_NO_P Parameter: Plant Line Value: 35A19
  misc_feature: MA Experiment 108527 PARAMETER Experiment Name: Zm_5mM_NO_P Parameter: Timepoint (hr) Value: 6
  misc_feature: MA Experiment 108527 PARAMETER Experiment Name: Zm_5mM_NO_P Parameter: Tissue Value: Aerial
  misc_feature: MA Experiment 108527 PARAMETER Experiment Name: Zm_5mM_NO_P Parameter: Treatment Value: 5mM NO vs. No Treatment
  misc_feature: MA Experiment ID: 108540 Result: Up-regulated in Transcription
  misc_feature: MA Experiment 108540 PARAMETER Experiment Name: Zm_20percent_PEG_P Parameter: Age (day) Value: 8
  misc_feature: MA Experiment 108540 PARAMETER Experiment Name: Zm_20percent_PEG_P Parameter: Organism Value: Zea mays
  misc_feature: MA Experiment 108540 PARAMETER Experiment Name: Zm_20percent_PEG_P Parameter: Plant Line Value: 35A19
  misc_feature: MA Experiment 108540 PARAMETER Experiment Name: Zm_20percent_PEG_P Parameter: Timepoint (hr) Value: 6
  misc_feature: MA Experiment 108540 PARAMETER Experiment Name: Zm_20percent_PEG_P Parameter: Tissue Value: Aerial
  misc_feature: MA Experiment 108540 PARAMETER Experiment Name: Zm_20percent_PEG_P Parameter: Treatment Value: 20percent PEG vs. No Treatment
  misc_feature: MA Experiment ID: 108542 Result: Up-regulated in Transcription
  misc_feature: MA Experiment 108542 PARAMETER Experiment Name: Zm_150mM_NaCl_P Parameter: Age (day) Value: 8
  misc_feature: MA Experiment 108542 PARAMETER Experiment Name: Zm_150mM_NaCl_P Parameter: Organism Value: Zea mays
  misc_feature: MA Experiment 108542 PARAMETER Experiment Name: Zm_150mM_NaCl_P Parameter: Plant Line Value: 35A19
  misc_feature: MA Experiment 108542 PARAMETER Experiment Name: Zm_150mM_NaCl_P Parameter: Timepoint (hr) Value: 6
  misc_feature: MA Experiment 108542 PARAMETER Experiment Name: Zm_150mM_NaCl_P Parameter: Tissue Value: Aerial
  misc_feature: MA Experiment 108542 PARAMETER Experiment Name: Zm_150mM_NaCl_P Parameter: Treatment Value: 150mM NaCl vs. No Treatment
  misc_feature: MA Experiment ID: 108556 Result: Up-regulated in Transcription
  misc_feature: MA Experiment 108556 PARAMETER Experiment Name: Zm_Drought_P Parameter: Age (day) Value: 9
  misc_feature: MA Experiment 108556 PARAMETER Experiment Name: Zm_Drought_P Parameter: Organism Value: Zea mays
  misc_feature: MA Experiment 108556 PARAMETER Experiment Name: Zm_Drought_P Parameter: Plant Line Value: 35A19
  misc_feature: MA Experiment 108556 PARAMETER Experiment Name: Zm_Drought_P Parameter: Timepoint (hr) Value: 24
  misc_feature: MA Experiment 108556 PARAMETER Experiment Name: Zm_Drought_P Parameter: Tissue Value: Aerial
  misc_feature: MA Experiment 108556 PARAMETER Experiment Name: Zm_Drought_P Parameter: Treatment Value: Drought vs. No Drought
  misc_feature: MA Experiment ID: 108559 Result: Up-regulated in Transcription
  misc_feature: MA Experiment 108559 PARAMETER Experiment Name: Zm_5mM_NO_P Parameter: Age (day) Value: 8
  misc_feature: MA Experiment 108559 PARAMETER Experiment Name: Zm_5mM_NO_P Parameter: Organism Value: Zea mays
  misc_feature: MA Experiment 108559 PARAMETER Experiment Name: Zm_5mM_NO_P Parameter: Plant Line Value: 35A19
  misc_feature: MA Experiment 108559 PARAMETER Experiment Name: Zm_5mM_NO_P Parameter: Timepoint (hr) Value: 12
  misc_feature: MA Experiment 108559 PARAMETER Experiment Name: Zm_5mM_NO_P Parameter: Tissue Value: Aerial
  misc_feature: MA Experiment 108559 PARAMETER Experiment Name: Zm_5mM_NO_P Parameter: Treatment Value: 5mM NO vs. No Treatment
  misc_feature: MA Experiment ID: 20000478 Result: Up-regulated in Transcription
  misc_feature: MA Experiment 20000478 PARAMETER Experiment Name: Zm_5mM_SA_P Parameter: Age (day) Value: 11
  misc_feature: MA Experiment 20000478 PARAMETER Experiment Name: Zm_5mM_SA_P Parameter: Organism Value: Zea mays
  misc_feature: MA Experiment 20000478 PARAMETER Experiment Name: Zm_5mM_SA_P Parameter: Plant Line Value: 35A19
  misc_feature: MA Experiment 20000478 PARAMETER Experiment Name: Zm_5mM_SA_P Parameter: Timepoint (hr) Value: 72
  misc_feature: MA Experiment 20000478 PARAMETER Experiment Name: Zm_5mM_SA_P Parameter: Tissue Value: Aerial
  misc_feature: MA Experiment 20000478 PARAMETER Experiment Name: Zm_5mM_SA_P Parameter: Treatment Value: 5mM SA vs. No Treatment
  misc_feature: MA Experiment ID: 20000479 Result: Up-regulated in Transcription
  misc_feature: MA Experiment 20000479 PARAMETER Experiment Name: Zm_Drought_P Parameter: Age (day) Value: 10
  misc_feature: MA Experiment 20000479 PARAMETER Experiment Name: Zm_Drought_P Parameter: Organism Value: Zea mays
  misc_feature: MA Experiment 20000479 PARAMETER Experiment Name: Zm_Drought_P Parameter: Plant Line Value: 35A19
  misc_feature: MA Experiment 20000479 PARAMETER Experiment Name: Zm_Drought_P Parameter: Timepoint (hr) Value: 48
  misc_feature: MA Experiment 20000479 PARAMETER Experiment Name: Zm_Drought_P Parameter: Tissue Value: Aerial
  misc_feature: MA Experiment 20000479 PARAMETER Experiment Name: Zm_Drought_P Parameter: Treatment Value: Drought vs. No Drought
  misc_feature: MA Experiment ID: 20000480 Result: Up-regulated in Transcription
  misc_feature: MA Experiment 20000480 PARAMETER Experiment Name: Zm_Drought_P Parameter: Age (day) Value: 11
  misc_feature: MA Experiment 20000480 PARAMETER Experiment Name: Zm_Drought_P Parameter: Organism Value: Zea mays
  misc_feature: MA Experiment 20000480 PARAMETER Experiment Name: Zm_Drought_P Parameter: Plant Line Value: 35A19
  misc_feature: MA Experiment 20000480 PARAMETER Experiment Name: Zm_Drought_P Parameter: Timepoint (hr) Value: 72
  misc_feature: MA Experiment 20000480 PARAMETER Experiment Name: Zm_Drought_P Parameter: Tissue Value: Aerial
  misc_feature: MA Experiment 20000480 PARAMETER Experiment Name: Zm_Drought_P Parameter: Treatment Value: Drought vs. No Drought
  misc_feature: MA Experiment ID: 20000626 Result: Up-regulated in Transcription
  misc_feature: MA Experiment 20000626 PARAMETER Experiment Name: Zm_Herbicide-Treatments_P Parameter: Timepoint (hr) Value: 12
  misc_feature: MA Experiment 20000626 PARAMETER Experiment Name: Zm_Herbicide-Treatments_P Parameter: Tissue Value: Aerial
  misc_feature: MA Experiment 20000626 PARAMETER Experiment Name: Zm_Herbicide-Treatments_P Parameter: Treatment Value: Roundup vs. No Treatment
  misc_feature: MA Experiment ID: 20000627 Result: Up-regulated in Transcription
  misc_feature: MA Experiment 20000627 PARAMETER Experiment Name: Zm_Herbicide-Treatments_P Parameter: Timepoint (hr) Value: 12
  misc_feature: MA Experiment 20000627 PARAMETER Experiment Name: Zm_Herbicide-Treatments_P Parameter: Tissue Value: Aerial
  misc_feature: MA Experiment 20000627 PARAMETER Experiment Name: Zm_Herbicide-Treatments_P Parameter: Treatment Value: Finale vs. No Treatment
aagtagtgcttttcttctcttgtcacgttcacggggcggccgatcgaccgttcacctcgcccgacggcccaagcagcccatgtcttcgtcgggcccctccccggcgacgggaatccacgcgtcgccgccgttgggccttttgccggcgacgggaacccatcacaccaggtcatggggcaaaacaacctccacaagttttactggttctaccaccaaacatgagcagagcttgcatggaaatgttaagccgttgcaattggcggcaaatgaatcctctcgtttggcttacagaagtccagcacttaaaaaccagtggaatcttcctgctagttcttcctccactaatgtggttaccacctttgatgataacgaacacgtgtcttccagtgttattgaagaaaaagttggagtactgttattaaaccttggtggtccagagacacttgacgatgttcaaccatttttattcaacctatttgctgatccagatatcattcgactccctaggctcttcaggtttcttcaaagaccactggccaaacttatttctacttttagagctcctaagagtaaagaagggtatgcttcaattggtggtgggtcgccgttaaggaaaattactgatgaacaggcgaatgctttgaagattgccctggaaaagaaaaaattgaacgcaaacatatatgttgggatgcggtattggtaccctttcacagaagaggccattgatcaaattaaaaaggataagattaccaagctcgttgttcttcccctttaccctcagtactccatatcaacaagtgggtcaagcattcgtgttctccaagacattgtcaaggaagattcatatttttctggtttgccaatttccattattgaatcatggtaccaacgagatggctatgtgaaatcaatgtctgacctaattgaaaaggagctctccgccttctccaatcctgaagaggttatgatattcttcagtgcacatggtgtgccacttacctatgttgaggatgctggagatccttacagagatcagatggaggattgtattgctttgatcatgggggagttaagatcaagaggaatcttaaatagtcacactttggcgtaccagagtcgggtggggccagttcaatggctgaagccatatactgatgaagttttagtagaacttggtcaaaagggtgtgaagagcctcctggctgttccagtaagctttgtgagtgagcacatcgagacattggaagaaattgacatggagtacaaggagttggctctggaatcaggcatcaagaactggggtcgggttcctgctcttggatgcacttcaacattcatctccgaccttgcagatgctgtcgtcgaagccctgccctctgcttcagcgctcgcgaccagaaagcctgacgacatcgattccagcatggacctgacgcattacctcaccaagatgctgtttggctcaatcttggcatttgtcctgctgctatcaccaaggctagtttccgccttccggagcaccatgctttaagtttttctccaaagcactaaatttgagattgagaatgagatatttcattttggacctttttttcctccttaatagaatgatgtgcagttcttctgctcgttccagagaaaaaaataactgctaggaactcacaaggtagtaggggattgcaaaagggatgtgaacagctgttttgatcgaagttgtctataaataccgtgctcacggactctgtattttg

SEQ ID NO: 7744 - protein, 510 aa, Zea mays subsp. mays
  peptide (1)..(510): Ceres Seq. ID no. 12344331
  misc_feature (134)..(458): Pfam Name: Ferrochelatase Pfam Description: Ferrochelatase
  misc_feature (55)..(509): Homolog of NCBI NO: 7437214 NR Description: probable ferrochelatase (EC 4.99.1.1) - barley
  misc_feature (55)..(509): Homolog of NCBI NO: 1170242 NR Description: Ferrochelatase II, chloroplast precursor ferro- lyase) (Heme synthetase) >gi|7437215|pir||T05736 probable
  misc_feature (128)..(510): Homolog of NCBI NO: 1170239 NR Description: Ferrochelatase II, chloroplast precursor
  misc_feature (90)..(507): Homolog of NCBI NO: 30690097 NR Description: ferrochelatase-I [Arabidopsis thaliana]
  misc_feature (93)..(465): Homolog of NCBI NO: 3913808 NR Description: Ferrochelatase II, chloroplast precursor ferro- lyase) (Heme synthetase) >gi|2429618|dbj|BAA22284.1|
  misc_feature (116)..(465): Homolog of NCBI NO: 12082085 NR Description: ferrochelatase [Cucumis sativus]
  misc_feature (132)..(465): Homolog of NCBI NO: 7437212 NR Description: probable ferrochelatase (EC 4.99.1.1) - potato
  misc_feature (130)..(465): Homolog of NCBI NO: 15147828 NR Description: ferrochelatase [Nicotiana tabacum]
  misc_feature (77)..(465): Homolog of NCBI NO: 15227742 NR Description: putative ferrochelatase precusor; protein id: [Arabidopsis thaliana] >gi|3913871|sp|O04921|HMZ2_ARATH
  misc_feature (77)..(465): Homolog of NCBI NO: 2623990 NR Description: ferrochelatase [Arabidopsis thaliana]
SSAFLLLSRSRGGRSTVHLARRPKQPMSSSGPSPATGIHASPPLGLLPATGTHHTRSWGKTTSTSFTGSTTKHEQSLHGNVKPLQLAANESSRLAYRSPALKNQWNLPASSSSTNVVTTFDDNEHVSSSVIEEKVGVLLLNLGGPETLDDVQPFLFNLFADPDIIRLPRLFRFLQRPLAKLISTFRAPKSKEGYASIGGGSPLRKITDEQANALKIALEKKKLNANIYVGMRYWYPFTEEAIDQIKKDKITKLVVLPLYPQYSISTSGSSIRVLQDIVKEDSYFSGLPISIIESWYQRDGYVKSMSDLIEKELSAFSNPEEVMIFFSAHGVPLTYVEDAGDPYRDQMEDCIALIMGELRSRGILNSHTLAYQSRVGPVQWLKPYTDEVLVELGQKGVKSLLAVPVSFVSEHIETLEEIDMEYKELALESGIKNWGRVPALGCTSTFISDLADAVVEALPSASALATRKPDDIDSSMDLTHYLTKMLFGSILAFVLLLSPRLVSAFRSTML

SEQ ID NO: 7745 - protein, 484 aa, Zea mays subsp. mays
  peptide (1)..(484): Ceres Seq. ID no. 12344332
  misc_feature (108)..(432): Pfam Name: Ferrochelatase Pfam Description: Ferrochelatase
  misc_feature (29)..(483): Homolog of NCBI NO: 7437214 NR Description: probable ferrochelatase (EC 4.99.1.1) - barley
  misc_feature (29)..(483): Homolog of NCBI NO: 1170242 NR Description: Ferrochelatase II, chloroplast precursor ferro- lyase) (Heme synthetase) >gi|7437215|pir||T05736 probable
  misc_feature (102)..(484): Homolog of NCBI NO: 1170239 NR Description: Ferrochelatase II, chloroplast precursor
  misc_feature (64)..(481): Homolog of NCBI NO: 30690097 NR Description: ferrochelatase-I [Arabidopsis thaliana]
  misc_feature (67)..(439): Homolog of NCBI NO: 3913808 NR Description: Ferrochelatase II, chloroplast precursor ferro- lyase) (Heme synthetase) >gi|2429618|dbj|BAA22284.1|
  misc_feature (90)..(439): Homolog of NCBI NO: 12082085 NR Description: ferrochelatase [Cucumis sativus]
  misc_feature (106)..(439): Homolog of NCBI NO: 7437212 NR Description: probable ferrochelatase (EC 4.99.1.1) - potato
  misc_feature (104)..(439): Homolog of NCBI NO: 15147828 NR Description: ferrochelatase [Nicotiana tabacum]
  misc_feature (51)..(439): Homolog of NCBI NO: 15227742 NR Description: putative ferrochelatase precusor; protein id: [Arabidopsis thaliana] >gi|3913871|sp|O04921|HMZ2_ARATH
  misc_feature (51)..(439): Homolog of NCBI NO: 2623990 NR Description: ferrochelatase [Arabidopsis thaliana]
MSSSGPSPATGIHASPPLGLLPATGTHHTRSWGKTTSTSFTGSTTKHEQSLHGNVKPLQLAANESSRLAYRSPALKNQWNLPASSSSTNVVTTFDDNEHVSSSVIEEKVGVLLLNLGGPETLDDVQPFLFNLFADPDIIRLPRLFRFLQRPLAKLISTFRAPKSKEGYASIGGGSPLRKITDEQANALKIALEKKKLNANIYVGMRYWYPFTEEAIDQIKKDKITKLVVLPLYPQYSISTSGSSIRVLQDIVKEDSYFSGLPISIIESWYQRDGYVKSMSDLIEKELSAFSNPEEVMIFFSAHGVPLTYVEDAGDPYRDQMEDCIALIMGELRSRGILNSHTLAYQSRVGPVQWLKPYTDEVLVELGQKGVKSLLAVPVSFVSEHIETLEEIDMEYKELALESGIKNWGRVPALGCTSTFISDLADAVVEALPSASALATRKPDDIDSSMDLTHYLTKMLFGSILAFVLLLSPRLVSAFRSTML

SEQ ID NO: 7746 - protein, 280 aa, Zea mays subsp. mays
  peptide (1)..(280): Ceres Seq. ID no. 12344333
  misc_feature (1)..(228): Pfam Name: Ferrochelatase Pfam Description: Ferrochelatase
  misc_feature (1)..(279): Homolog of NCBI NO: 7437214 NR Description: probable ferrochelatase (EC 4.99.1.1) - barley
  misc_feature (1)..(279): Homolog of NCBI NO: 1170242 NR Description: Ferrochelatase II, chloroplast precursor ferro- lyase) (Heme synthetase) >gi|7437215|pir||T05736 probable
  misc_feature (1)..(280): Homolog of NCBI NO: 1170239 NR Description: Ferrochelatase II, chloroplast precursor
  misc_feature (1)..(277): Homolog of NCBI NO: 30690097 NR Description: ferrochelatase-I [Arabidopsis thaliana]
  misc_feature (1)..(235): Homolog of NCBI NO: 3913808 NR Description: Ferrochelatase II, chloroplast precursor ferro- lyase) (Heme synthetase) >gi|2429618|dbj|BAA22284.1|
  misc_feature (1)..(235): Homolog of NCBI NO: 12082085 NR Description: ferrochelatase [Cucumis sativus]
  misc_feature (1)..(235): Homolog of NCBI NO: 7437212 NR Description: probable ferrochelatase (EC 4.99.1.1) - potato
  misc_feature (1)..(235): Homolog of NCBI NO: 15147828 NR Description: ferrochelatase [Nicotiana tabacum]
  misc_feature (1)..(235): Homolog of NCBI NO: 15227742 NR Description: putative ferrochelatase precusor; protein id: [Arabidopsis thaliana] >gi|3913871|sp|O04921|HMZ2_ARATH
  misc_feature (1)..(235): Homolog of NCBI NO: 2623990 NR Description: ferrochelatase [Arabidopsis thaliana]
MRYWYPFTEEAIDQIKKDKITKLVVLPLYPQYSISTSGSSIRVLQDIVKEDSYFSGLPISIIESWYQRDGYVKSMSDLIEKELSAFSNPEEVMIFFSAHGVPLTYVEDAGDPYRDQMEDCIALIMGELRSRGILNSHTLAYQSRVGPVQWLKPYTDEVLVELGQKGVKSLLAVPVSFVSEHIETLEEIDMEYKELALESGIKNWGRVPALGCTSTFISDLADAVVEALPSASALATRKPDDIDSSMDLTHYLTKMLFGSILAFVLLLSPRLVSAFRSTML

SEQ ID NO: 7747 - DNA, 1192 bp, Zea mays subsp. mays
  misc_feature (1)..(1192): Ceres Seq. ID no. 12343186
  misc_feature: MA Experiment ID: 108528 Result: Up-regulated in Transcription
  misc_feature: MA Experiment 108528 PARAMETER Experiment Name: Zm_Imbibed_Seeds_P Parameter: Age (day) Value: 5 vs. 2
  misc_feature: MA Experiment 108528 PARAMETER Experiment Name: Zm_Imbibed_Seeds_P Parameter: Organism Value: Zea mays
  misc_feature: MA Experiment 108528 PARAMETER Experiment Name: Zm_Imbibed_Seeds_P Parameter: Plant Line Value: 35A19
  misc_feature: MA Experiment 108528 PARAMETER Experiment Name: Zm_Imbibed_Seeds_P Parameter: Tissue Value: Aerial vs. Embryo
  misc_feature: MA Experiment ID: 108530 Result: Up-regulated in Transcription
  misc_feature: MA Experiment 108530 PARAMETER Experiment Name: Zm_Imbibed_Seeds_P Parameter: Age (day) Value: 6 vs. 2
  misc_feature: MA Experiment 108530 PARAMETER Experiment Name: Zm_Imbibed_Seeds_P Parameter: Organism Value: Zea mays
  misc_feature: MA Experiment 108530 PARAMETER Experiment Name: Zm_Imbibed_Seeds_P Parameter: Plant Line Value: 35A19
  misc_feature: MA Experiment 108530 PARAMETER Experiment Name: Zm_Imbibed_Seeds_P Parameter: Tissue Value: Aerial vs. Embryo
  misc_feature: MA Experiment ID: 108536 Result: Down-regulated in Transcription
  misc_feature: MA Experiment 108536 PARAMETER Experiment Name: Zm_Meristem_P Parameter: Age (day) Value: 8
  misc_feature: MA Experiment 108536 PARAMETER Experiment Name: Zm_Meristem_P Parameter: Organism Value: Zea mays
  misc_feature: MA Experiment 108536 PARAMETER Experiment Name: Zm_Meristem_P Parameter: Plant Line Value: 35A19
  misc_feature: MA Experiment 108536 PARAMETER Experiment Name: Zm_Meristem_P Parameter: Tissue Value: Shoot Meristem vs. Above Shoot Meristem
  misc_feature: MA Experiment ID: 108543 Result: Up-regulated in Transcription
  misc_feature: MA Experiment ID: 108545 Result: Up-regulated in Transcription
  misc_feature: MA Experiment 108545 PARAMETER Experiment Name: Zm_Imbibed_Seeds_P Parameter: Age (day) Value: 3 vs. 2
  misc_feature: MA Experiment 108545 PARAMETER Experiment Name: Zm_Imbibed_Seeds_P Parameter: Organism Value: Zea mays
  misc_feature: MA Experiment 108545 PARAMETER Experiment Name: Zm_Imbibed_Seeds_P Parameter: Plant Line Value: 35A19
  misc_feature: MA Experiment 108545 PARAMETER Experiment Name: Zm_Imbibed_Seeds_P Parameter: Tissue Value: Aerial vs. Embryo
  misc_feature: MA Experiment ID: 108546 Result: Down-regulated in Transcription
  misc_feature: MA Experiment 108546 PARAMETER Experiment Name: Zm_Imbibed_Seeds_P Parameter: Age (day) Value: 3 vs. 2
  misc_feature: MA Experiment 108546 PARAMETER Experiment Name: Zm_Imbibed_Seeds_P Parameter: Organism Value: Zea mays
  misc_feature: MA Experiment 108546 PARAMETER Experiment Name: Zm_Imbibed_Seeds_P Parameter: Plant Line Value: 35A19
  misc_feature: MA Experiment 108546 PARAMETER Experiment Name: Zm_Imbibed_Seeds_P Parameter: Tissue Value: Roots vs. Embryo
  misc_feature: MA Experiment ID: 108547 Result: Up-regulated in Transcription
  misc_feature: MA Experiment 108547 PARAMETER Experiment Name: Zm_Imbibed_Seeds_P Parameter: Age (day) Value: 4 vs. 2
  misc_feature: MA Experiment 108547 PARAMETER Experiment Name: Zm_Imbibed_Seeds_P Parameter: Organism Value: Zea mays
  misc_feature: MA Experiment 108547 PARAMETER Experiment Name: Zm_Imbibed_Seeds_P Parameter: Plant Line Value: 35A19
  misc_feature: MA Experiment 108547 PARAMETER Experiment Name: Zm_Imbibed_Seeds_P Parameter: Tissue Value: Aerial vs. Embryo
  misc_feature: MA Experiment ID: 108559 Result: Down-regulated in Transcription
  misc_feature: MA Experiment 108559 PARAMETER Experiment Name: Zm_5mM_NO_P Parameter: Age (day) Value: 8
  misc_feature: MA Experiment 108559 PARAMETER Experiment Name: Zm_5mM_NO_P Parameter: Organism Value: Zea mays
  misc_feature: MA Experiment 108559 PARAMETER Experiment Name: Zm_5mM_NO_P Parameter: Plant Line Value: 35A19
  misc_feature: MA Experiment 108559 PARAMETER Experiment Name: Zm_5mM_NO_P Parameter: Timepoint (hr) Value: 12
  misc_feature: MA Experiment 108559 PARAMETER Experiment Name: Zm_5mM_NO_P Parameter: Tissue Value: Aerial
  misc_feature: MA Experiment 108559 PARAMETER Experiment Name: Zm_5mM_NO_P Parameter: Treatment Value: 5mM NO vs. No Treatment
  misc_feature: MA Experiment ID: 20000477 Result: Down-regulated in Transcription
  misc_feature: MA Experiment 20000477 PARAMETER Experiment Name: Zm_5mM_SA_P Parameter: Age (day) Value: 10
  misc_feature: MA Experiment 20000477 PARAMETER Experiment Name: Zm_5mM_SA_P Parameter: Organism Value: Zea mays
  misc_feature: MA Experiment 20000477 PARAMETER Experiment Name: Zm_5mM_SA_P Parameter: Plant Line Value: 35A19
  misc_feature: MA Experiment 20000477 PARAMETER Experiment Name: Zm_5mM_SA_P Parameter: Timepoint (hr) Value: 48
  misc_feature: MA Experiment 20000477 PARAMETER Experiment Name: Zm_5mM_SA_P Parameter: Tissue Value: Aerial
  misc_feature: MA Experiment 20000477 PARAMETER Experiment Name: Zm_5mM_SA_P Parameter: Treatment Value: 5mM SA vs. No Treatment
  misc_feature: MA Experiment ID: 20000480 Result: Down-regulated in Transcription
  misc_feature: MA Experiment 20000480 PARAMETER Experiment Name: Zm_Drought_P Parameter: Age (day) Value: 11
  misc_feature: MA Experiment 20000480 PARAMETER Experiment Name: Zm_Drought_P Parameter: Organism Value: Zea mays
  misc_feature: MA Experiment 20000480 PARAMETER Experiment Name: Zm_Drought_P Parameter: Plant Line Value: 35A19
  misc_feature: MA Experiment 20000480 PARAMETER Experiment Name: Zm_Drought_P Parameter: Timepoint (hr) Value: 72
  misc_feature: MA Experiment 20000480 PARAMETER Experiment Name: Zm_Drought_P Parameter: Tissue Value: Aerial
  misc_feature: MA Experiment 20000480 PARAMETER Experiment Name: Zm_Drought_P Parameter: Treatment Value: Drought vs. No Drought
  misc_feature: MA Experiment ID: 20000626 Result: Down-regulated in Transcription
  misc_feature: MA Experiment 20000626 PARAMETER Experiment Name: Zm_Herbicide-Treatments_P Parameter: Timepoint (hr) Value: 12
  misc_feature: MA Experiment 20000626 PARAMETER Experiment Name: Zm_Herbicide-Treatments_P Parameter: Tissue Value: Aerial
  misc_feature: MA Experiment 20000626 PARAMETER Experiment Name: Zm_Herbicide-Treatments_P Parameter: Treatment Value: Roundup vs. No Treatment
acaccgtccaccggcacgtccaccggctccatggcgctccacgccgtctcctccgcggcggtctcctccccgttgcgctctctctcacgcagcctcccccagcgcccaggctgtggttgtttaccaaagcagtccgtcatgatttactccacaaaatttgcaagacctcaggctggaccggtggacttcgctggcaggcctctggttcttggacgctcggacaagagagcagttttgatgcatgccactattgaagaaatcgaagcggagaaatccctcatcgaagaccaagctaaagaaaagatggagaaggcaatcgaaacagtccaagctaacttcaacactgtgaggacaggacgtgcaaacccggccatgcttgaccggattgaggttgagtactacggaactccagtaaacttgaagagcattgcacagataagcactccagatgcaacttctcttcttattcaaccatatgataagtcaagcctcaagcttattgagaaaactatagttgctgcaaatcttggtgtgacaccaagcaatgatggagaagtaatacgagtgactgtcccaccattgacatctgatcgcagaaaggaattatcaaagacagtagctaaattagctgaagatggcaaggttgctataaggaacataagaagagatgcaatcaaagcttatgataaactagagaaggaaaagaagctttctgaggacaatgtgaaagatttatcagctgatttacaaaaagtcacagatgagtacatgaaaaagatcgaatccatccagaagcagaaggaacaggaactgatgaaaatttagacctcaagctgactgtatggctggtgaggagtaaccgcctccgtgaagcatggacccctgcatatgttggtgtttctgaagcaatttgtttggttcatggctttggcgtctcggcgctgcgccagggatgcacgttttgaatcaggcgctttgctggaacttttgggtgcacacaagttgagacaatgctgctgctgctgtgtgtgtgtgtttttagattaagacaatgctgctgtgttttttctttgagattaagacaatgctgttgcgtgtgttcttctcgttttctgtaatgttcgtaaatagtctcttcgtcgccgtgttgtctgactgctacattgtcaatatttcaaaacatacatctctg

SEQ ID NO: 7748 - protein, 274 aa, Zea mays subsp. mays
  peptide (1)..(274): Ceres Seq. ID no. 12343187
  misc_feature (108)..(272): Pfam Name: Ribosome recycling factor Pfam Description: Ribosome recycling factor
  misc_feature (13)..(274): Homolog of NCBI NO: 34394208 NR Description: putative Ribosome recycling factor, chloroplast
  misc_feature (11)..(274): Homolog of NCBI NO: 7388105 NR Description: Ribosome recycling factor, chloroplast precursor releasing factor, chloroplast) (RRF) (CpFrr) (RRFHCP)
  misc_feature (19)..(274): Homolog of NCBI NO: 18412657 NR Description: putative protein; protein id: At3g63190.1, by cDNA: gi_13926251, supported by cDNA: gi_15982708, supported cDNA: gi_20260165 [Arabidopsis thaliana]
  misc_feature (50)..(274): Homolog of NCBI NO: 7404451 NR Description: RIBOSOME RECYCLING FACTOR, CHLOROPLAST PRECURSOR
  misc_feature (19)..(274): Homolog of NCBI NO: 11277801 NR Description: hypothetical protein F16M2.40 - Arabidopsis >gi|7523401|emb|CAB86420.1| putative protein [Arabidopsis
  misc_feature (120)..(274): Homolog of NCBI NO: 629661 NR Description: ribosome releasing factor - carrot
  misc_feature (97)..(274): Homolog of NCBI NO: 17228703 NR Description: ribosome recycling factor [Nostoc sp. PCC 7120]
  misc_feature (99)..(274): Homolog of NCBI NO: 22297803 NR Description: ribosome releasing factor [Thermosynechococcus BP- 1] >gi|22293980|dbj|BAC07812.1| ribosome releasing factor
  misc_feature (93)..(274): Homolog of NCBI NO: 23126085 NR Description: hypothetical protein [Nostoc punctiforme]
  misc_feature (97)..(274): Homolog of NCBI NO: 23041074 NR Description: hypothetical protein [Trichodesmium erythraeum
TPSTGTSTGSMALHAVSSAAVSSPLRSLSRSLPQRPGCGCLPKQSVMIYSTKFARPQAGPVDFAGRPLVLGRSDKRAVLMHATIEEIEAEKSLIEDQAKEKMEKAIETVQANFNTVRTGRANPAMLDRIEVEYYGTPVNLKSIAQISTPDATSLLIQPYDKSSLKLIEKTIVAANLGVTPSNDGEVIRVTVPPLTSDRRKELSKTVAKLAEDGKVAIRNIRRDAIKAYDKLEKEKKLSEDNVKDLSADLQKVTDEYMKKIESIQKQKEQELMKI

SEQ ID NO: 7749 - protein, 264 aa, Zea mays subsp. mays
  peptide (1)..(264): Ceres Seq. ID no. 12343188
  misc_feature (98)..(262): Pfam Name: Ribosome recycling factor Pfam Description: Ribosome recycling factor
  misc_feature (3)..(264): Homolog of NCBI NO: 34394208 NR Description: putative Ribosome recycling factor, chloroplast
  misc_feature (1)..(264): Homolog of NCBI NO: 7388105 NR Description: Ribosome recycling factor, chloroplast precursor releasing factor, chloroplast) (RRF) (CpFrr) (RRFHCP)
  misc_feature (9)..(264): Homolog of NCBI NO: 18412657 NR Description: putative protein; protein id: At3g63190.1, by cDNA: gi_13926251, supported by cDNA: gi_15982708, supported cDNA: gi_20260165 [Arabidopsis thaliana]
  misc_feature (40)..(264): Homolog of NCBI NO: 7404451 NR Description: RIBOSOME RECYCLING FACTOR, CHLOROPLAST PRECURSOR
  misc_feature (9)..(264): Homolog of NCBI NO: 11277801 NR Description: hypothetical protein F16M2.40 - Arabidopsis >gi|7523401|emb|CAB86420.1| putative protein [Arabidopsis
  misc_feature (110)..(264): Homolog of NCBI NO: 629661 NR Description: ribosome releasing factor - carrot
  misc_feature (87)..(264): Homolog of NCBI NO: 17228703 NR Description: ribosome recycling factor [Nostoc sp. PCC 7120]
  misc_feature (89)..(264): Homolog of NCBI NO: 22297803 NR Description: ribosome releasing factor [Thermosynechococcus BP- 1] >gi|22293980|dbj|BAC07812.1| ribosome releasing factor
  misc_feature (83)..(264): Homolog of NCBI NO: 23126085 NR Description: hypothetical protein [Nostoc punctiforme]
  misc_feature (87)..(264): Homolog of NCBI NO: 23041074 NR Description: hypothetical protein [Trichodesmium erythraeum
MALHAVSSAAVSSPLRSLSRSLPQRPGCGCLPKQSVMIYSTKFARPQAGPVDFAGRPLVLGRSDKRAVLMHATIEEIEAEKSLIEDQAKEKMEKAIETVQANFNTVRTGRANPAMLDRIEVEYYGTPVNLKSIAQISTPDATSLLIQPYDKSSLKLIEKTIVAANLGVTPSNDGEVIRVTVPPLTSDRRKELSKTVAKLAEDGKVAIRNIRRDAIKAYDKLEKEKKLSEDNVKDLSADLQKVTDEYMKKIESIQKQKEQELMKI

SEQ ID NO: 7750 - protein, 228 aa, Zea mays subsp. mays
  peptide (1)..(228): Ceres Seq. ID no. 12343189
  misc_feature (62)..(226): Pfam Name: Ribosome recycling factor Pfam Description: Ribosome recycling factor
  misc_feature (1)..(228): Homolog of NCBI NO: 34394208 NR Description: putative Ribosome recycling factor, chloroplast
  misc_feature (1)..(228): Homolog of NCBI NO: 7388105 NR Description: Ribosome recycling factor, chloroplast precursor releasing factor, chloroplast) (RRF) (CpFrr) (RRFHCP)
  misc_feature (1)..(228): Homolog of NCBI NO: 18412657 NR Description: putative protein; protein id: At3g63190.1, by cDNA: gi_13926251, supported by cDNA: gi_15982708, supported cDNA: gi_20260165 [Arabidopsis thaliana]
  misc_feature (4)..(228): Homolog of NCBI NO: 7404451 NR Description: RIBOSOME RECYCLING FACTOR, CHLOROPLAST PRECURSOR
  misc_feature (1)..(228): Homolog of NCBI NO: 11277801 NR Description: hypothetical protein F16M2.40 - Arabidopsis >gi|7523401|emb|CAB86420.1| putative protein [Arabidopsis
  misc_feature (74)..(228): Homolog of NCBI NO: 629661 NR Description: ribosome releasing factor - carrot
  misc_feature (51)..(228): Homolog of NCBI NO: 17228703 NR Description: ribosome recycling factor [Nostoc sp. PCC 7120]
  misc_feature (53)..(228): Homolog of NCBI NO: 22297803 NR Description: ribosome releasing factor [Thermosynechococcus BP- 1] >gi|22293980|dbj|BAC07812.1| ribosome releasing factor
  misc_feature (47)..(228): Homolog of NCBI NO: 23126085 NR Description: hypothetical protein [Nostoc punctiforme]
  misc_feature (51)..(228): Homolog of NCBI NO: 23041074 NR Description: hypothetical protein [Trichodesmium erythraeum
MIYSTKFARPQAGPVDFAGRPLVLGRSDKRAVLMHATIEEIEAEKSLIEDQAKEKMEKAIETVQANFNTVRTGRANPAMLDRIEVEYYGTPVNLKSIAQISTPDATSLLIQPYDKSSLKLIEKTIVAANLGVTPSNDGEVIRVTVPPLTSDRRKELSKTVAKLAEDGKVAIRNIRRDAIKAYDKLEKEKKLSEDNVKDLSADLQKVTDEYMKKIESIQKQKEQELMKI

SEQ ID NO: 7751 - DNA, 1421 bp, Zea mays subsp. mays
  misc_feature (1)..(1421): Ceres Seq. ID no. 12408617
  misc_feature: MA Experiment ID: 108535 Result: Down-regulated in Transcription
  misc_feature: MA Experiment 108535 PARAMETER Experiment Name: Zm_Meristem_P Parameter: Age (day) Value: 8
  misc_feature: MA Experiment 108535 PARAMETER Experiment Name: Zm_Meristem_P Parameter: Organism Value: Zea mays
  misc_feature: MA Experiment 108535 PARAMETER Experiment Name: Zm_Meristem_P Parameter: Plant Line Value: 35A19
  misc_feature: MA Experiment 108535 PARAMETER Experiment Name: Zm_Meristem_P Parameter: Tissue Value: Root Meristem vs. Above Root Meristem
  misc_feature: MA Experiment ID: 20000108 Result: Down-regulated in Transcription
  misc_feature: MA Experiment 20000108 PARAMETER Experiment Name: Zm_Root-Tips_P Parameter: Age (day) Value: 12
  misc_feature: MA Experiment 20000108 PARAMETER Experiment Name: Zm_Root-Tips_P Parameter: Organism Value: Zea mays
  misc_feature: MA Experiment 20000108 PARAMETER Experiment Name: Zm_Root-Tips_P Parameter: Tissue Value: Root tips vs. Root mid region    35
  misc_feature: MA Experiment 20000108 PARAMETER Experiment Name: Zm_Root-Tips_P Parameter: Tissue Value: Root tips vs. Root mid region   Sequence Listing-Misc Features (4)
cagacacctaaacgatgacacagcgtgcacccaccaccaccaccagcgccgactgccgagcgccggccgcgataccgtcgtgtcccccctccccaccgcattagcgccggccgacaaaattactaggtgcttaatttaactagtggccctaggcgtgaaacttcaccagctccgccactgcccatggccaacggctttccggaccctcgctgcgtcgtcctcaccgccgacgctgcccgatccctcgtcggattccgtcgacgccttcctcttcgactgcgatggcgtcatttggaagggagatatgctcattgaaggggtcccagagacgatggagctactgaggaaactgggaaagaaattagtttttgtaacaaataactctagaaagtcaagaaggcaatactcaaagaaattcagatcacttggacttgaagttactgaggaagagatttttacatcatcgtttgcggcagccatgttcttgaagttaaataattttcctccagaaaagaaggtttatgttgttggtgaagatggaatcttggaagagctcaagttagctggttttgaatgttttggtggtccggaggatggcaagaaaaacataaagttggaggcggatttctactttgaacatgacaaaagtgttggagctgtcattgttggacttgatcagtacttcaattattataaaatgcagtatgcaagaacatgtattagtgagaaccctggctgctttttcattgcgaccaaccgtgatccaaccgggcatatgacatctgcccaagaatggccaggagctggagctatggttgctgcagtaagctgctcagtacagaaagaacccattgttgttggaaaaccttcaggctttttgatggacttcctcttgaaaagcttcaatctggagacgtcaaggatgtgcatggttggtgatagactggacacggacatactatttggccagaacaccggctgcaagaccctccttgttttgtctggttgcactgccttaccagaagtgcaggatgctcgtaacaatatccatccagatctctacacaaacagcgtgtatgatctagttgggttactgcagaagtaattctccttggccgcgttgcagcgcaatctcagcacgctttggatagcgcctatcagcaatttattacgtggattacttgcatgaagccatgtgttcttgaaacaacaattttgaactttctttggggtaacctgtttgacagtaacaaaatctttcaattggatcctacaaattagaccaatttgacaaccttgtaagcgtggctgtaaagctttaaatctggcaacttgattcccttgctggaaaatatattggttggagtatggaattgtacagaatcgaattgtaatgaagcaacgtgttgtactttgttgct

SEQ ID NO: 7752 - protein, 266 aa, Zea mays subsp. mays
  peptide (1)..(266): Ceres Seq. ID no. 12408618
  misc_feature (1)..(234): Pfam Name: haloacid dehalogenase-like hydrolase Pfam Description: haloacid dehalogenase-like hydrolase
  misc_feature (1)..(265): Homolog of NCBI NO: 21593203 NR Description: 4-nitrophenylphosphatase-like protein
  misc_feature (1)..(265): Homolog of NCBI NO: 10177912 NR Description: 4-nitrophenylphosphatase-like protein
  misc_feature (1)..(265): Homolog of NCBI NO: 15238800 NR Description: 4-nitrophenylphosphatase-like protein; protein
  misc_feature (1)..(263): Homolog of NCBI NO: 38345235 NR Description: OSJNBa0084K20.14 [Oryza sativa (japonica
  misc_feature (1)..(261): Homolog of NCBI NO: 15239406 NR Description: p-nitrophenylphosphatase-like protein; protein At5g36790.1, supported by cDNA: gi_20453152 [Arabidopsis >gi|20453153|gb|AAM19818.1| AT5g36790/f5h8_20 [Arabidopsis
  misc_feature (1)..(261): Homolog of NCBI NO: 26450878 NR Description: putative p-nitrophenylphosphatase [Arabidopsis
  misc_feature (1)..(238): Homolog of NCBI NO: 8953699 NR Description: 4-nitrophenylphosphatase-like [Arabidopsis
  misc_feature (1)..(266): Homolog of NCBI NO: 15982558 NR Description: phosphoglycolate phosphatase precursor reinhardtii] >gi|28316388|dbj|BAC56941.1| phosphoglycolate
  misc_feature (1)..(261): Homolog of NCBI NO: 23612522 NR Description: 4-nitrophenylphosphatase, putative [Plasmodium
  misc_feature (1)..(265): Homolog of NCBI NO: 28277794 NR Description: Unknown (protein for MGC:56011) [Danio rerio]
MLIEGVPETMELLRKLGKKLVFVTNNSRKSRRQYSKKFRSLGLEVTEEEIFTSSFAAAMFLKLNNFPPEKKVYVVGEDGILEELKLAGFECFGGPEDGKKNIKLEADFYFEHDKSVGAVIVGLDQYFNYYKMQYARTCISENPGCFFIATNRDPTGHMTSAQEWPGAGAMVAAVSCSVQKEPIVVGKPSGFLMDFLLKSFNLETSRMCMVGDRLDTDILFGQNTGCKTLLVLSGCTALPEVQDARNNIHPDLYTNSVYDLVGLLQK

SEQ ID NO: 7753 - protein, 257 aa, Zea mays subsp. mays
  peptide (1)..(257): Ceres Seq. ID no. 12408619
  misc_feature (1)..(225): Pfam Name: haloacid dehalogenase-like hydrolase Pfam Description: haloacid dehalogenase-like hydrolase
  misc_feature (1)..(256): Homolog of NCBI NO: 21593203 NR Description: 4-nitrophenylphosphatase-like protein
  misc_feature (1)..(256): Homolog of NCBI NO: 10177912 NR Description: 4-nitrophenylphosphatase-like protein
  misc_feature (1)..(256): Homolog of NCBI NO: 15238800 NR Description: 4-nitrophenylphosphatase-like protein; protein
  misc_feature (1)..(254): Homolog of NCBI NO: 38345235 NR Description: OSJNBa0084K20.14 [Oryza sativa (japonica
  misc_feature (1)..(252): Homolog of NCBI NO: 15239406 NR Description: p-nitrophenylphosphatase-like protein; protein At5g36790.1, supported by cDNA: gi_20453152 [Arabidopsis >gi|20453153|gb|AAM19818.1| AT5g36790/f5h8_20 [Arabidopsis
  misc_feature (1)..(252): Homolog of NCBI NO: 26450878 NR Description: putative p-nitrophenylphosphatase [Arabidopsis
  misc_feature (1)..(229): Homolog of NCBI NO: 8953699 NR Description: 4-nitrophenylphosphatase-like [Arabidopsis
  misc_feature (1)..(257): Homolog of NCBI NO: 15982558 NR Description: phosphoglycolate phosphatase precursor reinhardtii] >gi|28316388|dbj|BAC56941.1| phosphoglycolate
  misc_feature (1)..(252): Homolog of NCBI NO: 23612522 NR Description: 4-nitrophenylphosphatase, putative [Plasmodium
  misc_feature (1)..(256): Homolog of NCBI NO: 28277794 NR Description: Unknown (protein for MGC:56011) [Danio rerio]
MELLRKLGKKLVFVTNNSRKSRRQYSKKFRSLGLEVTEEEIFTSSFAAAMFLKLNNFPPEKKVYVVGEDGILEELKLAGFECFGGPEDGKKNIKLEADFYFEHDKSVGAVIVGLDQYFNYYKMQYARTCISENPGCFFIATNRDPTGHMTSAQEWPGAGAMVAAVSCSVQKEPIVVGKPSGFLMDFLLKSFNLETSRMCMVGDRLDTDILFGQNTGCKTLLVLSGCTALPEVQDARNNIHPDLYTNSVYDLVGLLQK

SEQ ID NO: 7754 - protein, 208 aa, Zea mays subsp. mays
  peptide (1)..(208): Ceres Seq. ID no. 12408620
  misc_feature (1)..(176): Pfam Name: haloacid dehalogenase-like hydrolase Pfam Description: haloacid dehalogenase-like hydrolase
  misc_feature (1)..(207): Homolog of NCBI NO: 21593203 NR Description: 4-nitrophenylphosphatase-like protein
  misc_feature (1)..(207): Homolog of NCBI NO: 10177912 NR Description: 4-nitrophenylphosphatase-like protein
  misc_feature (1)..(207): Homolog of NCBI NO: 15238800 NR Description: 4-nitrophenylphosphatase-like protein; protein
  misc_feature (1)..(205): Homolog of NCBI NO: 38345235 NR Description: OSJNBa0084K20.14 [Oryza sativa (japonica
  misc_feature (1)..(203): Homolog of NCBI NO: 15239406 NR Description: p-nitrophenylphosphatase-like protein; protein At5g36790.1, supported by cDNA: gi_20453152 [Arabidopsis >gi|20453153|gb|AAM19818.1| AT5g36790/f5h8_20 [Arabidopsis
  misc_feature (1)..(203): Homolog of NCBI NO: 26450878 NR Description: putative p-nitrophenylphosphatase [Arabidopsis
  misc_feature (1)..(180): Homolog of NCBI NO: 8953699 NR Description: 4-nitrophenylphosphatase-like [Arabidopsis
  misc_feature (1)..(208): Homolog of NCBI NO: 15982558 NR Description: phosphoglycolate phosphatase precursor reinhardtii] >gi|28316388|dbj|BAC56941.1| phosphoglycolate
  misc_feature (1)..(203): Homolog of NCBI NO: 23612522 NR Description: 4-nitrophenylphosphatase, putative [Plasmodium
  misc_feature (1)..(207): Homolog of NCBI NO: 28277794 NR Description: Unknown (protein for MGC:56011) [Danio rerio]
MFLKLNNFPPEKKVYVVGEDGILEELKLAGFECFGGPEDGKKNIKLEADFYFEHDKSVGAVIVGLDQYFNYYKMQYARTCISENPGCFFIATNRDPTGHMTSAQEWPGAGAMVAAVSCSVQKEPIVVGKPSGFLMDFLLKSFNLETSRMCMVGDRLDTDILFGQNTGCKTLLVLSGCTALPEVQDARNNIHPDLYTNSVYDLVGLLQK

SEQ ID NO: 7755 - DNA, 1369 bp, Zea mays subsp. mays
  misc_feature (1)..(1369): Ceres Seq. ID no. 12408614
  misc_feature: MA Experiment ID: 108527 Result: Up-regulated in Transcription
  misc_feature: MA Experiment 108527 PARAMETER Experiment Name: Zm_5mM_NO_P Parameter: Age (day) Value: 8
  misc_feature: MA Experiment 108527 PARAMETER Experiment Name: Zm_5mM_NO_P Parameter: Organism Value: Zea mays
  misc_feature: MA Experiment 108527 PARAMETER Experiment Name: Zm_5mM_NO_P Parameter: Plant Line Value: 35A19
  misc_feature: MA Experiment 108527 PARAMETER Experiment Name: Zm_5mM_NO_P Parameter: Timepoint (hr) Value: 6
  misc_feature: MA Experiment 108527 PARAMETER Experiment Name: Zm_5mM_NO_P Parameter: Tissue Value: Aerial
  misc_feature: MA Experiment 108527 PARAMETER Experiment Name: Zm_5mM_NO_P Parameter: Treatment Value: 5mM NO vs. No Treatment
ttttaaagaaaagctccccccatccacgaacaaaagatcgcgaagcgagagggaatgatggaggcataggcactagcacctcctcgcctccacctccgtcctcttcgatcccgtccaatcccccgcgccccggcgcccctctccgccggcggctttgctgggtcccgcgctcctcctcctcctaggctgttctggttggggctgcggcggagggaactaggtaagggggaaggaaaggggaggtttgagggagagcgcagcggcagcggcagcagcgatgccatcgcccggatctggaccgccagatctcgcagctgcgggattgcaagttcctgcctgaggcggaggtcaaaacgctatgcgagcaggccaaggcgatcctcatggaggagtggaacgtgcagcccgtgcgttgccccgtcactgtctgcggcgacatccacggccagttctacgacctcatcgagctctttcgcatcggtggcgacgcgcccgacaccaactacctctttatgggcgactacgtcgaccgtggctactactcagtggagactgtgtccttattggtggctctaaaagtacgttatagagacagaatcacaatattgagaggaaatcatgagagtagacaaataactcaagtgtatggcttctatgatgaatgcttgcggaaatatggaaatgcaaatgtgtggaagtactttacagacttgtttgattatttgcctctcacagctcttatagaaaatcagatcttctgcctacatggtggtctctctccatcactggatactttggataatgtccgctcccttgatcgcatacaagaggtcccgcatgaaggacctatgtgtgatcttttgtggtctgacccggatgacagatgtggatggggaatttcaccaaggggtgctggatacacatttggccaagatattgcacaacaattcaaccatacaaatgggctaagtcttatttcaagagctcatcaacttgtaatggaagggttcaattggtgccaggataagaacgttgtgacagtgttcagcgcgcctaactattgctaccgatgcgggaacatggctgcgatcctcgaaattggcgagaacatggatcagaacttcctccaattcgacccagctccgcggcagattgagccggacatgacgcgcaagaccccagactactttttgtaatcagcatgctggctttctttcaacttgtctactgcagcgccagcacctgtagatctccttagaaaatggtgtttcctctagccgccttgtacccccatcattcttttggtgtggagattttattgccgcttctcagaacattgaggttgttgaaagtacatggcattgggtct

SEQ ID NO: 7756 - protein, 270 aa, Zea mays subsp. mays
  peptide (1)..(270): Ceres Seq. ID no. 12408615
  misc_feature (11)..(206): Pfam Name: Calcineurin-like phosphoesterase Pfam Description: Calcineurin-like phosphoesterase
  misc_feature (1)..(270): Homolog of NCBI NO: 11134285 NR Description: Serine/threonine protein phosphatase PP2A-1 subunit >gi|3859548|gb|AAC72838.1| protein phosphatase 2A
  misc_feature (1)..(270): Homolog of NCBI NO: 11134222 NR Description: Serine/threonine protein phosphatase PP2A-3 subunit >gi|5231210|gb|AAD41126.1|AF159061_1 serine/threonine
  misc_feature (1)..(270): Homolog of NCBI NO: 7435122 NR Description: probable phosphoprotein phosphatase (EC 3.1.3.16)
  misc_feature (1)..(270): Homolog of NCBI NO: 10638985 NR Description: protein phosphatase 2A [Fagus sylvatica]
  misc_feature (1)..(270): Homolog of NCBI NO: 7248359 NR Description: type 2A protein phosphatase-1 [Vicia faba]
  misc_feature (1)..(270): Homolog of NCBI NO: 15218524 NR Description: serine/threonine protein phosphatase, PP2A; id: At1g10430.1, supported by cDNA: gi_16648954, supported by gi_166822, supported by cDNA: gi_20259837 [Arabidopsis thaliana]
  misc_feature (1)..(270): Homolog of NCBI NO: 15218928 NR Description: serine/threonine protein phosphatase PP2A; id: At1g59830.1, supported by cDNA: 36621., supported by cDNA: supported by cDNA: gi_17380971, supported by cDNA: gi_20465466
  misc_feature (1)..(270): Homolog of NCBI NO: 21593150 NR Description: serine/threonine protein phosphatase type 2A,
  misc_feature (1)..(270): Homolog of NCBI NO: 15222511 NR Description: serine/threonine protein phosphatase type 2A protein id: At1g69960.1, supported by cDNA: gi_1912285
  misc_feature (1)..(270): Homolog of NCBI NO: 11133825 NR Description: Serine/threonine protein phosphatase PP2A subunit >gi|3986750|gb|AAD09953.1| serine/threonine protein
MEEWNVQPVRCPVTVCGDIHGQFYDLIELFRIGGDAPDTNYLFMGDYVDRGYYSVETVSLLVALKVRYRDRITILRGNHESRQITQVYGFYDECLRKYGNANVWKYFTDLFDYLPLTALIENQIFCLHGGLSPSLDTLDNVRSLDRIQEVPHEGPMCDLLWSDPDDRCGWGISPRGAGYTFGQDIAQQFNHTNGLSLISRAHQLVMEGFNWCQDKNVVTVFSAPNYCYRCGNMAAILEIGENMDQNFLQFDPAPRQIEPDMTRKTPDYFL

SEQ ID NO: 7757 - protein, 227 aa, Zea mays subsp. mays
  peptide (1)..(227): Ceres Seq. ID no. 12408616
  misc_feature (1)..(163): Pfam Name: Calcineurin-like phosphoesterase Pfam Description: Calcineurin-like phosphoesterase
  misc_feature (1)..(227): Homolog of NCBI NO: 11134285 NR Description: Serine/threonine protein phosphatase PP2A-1 subunit >gi|3859548|gb|AAC72838.1| protein phosphatase 2A
  misc_feature (1)..(227): Homolog of NCBI NO: 11134222 NR Description: Serine/threonine protein phosphatase PP2A-3 subunit >gi|5231210|gb|AAD41126.1|AF159061_1 serine/threonine
  misc_feature (1)..(227): Homolog of NCBI NO: 7435122 NR Description: probable phosphoprotein phosphatase (EC 3.1.3.16)
  misc_feature (1)..(227): Homolog of NCBI NO: 10638985 NR Description: protein phosphatase 2A [Fagus sylvatica]
  misc_feature (1)..(227): Homolog of NCBI NO: 7248359 NR Description: type 2A protein phosphatase-1 [Vicia faba]
  misc_feature (1)..(227): Homolog of NCBI NO: 15218524 NR Description: serine/threonine protein phosphatase, PP2A; id: At1g10430.1, supported by cDNA: gi_16648954, supported by gi_166822, supported by cDNA: gi_20259837 [Arabidopsis thaliana]
  misc_feature (1)..(227): Homolog of NCBI NO: 15218928 NR Description: serine/threonine protein phosphatase PP2A; id: At1g59830.1, supported by cDNA: 36621., supported by cDNA: supported by cDNA: gi_17380971, supported by cDNA: gi_20465466
  misc_feature (1)..(227): Homolog of NCBI NO: 21593150 NR Description: serine/threonine protein phosphatase type 2A,
  misc_feature (1)..(227): Homolog of NCBI NO: 15222511 NR Description: serine/threonine protein phosphatase type 2A protein id: At1g69960.1, supported by cDNA: gi_1912285
  misc_feature (1)..(227): Homolog of NCBI NO: 11133825 NR Description: Serine/threonine protein phosphatase PP2A subunit >gi|3986750|gb|AAD09953.1| serine/threonine protein
MGDYVDRGYYSVETVSLLVALKVRYRDRITILRGNHESRQITQVYGFYDECLRKYGNANVWKYFTDLFDYLPLTALIENQIFCLHGGLSPSLDTLDNVRSLDRIQEVPHEGPMCDLLWSDPDDRCGWGISPRGAGYTFGQDIAQQFNHTNGLSLISRAHQLVMEGFNWCQDKNVVTVFSAPNYCYRCGNMAAILEIGENMDQNFLQFDPAPRQIEPDMTRKTPDYFL

SEQ ID NO: 7758 - DNA, 1760 bp, Zea mays subsp. mays
  misc_feature (1)..(1760): Ceres Seq. ID no. 12423851
  misc_feature: MA Experiment ID: 108527 Result: Up-regulated in Transcription
  misc_feature: MA Experiment 108527 PARAMETER Experiment Name: Zm_5mM_NO_P Parameter: Age (day) Value: 8
  misc_feature: MA Experiment 108527 PARAMETER Experiment Name: Zm_5mM_NO_P Parameter: Organism Value: Zea mays
  misc_feature: MA Experiment 108527 PARAMETER Experiment Name: Zm_5mM_NO_P Parameter: Plant Line Value: 35A19
  misc_feature: MA Experiment 108527 PARAMETER Experiment Name: Zm_5mM_NO_P Parameter: Timepoint (hr) Value: 6
  misc_feature: MA Experiment 108527 PARAMETER Experiment Name: Zm_5mM_NO_P Parameter: Tissue Value: Aerial
  misc_feature: MA Experiment 108527 PARAMETER Experiment Name: Zm_5mM_NO_P Parameter: Treatment Value: 5mM NO vs. No Treatment
  misc_feature: MA Experiment ID: 108556 Result: Up-regulated in Transcription
  misc_feature: MA Experiment 108556 PARAMETER Experiment Name: Zm_Drought_P Parameter: Age (day) Value: 9
  misc_feature: MA Experiment 108556 PARAMETER Experiment Name: Zm_Drought_P Parameter: Organism Value: Zea mays
  misc_feature: MA Experiment 108556 PARAMETER Experiment Name: Zm_Drought_P Parameter: Plant Line Value: 35A19
  misc_feature: MA Experiment 108556 PARAMETER Experiment Name: Zm_Drought_P Parameter: Timepoint (hr) Value: 24
  misc_feature: MA Experiment 108556 PARAMETER Experiment Name: Zm_Drought_P Parameter: Tissue Value: Aerial
  misc_feature: MA Experiment 108556 PARAMETER Experiment Name: Zm_Drought_P Parameter: Treatment Value: Drought vs. No Drought
  misc_feature: MA Experiment ID: 108559 Result: Up-regulated in Transcription
  misc_feature: MA Experiment 108559 PARAMETER Experiment Name: Zm_5mM_NO_P Parameter: Age (day) Value: 8
  misc_feature: MA Experiment 108559 PARAMETER Experiment Name: Zm_5mM_NO_P Parameter: Organism Value: Zea mays
  misc_feature: MA Experiment 108559 PARAMETER Experiment Name: Zm_5mM_NO_P Parameter: Plant Line Value: 35A19
  misc_feature: MA Experiment 108559 PARAMETER Experiment Name: Zm_5mM_NO_P Parameter: Timepoint (hr) Value: 12
  misc_feature: MA Experiment 108559 PARAMETER Experiment Name: Zm_5mM_NO_P Parameter: Tissue Value: Aerial
  misc_feature: MA Experiment 108559 PARAMETER Experiment Name: Zm_5mM_NO_P Parameter: Treatment Value: 5mM NO vs. No Treatment
  misc_feature: MA Experiment ID: 20000479 Result: Up-regulated in Transcription
  misc_feature: MA Experiment 20000479 PARAMETER Experiment Name: Zm_Drought_P Parameter: Age (day) Value: 10
  misc_feature: MA Experiment 20000479 PARAMETER Experiment Name: Zm_Drought_P Parameter: Organism Value: Zea mays
  misc_feature: MA Experiment 20000479 PARAMETER Experiment Name: Zm_Drought_P Parameter: Plant Line Value: 35A19
  misc_feature: MA Experiment 20000479 PARAMETER Experiment Name: Zm_Drought_P Parameter: Timepoint (hr) Value: 48
  misc_feature: MA Experiment 20000479 PARAMETER Experiment Name: Zm_Drought_P Parameter: Tissue Value: Aerial
  misc_feature: MA Experiment 20000479 PARAMETER Experiment Name: Zm_Drought_P Parameter: Treatment Value: Drought vs. No Drought
  misc_feature: MA Experiment ID: 20000480 Result: Up-regulated in Transcription
  misc_feature: MA Experiment 20000480 PARAMETER Experiment Name: Zm_Drought_P Parameter: Age (day) Value: 11
  misc_feature: MA Experiment 20000480 PARAMETER Experiment Name: Zm_Drought_P Parameter: Organism Value: Zea mays
  misc_feature: MA Experiment 20000480 PARAMETER Experiment Name: Zm_Drought_P Parameter: Plant Line Value: 35A19
  misc_feature: MA Experiment 20000480 PARAMETER Experiment Name: Zm_Drought_P Parameter: Timepoint (hr) Value: 72
  misc_feature: MA Experiment 20000480 PARAMETER Experiment Name: Zm_Drought_P Parameter: Tissue Value: Aerial
  misc_feature: MA Experiment 20000480 PARAMETER Experiment Name: Zm_Drought_P Parameter: Treatment Value: Drought vs. No Drought
  misc_feature: MA Experiment ID: 20000630 Result: Up-regulated in Transcription
  misc_feature: MA Experiment 20000630 PARAMETER Experiment Name: Zm_Herbicide-Treatments_P Parameter: Timepoint (hr) Value: 4
  misc_feature: MA Experiment 20000630 PARAMETER Experiment Name: Zm_Herbicide-Treatments_P Parameter: Tissue Value: Aerial
  misc_feature: MA Experiment 20000630 PARAMETER Experiment Name: Zm_Herbicide-Treatments_P Parameter: Treatment Value: Roundup vs. No Treatment
aaaaccgaccggcctcgctttcgccggttacccggtcaaacgcatcaaccgccggcacgtctccgatcggatcacgatggctgccccgtgcccccgccggtcaggccaggtcgcgtggtcacgtgcgacgcgcatgccgtcctcggccggcgccccagccccctcgccgtgtccttttattctcccccgcctcaccgcccgcatccccaattcacgcccccaccacgacttccgtgctcgccgccttctcggactaggggggttcggctcgagatctgatttcgggcgccggaggactacatggaggttagggagatggcgatggccgcggcggctgcggctgcggcgtccggcgggggaggcgtcaagctgccgccgcccaatcccaacctgccctacagggaggactgctggagcgacggcgagacggcagctctcgtctccgcctggggcagccgctacgtcgagctcaaccgcggtaacctgcgccagaagcagtggcaggaggtggcggacgccgtcaactcgcgccggggagcctccgcgcggcgccgcccgccgcgcaccgacatccagtgcaagaaccgcgtcgataccctcaagaagaagtacaaggccgagctcgcccgcaacgcgccgtccgcctggtcctacttccccgagctcgaccgcctcgtcggcccaaccctcagcgcctccgcctccaagagacccttggcgtctctgcctcctcaattcgctttgcccatgcatccaccagccgtgcggaggcccccgtcgccttcgccgtcatcgtcctccccgccgcagccgcctatggctttgcctctacccaattaccgccgtgggtccccgctccctgctgctgccctcatccagaaggaagccgcggctgctgcggctgctgcgtctgattcagaggactccgatgatgcggctggcggcaataatcacaaattgccccggtcgccttcgcgctcggtgtcgtcactctctgccagtaacaagaagcgctgcagagatgaggctggcagcagtgctgacaaaggtttcagagagttagcaagggcgatcgaagcttttgcggagatgtatgagcgtgtggagagtgctaagcaaaagcatgtggtggagatggagcgccagcgaattgaattcctgaagcaactggaggtgaaacgcatggagaatttcgttgatgcccatgtgaagctggctagagcaaagcgcacgaagaagactacagggggtgctgccgacggtgctggtggtatggagttggttgccaccgttgctgcgctgcctttcgtctccacctccaccttcctctgatattgaggaagagtttagagaaagagggagcaaaaaatggtggtccaaggaagcaagctaatccgaaagatagcaagtgaagcgtttggccgggcgtttgggtggtgcgaatttctgggtgatcaaaactggaatgtggattctgcagttggagatagcctttcttttagttgatgacttgaatctgtgccttttgttttcgcctgtctgtcgtgatctggttgtaaataagaaagtcttatgccgctagtcgcaggtcgaactttatcttctatcctaggccctctacttatctaggttgatagtgtaaggtgtctagatagagatctgacctaattgctattctgtcggatcgtttgatcgcgatggatgtcgttgttctgaaactttcctatttcctaatgaaatagggggcttcgccccttcgt

SEQ ID NO: 7759 - protein, 353 aa, Zea mays subsp. mays
  peptide (1)..(353): Ceres Seq. ID no. 12423852
  misc_feature (173)..(238): Homolog of NCBI NO: 6523547 NR Description: hydroxyproline-rich glycoprotein DZ-HRGP [Volvox
  misc_feature (118)..(231): Homolog of NCBI NO: 13592175 NR Description: ppg3 [Leishmania major]
  misc_feature (118)..(231): Homolog of NCBI NO: 13592175 NR Description: ppg3 [Leishmania major]
  misc_feature (117)..(233): Homolog of NCBI NO: 13592175 NR Description: ppg3 [Leishmania major]
  misc_feature (147)..(238): Homolog of NCBI NO: 81286 NR Description: extensin - Volvox carteri (fragment)
  misc_feature (118)..(233): Homolog of NCBI NO: 13592175 NR Description: ppg3 [Leishmania major]
  misc_feature (180)..(238): Homolog of NCBI NO: 6523547 NR Description: hydroxyproline-rich glycoprotein DZ-HRGP [Volvox
  misc_feature (147)..(238): Homolog of NCBI NO: 20138131 NR Description: Vegetative cell wall protein gp1 precursor rich glycoprotein 1) >gi|12018147|gb|AAG45420.1|AF309494_1
  misc_feature (117)..(233): Homolog of NCBI NO: 5420387 NR Description: proteophosphoglycan [Leishmania major]
  misc_feature (117)..(231): Homolog of NCBI NO: 13592175 NR Description: ppg3 [Leishmania major]
KPTGLAFAGYPVKRINRRHVSDRITMAAPCPRRSGQVAWSRATRMPSSAGAPAPSPCPFILPRLTARIPNSRPHHDFRARRLLGLGGFGSRSDFGRRRTTWRLGRWRWPRRLRLRRPAGEASSCRRPIPTCPTGRTAGATARRQLSSPPGAAATSSSTAVTCARSSGRRWRTPSTRAGEPPRGAARRAPTSSARTASIPSRRSTRPSSPATRRPPGPTSPSSTASSAQPSAPPPPRDPWRLCLLNSLCPCIHQPCGGPRRLRRHRPPRRSRLWLCLYPITAVGPRSLLLPSSRRKPRLLRLLRLIQRTPMMRLAAIITNCPGRLRARCRHSLPVTRSAAEMRLAAVLTKVSES

SEQ ID NO: 7760 - protein, 343 aa, Zea mays subsp. mays
  peptide (1)..(343): Ceres Seq. ID no. 12423853
  misc_feature (23)..(343): Homolog of NCBI NO: 34911060 NR Description: putative 6b-interacting protein 1 [Oryza sativa
  misc_feature (27)..(324): Homolog of NCBI NO: 11357442 NR Description: hypothetical protein F14P22.220 - Arabidopsis >gi|6735380|emb|CAB68201.1| putative protein [Arabidopsis
  misc_feature (27)..(326): Homolog of NCBI NO: 30694843 NR Description: expressed protein [Arabidopsis thaliana] unknown protein [Arabidopsis thaliana]
  misc_feature (34)..(134): Homolog of NCBI NO: 10178132 NR Description: gb|AAF01512.1~gene_id:MOP10.9~similar to unknown
  misc_feature (34)..(134): Homolog of NCBI NO: 18414919 NR Description: putative protein; protein id: At5g05550.1, by cDNA: gi_15010667, supported by cDNA: gi_16974318 [Arabidopsis >gi|15010668|gb|AAK73993.1| AT5g05550/MOP10_9 [Arabidopsis
  misc_feature (34)..(134): Homolog of NCBI NO: 30680994 NR Description: expressed protein [Arabidopsis thaliana]
  misc_feature (241)..(315): Homolog of NCBI NO: 10178132 NR Description: gb|AAF01512.1~gene_id:MOP10.9~similar to unknown
  misc_feature (241)..(315): Homolog of NCBI NO: 18414919 NR Description: putative protein; protein id: At5g05550.1, by cDNA: gi_15010667, supported by cDNA: gi_16974318 [Arabidopsis >gi|15010668|gb|AAK73993.1| AT5g05550/MOP10_9 [Arabidopsis
  misc_feature (241)..(315): Homolog of NCBI NO: 30680994 NR Description: expressed protein [Arabidopsis thaliana]
  misc_feature (110)..(310): Homolog of NCBI NO: 15231799 NR Description: hypothetical protein; protein id: At3g14180.1, by cDNA: gi_18176239, supported by cDNA: gi_21281262 [Arabidopsis
MEVREMAMAAAAAAAASGGGGVKLPPPNPNLPYREDCWSDGETAALVSAWGSRYVELNRGNLRQKQWQEVADAVNSRRGASARRRPPRTDIQCKNRVDTLKKKYKAELARNAPSAWSYFPELDRLVGPTLSASASKRPLASLPPQFALPMHPPAVRRPPSPSPSSSSPPQPPMALPLPNYRRGSPLPAAALIQKEAAAAAAAASDSEDSDDAAGGNNHKLPRSPSRSVSSLSASNKKRCRDEAGSSADKGFRELARAIEAFAEMYERVESAKQKHVVEMERQRIEFLKQLEVKRMENFVDAHVKLARAKRTKKTTGGAADGAGGMELVATVAALPFVSTSTFL

SEQ ID NO: 7761 - protein, 338 aa, Zea mays subsp. mays
  peptide (1)..(338): Ceres Seq. ID no. 12423854
  misc_feature (18)..(338): Homolog of NCBI NO: 34911060 NR Description: putative 6b-interacting protein 1 [Oryza sativa
  misc_feature (22)..(319): Homolog of NCBI NO: 11357442 NR Description: hypothetical protein F14P22.220 - Arabidopsis >gi|6735380|emb|CAB68201.1| putative protein [Arabidopsis
  misc_feature (22)..(321): Homolog of NCBI NO: 30694843 NR Description: expressed protein [Arabidopsis thaliana] unknown protein [Arabidopsis thaliana]
  misc_feature (29)..(129): Homolog of NCBI NO: 10178132 NR Description: gb|AAF01512.1~gene_id:MOP10.9~similar to unknown
  misc_feature (29)..(129): Homolog of NCBI NO: 30680994 NR Description: expressed protein [Arabidopsis thaliana]
  misc_feature (29)..(129): Homolog of NCBI NO: 18414919 NR Description: putative protein; protein id: At5g05550.1, by cDNA: gi_15010667, supported by cDNA: gi_16974318 [Arabidopsis >gi|15010668|gb|AAK73993.1| AT5g05550/MOP10_9 [Arabidopsis
  misc_feature (236)..(310): Homolog of NCBI NO: 10178132 NR Description: gb|AAF01512.1~gene_id:MOP10.9~similar to unknown
  misc_feature (236)..(310): Homolog of NCBI NO: 30680994 NR Description: expressed protein [Arabidopsis thaliana]
  misc_feature (236)..(310): Homolog of NCBI NO: 18414919 NR Description: putative protein; protein id: At5g05550.1, by cDNA: gi_15010667, supported by cDNA: gi_16974318 [Arabidopsis >gi|15010668|gb|AAK73993.1| AT5g05550/MOP10_9 [Arabidopsis
  misc_feature (105)..(305): Homolog of NCBI NO: 15231799 NR Description: hypothetical protein; protein id: At3g14180.1, by cDNA: gi_18176239, supported by cDNA: gi_21281262 [Arabidopsis
MAMAAAAAAAASGGGGVKLPPPNPNLPYREDCWSDGETAALVSAWGSRYVELNRGNLRQKQWQEVADAVNSRRGASARRRPPRTDIQCKNRVDTLKKKYKAELARNAPSAWSYFPELDRLVGPTLSASASKRPLASLPPQFALPMHPPAVRRPPSPSPSSSSPPQPPMALPLPNYRRGSPLPAAALIQKEAAAAAAAASDSEDSDDAAGGNNHKLPRSPSRSVSSLSASNKKRCRDEAGSSADKGFRELARAIEAFAEMYERVESAKQKHVVEMERQRIEFLKQLEVKRMENFVDAHVKLARAKRTKKTTGGAADGAGGMELVATVAALPFVSTSTFL

SEQ ID NO: 7762 - DNA, 997 bp, Zea mays subsp. mays
  misc_feature (1)..(997): Ceres Seq. ID no. 12352560
  misc_feature: MA Experiment ID: 108522 Result: Down-regulated in Transcription
  misc_feature: MA Experiment 108522 PARAMETER Experiment Name: Zm_42deg_Heat_P Parameter: Age (day) Value: 8
  misc_feature: MA Experiment 108522 PARAMETER Experiment Name: Zm_42deg_Heat_P Parameter: Organism Value: Zea mays
  misc_feature: MA Experiment 108522 PARAMETER Experiment Name: Zm_42deg_Heat_P Parameter: Plant Line Value: 35A19
  misc_feature: MA Experiment 108522 PARAMETER Experiment Name: Zm_42deg_Heat_P Parameter: Temperature (deg C) Value: 42 vs. 22
  misc_feature: MA Experiment 108522 PARAMETER Experiment Name: Zm_42deg_Heat_P Parameter: Timepoint (hr) Value: 1
  misc_feature: MA Experiment 108522 PARAMETER Experiment Name: Zm_42deg_Heat_P Parameter: Tissue Value: Aerial
  misc_feature: MA Experiment ID: 108523 Result: Down-regulated in Transcription
  misc_feature: MA Experiment 108523 PARAMETER Experiment Name: Zm_42deg_Heat_P Parameter: Age (day) Value: 8
  misc_feature: MA Experiment 108523 PARAMETER Experiment Name: Zm_42deg_Heat_P Parameter: Organism Value: Zea mays
  misc_feature: MA Experiment 108523 PARAMETER Experiment Name: Zm_42deg_Heat_P Parameter: Plant Line Value: 35A19
  misc_feature: MA Experiment 108523 PARAMETER Experiment Name: Zm_42deg_Heat_P Parameter: Temperature (deg C) Value: 42 vs. 22
  misc_feature: MA Experiment 108523 PARAMETER Experiment Name: Zm_42deg_Heat_P Parameter: Timepoint (hr) Value: 6
  misc_feature: MA Experiment 108523 PARAMETER Experiment Name: Zm_42deg_Heat_P Parameter: Tissue Value: Aerial
  misc_feature: MA Experiment ID: 108528 Result: Up-regulated in Transcription
  misc_feature: MA Experiment 108528 PARAMETER Experiment Name: Zm_Imbibed_Seeds_P Parameter: Age (day) Value: 5 vs. 2
  misc_feature: MA Experiment 108528 PARAMETER Experiment Name: Zm_Imbibed_Seeds_P Parameter: Organism Value: Zea mays
  misc_feature: MA Experiment 108528 PARAMETER Experiment Name: Zm_Imbibed_Seeds_P Parameter: Plant Line Value: 35A19
  misc_feature: MA Experiment 108528 PARAMETER Experiment Name: Zm_Imbibed_Seeds_P Parameter: Tissue Value: Aerial vs. Embryo
  misc_feature: MA Experiment ID: 108530 Result: Up-regulated in Transcription
  misc_feature: MA Experiment 108530 PARAMETER Experiment Name: Zm_Imbibed_Seeds_P Parameter: Age (day) Value: 6 vs. 2
  misc_feature: MA Experiment 108530 PARAMETER Experiment Name: Zm_Imbibed_Seeds_P Parameter: Organism Value: Zea mays
  misc_feature: MA Experiment 108530 PARAMETER Experiment Name: Zm_Imbibed_Seeds_P Parameter: Plant Line Value: 35A19
  misc_feature: MA Experiment 108530 PARAMETER Experiment Name: Zm_Imbibed_Seeds_P Parameter: Tissue Value: Aerial vs. Embryo
  misc_feature: MA Experiment ID: 108687 Result: Down-regulated in Transcription
  misc_feature: MA Experiment 108687 PARAMETER Experiment Name: Zm_Embryos-Flowers__P Parameter: Tissue Value: Embryo vs. Aerial+
  misc_feature: MA Experiment ID: 20000477 Result: Down-regulated in Transcription
  misc_feature: MA Experiment 20000477 PARAMETER Experiment Name: Zm_5mM_SA_P Parameter: Age (day) Value: 10
  misc_feature: MA Experiment 20000477 PARAMETER Experiment Name: Zm_5mM_SA_P Parameter: Organism Value: Zea mays
  misc_feature: MA Experiment 20000477 PARAMETER Experiment Name: Zm_5mM_SA_P Parameter: Plant Line Value: 35A19
  misc_feature: MA Experiment 20000477 PARAMETER Experiment Name: Zm_5mM_SA_P Parameter: Timepoint (hr) Value: 48
  misc_feature: MA Experiment 20000477 PARAMETER Experiment Name: Zm_5mM_SA_P Parameter: Tissue Value: Aerial
  misc_feature: MA Experiment 20000477 PARAMETER Experiment Name: Zm_5mM_SA_P Parameter: Treatment Value: 5mM SA vs. No Treatment
gattcactcacgaattccccattcccttccctatcgcatcgcatcgagagccaggccagccagccacctctgcttggtctccatggccgccgcgctcaggtccccggcctcggccaaggtctcgagccccgccgccgcctccaaggtgcgccaggcgtccagagtcgcggtgggcgggttccggcagcatccccggagccgtggcggccccgtggccgtgcgggcgtcgctgttctcgcccaagcccgcggcggccaaggacgcgcggccgaccaaggtgcaggagctgtacgtgtacgagatgaacgagcgggaccgcgagagcccggcgtacctgcgcctcagcgccaagcagacggagaacgcgctgggcgacctggtccccttcacaaacaaggtttacaacggcagcctggacaagcggctgggcatcaccgccggcatctgcgtgctcatccagcacgtccccgaccgcaacggcgaccggtacgaggccatctacagcttctacttcggcgactacggccacatctcggtgcagggcgcgtacctgacctacgaggagtcgtacctggccgtcacgggcggctccggcgtcttcgagggcgcctacggccaggtcaagctccaccagatcgtcttccccttcaagatcttctacaccttctacctccggggcatcccggacctgcccagggacctgctctgcacgcccgtcccgccctcccccaccgtcgagcccacgcccgccgccagggccgccgagccgcacgcctgcgtcaacaactacaccaactgactcatcaattccagcccaggaaccatctctgcctgccgtgcctgtccccccctgctcctcactcgatttgtatgtttgtatggcttagggttcttcgattcgtacgcgcgtgcgtggtagcaccaataaagacgcgatcgatcgagttgtgtacttgtgtcacccttgaacaaacaatgagatatttgtttgtcgtcg

SEQ ID NO: 7763 - protein, 332 aa, Zea mays subsp. mays
  peptide (1)..(332): Ceres Seq. ID no. 12352561
DSLTNSPFPSLSHRIESQASQPPLLGLHGRRAQVPGLGQGLEPRRRLQGAPGVQSRGGRVPAASPEPWRPRGRAGVAVLAQARGGQGRAADQGAGAVRVRDERAGPREPGVPAPQRQADGERAGRPGPLHKQGLQRQPGQAAGHHRRHLRAHPARPRPQRRPVRGHLQLLLRRLRPHLGAGRVPDLRGVVPGRHGRLRRLRGRLRPGQAPPDRLPLQDLLHLLPPGHPGPAQGPALHARPALPHRRAHARRQGRRAARLRQQLHQLTHQFQPRNHLCLPCLSPPAPHSICMFVWLRVLRFVRACVVAPIKTRSIELCTCVTLEQTMRYLFVV

SEQ ID NO: 7764 - protein, 265 aa, Zea mays subsp. mays
  peptide (1)..(265): Ceres Seq. ID no. 12352562
  misc_feature (86)..(265): Pfam Name: Allene oxide cyclase Pfam Description: Allene oxide cyclase
  misc_feature (28)..(265): Homolog of NCBI NO: 39980760 NR Description: allene oxide cyclase [Zea mays]
  misc_feature (28)..(265): Homolog of NCBI NO: 21727906 NR Description: allene oxide cyclase [Oryza sativa (japonica
  misc_feature (31)..(265): Homolog of NCBI NO: 40643247 NR Description: allene oxide cyclase [Hordeum vulgare]
  misc_feature (27)..(265): Homolog of NCBI NO: 8977961 NR Description: allene oxide cyclase [Lycopersicon esculentum]
  misc_feature (75)..(265): Homolog of NCBI NO: 40644132 NR Description: allene oxide cyclase [Medicago truncatula]
  misc_feature (27)..(265): Homolog of NCBI NO: 40644130 NR Description: allene oxide cyclase [Nicotiana tabacum]
  misc_feature (78)..(265): Homolog of NCBI NO: 1362093 NR Description: hypothetical protein (clone TPP15) - tomato
  misc_feature (27)..(263): Homolog of NCBI NO: 23956574 NR Description: allene oxide cyclase [Solanum tuberosum]
  misc_feature (88)..(265): Homolog of NCBI NO: 16416376 NR Description: mangrin [Bruguiera sexangula]
  misc_feature (86)..(265): Homolog of NCBI NO: 18404658 NR Description: expressed protein; protein id: At3g25780.1, by cDNA: 3457. [Arabidopsis thaliana] >gi|7939564|dbj|BAA95765.1| to unknown protein [Arabidopsis thaliana]
IHSRIPHSLPYRIASRARPASHLCLVSMAAALRSPASAKVSSPAAASKVRQASRVAVGGFRQHPRSRGGPVAVRASLFSPKPAAAKDARPTKVQELYVYEMNERDRESPAYLRLSAKQTENALGDLVPFTNKVYNGSLDKRLGITAGICVLIQHVPDRNGDRYEAIYSFYFGDYGHISVQGAYLTYEESYLAVTGGSGVFEGAYGQVKLHQIVFPFKIFYTFYLRGIPDLPRDLLCTPVPPSPTVEPTPAARAAEPHACVNNYTN

SEQ ID NO: 7765 - protein, 238 aa, Zea mays subsp. mays
  peptide (1)..(238): Ceres Seq. ID no. 12352563
  misc_feature (59)..(238): Pfam Name: Allene oxide cyclase Pfam Description: Allene oxide cyclase
  misc_feature (1)..(238): Homolog of NCBI NO: 39980760 NR Description: allene oxide cyclase [Zea mays]
  misc_feature (1)..(238): Homolog of NCBI NO: 21727906 NR Description: allene oxide cyclase [Oryza sativa (japonica
  misc_feature (4)..(238): Homolog of NCBI NO: 40643247 NR Description: allene oxide cyclase [Hordeum vulgare]
  misc_feature (1)..(238): Homolog of NCBI NO: 8977961 NR Description: allene oxide cyclase [Lycopersicon esculentum]
  misc_feature (48)..(238): Homolog of NCBI NO: 40644132 NR Description: allene oxide cyclase [Medicago truncatula]
  misc_feature (1)..(238): Homolog of NCBI NO: 40644130 NR Description: allene oxide cyclase [Nicotiana tabacum]
  misc_feature (51)..(238): Homolog of NCBI NO: 1362093 NR Description: hypothetical protein (clone TPP15) - tomato
  misc_feature (1)..(236): Homolog of NCBI NO: 23956574 NR Description: allene oxide cyclase [Solanum tuberosum]
  misc_feature (61)..(238): Homolog of NCBI NO: 16416376 NR Description: mangrin [Bruguiera sexangula]
  misc_feature (59)..(238): Homolog of NCBI NO: 18404658 NR Description: expressed protein; protein id: At3g25780.1, by cDNA: 3457. [Arabidopsis thaliana] >gi|7939564|dbj|BAA95765.1| to unknown protein [Arabidopsis thaliana]
MAAALRSPASAKVSSPAAASKVRQASRVAVGGFRQHPRSRGGPVAVRASLFSPKPAAAKDARPTKVQELYVYEMNERDRESPAYLRLSAKQTENALGDLVPFTNKVYNGSLDKRLGITAGICVLIQHVPDRNGDRYEAIYSFYFGDYGHISVQGAYLTYEESYLAVTGGSGVFEGAYGQVKLHQIVFPFKIFYTFYLRGIPDLPRDLLCTPVPPSPTVEPTPAARAAEPHACVNNYTN

SEQ ID NO: 7766 - DNA, 1192 bp, Zea mays subsp. mays
  misc_feature (1)..(1192): Ceres Seq. ID no. 12346157
  misc_feature: MA Experiment ID: 20000633 Result: Down-regulated in Transcription
  misc_feature: MA Experiment 20000633 PARAMETER Experiment Name: Zm_Herbicide-Treatments_P Parameter: Timepoint (hr) Value: 4
  misc_feature: MA Experiment 20000633 PARAMETER Experiment Name: Zm_Herbicide-Treatments_P Parameter: Tissue Value: Aerial
  misc_feature: MA Experiment 20000633 PARAMETER Experiment Name: Zm_Herbicide-Treatments_P Parameter: Treatment Value: Trimec vs. No Treatment
gtatctcctctctggacgaacagatcctctctggacgaacagaaaggttaccagcagcaccacggcgagatctccccttggcgggccaaaaccgacggcgagcttcaccggcgttggtcggctccaatctcttcgccgttttattttcctcccaggttaaggttgcaggcttttagcttgggattctgaaagatggggacctcttctggcgcgaatttccatcagcaacctcctccgacccaggggatgttgcctccaaggcatggtccacgcccctcagggttgcagacctcgctctcgctggcctcttcggagcaggttggctcgcctgacatgcaggagcctggttcaaactcggagccagggcatgattccgccactgagagcgccagttccaaagacacatggccagctgagccgaaccagagcaatggtggggtggctgccagtgatgttgtgagtaaggcggcggagaaggaggtggcaaatggtgtatccaagccgcaggttatccatggaccctcctcccgtgtgagtgggatgcttctgcgggaggttgcacgggagagggttgatctggtcgctgagaagatgaagatgatgtcggatgagcacctagaggaggtcaagaatgagctcaggtcgattctggagggcactggaggttctcaccacatcgaggagttcttgtacttgcagaagcttgtccaggacaggcatgatttgacaccatccatgctttcagtggcacaccatgtgcagcttgagatccttgttgcaatcaagactggaatacaggcctttctgcaccccagtgttaccattccacacaatcgcttggtggaggtcttcttgtacaagaggtgccggaacattgcttgccagagtgctctccctgctgaggagtgcagatgcaacgtgtgcgctagcaggaatggtttttgcaacctgtgcatgtgtgtcatctgcaacaagtttgattttgaggtcaatacatgccgtttgattggctgtgatttttgctctcactggacacatacagattgtgcaattcacaatggccagatcggaatgggacaatcagtgaaaagcagcattggtcatgctgaaatgctttttaggtgccgagcttgccagaggacctcagagctgctgggttgggttaaggatgtcttccaacaatgcgctcctg

SEQ ID NO: 7767 - protein, 333 aa, Zea mays subsp. mays
  peptide (1)..(333): Ceres Seq. ID no. 12346158
  misc_feature (93)..(332): Homolog of NCBI NO: 30385713 NR Description: Potyvirus VPg interacting protein [Pisum sativum]
  misc_feature (86)..(332): Homolog of NCBI NO: 18394157 NR Description: expressed protein; protein id: At1g14740.1, by cDNA: gi_14596044, supported by cDNA: gi_20148718 [Arabidopsis >gi|14596045|gb|AAK68750.1| Unknown protein [Arabidopsis
  misc_feature (86)..(332): Homolog of NCBI NO: 25402780 NR Description: protein F10B6.14 [imported] - Arabidopsis >gi|8778236|gb|AAF79245.1|AC006917_30 F10B6.14 [Arabidopsis
  misc_feature (38)..(328): Homolog of NCBI NO: 30695820 NR Description: expressed protein [Arabidopsis thaliana]
  misc_feature (38)..(328): Homolog of NCBI NO: 28973711 NR Description: unknown protein [Arabidopsis thaliana]
  misc_feature (38)..(328): Homolog of NCBI NO: 15229445 NR Description: putative protein; protein id: At3g63500.1
  misc_feature (19)..(332): Homolog of NCBI NO: 30385711 NR Description: Potyvirus VPg interacting protein [Nicotiana
  misc_feature (37)..(332): Homolog of NCBI NO: 18398053 NR Description: expressed protein; protein id: At3g07780.1, by cDNA: gi_15028084, supported by cDNA: gi_21280842 [Arabidopsis >gi|6466960|gb|AAF13095.1|AC009176_22 unknown protein
  misc_feature (53)..(332): Homolog of NCBI NO: 15238905 NR Description: putative protein; protein id: At5g48160.1 thaliana] >gi|8777406|dbj|BAA96996.1|
MGTSSGANFHQQPPPTQGMLPPRHGPRPSGLQTSLSLASSEQVGSPDMQEPGSNSEPGHDSATESASSKDTWPAEPNQSNGGVAASDVVSKAAEKEVANGVSKPQVIHGPSSRVSGMLLREVARERVDLVAEKMKMMSDEHLEEVKNELRSILEGTGGSHHIEEFLYLQKLVQDRHDLTPSMLSVAHHVQLEILVAIKTGIQAFLHPSVTIPHNRLVEVFLYKRCRNIACQSALPAEECRCNVCASRNGFCNLCMCVICNKFDFEVNTCRLIGCDFCSHWTHTDCAIHNGQIGMGQSVKSSIGHAEMLFRCRACQRTSELLGWVKDVFQQCAP

SEQ ID NO: 7768 - protein, 315 aa, Zea mays subsp. mays
  peptide (1)..(315): Ceres Seq. ID no. 12346159
  misc_feature (1)..(314): Homolog of NCBI NO: 30385711 NR Description: Potyvirus VPg interacting protein [Nicotiana
  misc_feature (19)..(314): Homolog of NCBI NO: 18398053 NR Description: expressed protein; protein id: At3g07780.1, by cDNA: gi_15028084, supported by cDNA: gi_21280842 [Arabidopsis >gi|6466960|gb|AAF13095.1|AC009176_22 unknown protein
  misc_feature (35)..(314): Homolog of NCBI NO: 15238905 NR Description: putative protein; protein id: At5g48160.1 thaliana] >gi|8777406|dbj|BAA96996.1|
  misc_feature (75)..(314): Homolog of NCBI NO: 30385713 NR Description: Potyvirus VPg interacting protein [Pisum sativum]
  misc_feature (68)..(314): Homolog of NCBI NO: 18394157 NR Description: expressed protein; protein id: At1g14740.1, by cDNA: gi_14596044, supported by cDNA: gi_20148718 [Arabidopsis >gi|14596045|gb|AAK68750.1| Unknown protein [Arabidopsis
  misc_feature (68)..(314): Homolog of NCBI NO: 25402780 NR Description: protein F10B6.14 [imported] - Arabidopsis >gi|8778236|gb|AAF79245.1|AC006917_30 F10B6.14 [Arabidopsis
  misc_feature (20)..(310): Homolog of NCBI NO: 30695820 NR Description: expressed protein [Arabidopsis thaliana]
  misc_feature (20)..(310): Homolog of NCBI NO: 28973711 NR Description: unknown protein [Arabidopsis thaliana]
  misc_feature (20)..(310): Homolog of NCBI NO: 15229445 NR Description: putative protein; protein id: At3g63500.1
MLPPRHGPRPSGLQTSLSLASSEQVGSPDMQEPGSNSEPGHDSATESASSKDTWPAEPNQSNGGVAASDVVSKAAEKEVANGVSKPQVIHGPSSRVSGMLLREVARERVDLVAEKMKMMSDEHLEEVKNELRSILEGTGGSHHIEEFLYLQKLVQDRHDLTPSMLSVAHHVQLEILVAIKTGIQAFLHPSVTIPHNRLVEVFLYKRCRNIACQSALPAEECRCNVCASRNGFCNLCMCVICNKFDFEVNTCRLIGCDFCSHWTHTDCAIHNGQIGMGQSVKSSIGHAEMLFRCRACQRTSELLGWVKDVFQQCAP

SEQ ID NO: 7769 - protein, 286 aa, Zea mays subsp. mays
  peptide (1)..(286): Ceres Seq. ID no. 12346160
  misc_feature (1)..(285): Homolog of NCBI NO: 30385711 NR Description: Potyvirus VPg interacting protein [Nicotiana
  misc_feature (1)..(285): Homolog of NCBI NO: 18398053 NR Description: expressed protein; protein id: At3g07780.1, by cDNA: gi_15028084, supported by cDNA: gi_21280842 [Arabidopsis >gi|6466960|gb|AAF13095.1|AC009176_22 unknown protein
  misc_feature (6)..(285): Homolog of NCBI NO: 15238905 NR Description: putative protein; protein id: At5g48160.1 thaliana] >gi|8777406|dbj|BAA96996.1|
  misc_feature (46)..(285): Homolog of NCBI NO: 30385713 NR Description: Potyvirus VPg interacting protein [Pisum sativum]
  misc_feature (39)..(285): Homolog of NCBI NO: 18394157 NR Description: expressed protein; protein id: At1g14740.1, by cDNA: gi_14596044, supported by cDNA: gi_20148718 [Arabidopsis >gi|14596045|gb|AAK68750.1| Unknown protein [Arabidopsis
  misc_feature (39)..(285): Homolog of NCBI NO: 25402780 NR Description: protein F10B6.14 [imported] - Arabidopsis >gi|8778236|gb|AAF79245.1|AC006917_30 F10B6.14 [Arabidopsis
  misc_feature (1)..(281): Homolog of NCBI NO: 30695820 NR Description: expressed protein [Arabidopsis thaliana]
  misc_feature (1)..(281): Homolog of NCBI NO: 28973711 NR Description: unknown protein [Arabidopsis thaliana]
  misc_feature (1)..(281): Homolog of NCBI NO: 15229445 NR Description: putative protein; protein id: At3g63500.1
MQEPGSNSEPGHDSATESASSKDTWPAEPNQSNGGVAASDVVSKAAEKEVANGVSKPQVIHGPSSRVSGMLLREVARERVDLVAEKMKMMSDEHLEEVKNELRSILEGTGGSHHIEEFLYLQKLVQDRHDLTPSMLSVAHHVQLEILVAIKTGIQAFLHPSVTIPHNRLVEVFLYKRCRNIACQSALPAEECRCNVCASRNGFCNLCMCVICNKFDFEVNTCRLIGCDFCSHWTHTDCAIHNGQIGMGQSVKSSIGHAEMLFRCRACQRTSELLGWVKDVFQQCAP

SEQ ID NO: 7770 - DNA, 1422 bp, Zea mays subsp. mays
  misc_feature (1)..(1422): Ceres Seq. ID no. 12356590
  misc_feature: MA Experiment ID: 108522 Result: Up-regulated in Transcription
  misc_feature: MA Experiment 108522 PARAMETER Experiment Name: Zm_42deg_Heat_P Parameter: Age (day) Value: 8
  misc_feature: MA Experiment 108522 PARAMETER Experiment Name: Zm_42deg_Heat_P Parameter: Organism Value: Zea mays
  misc_feature: MA Experiment 108522 PARAMETER Experiment Name: Zm_42deg_Heat_P Parameter: Plant Line Value: 35A19
  misc_feature: MA Experiment 108522 PARAMETER Experiment Name: Zm_42deg_Heat_P Parameter: Temperature (deg C) Value: 42 vs. 22
  misc_feature: MA Experiment 108522 PARAMETER Experiment Name: Zm_42deg_Heat_P Parameter: Timepoint (hr) Value: 1
  misc_feature: MA Experiment 108522 PARAMETER Experiment Name: Zm_42deg_Heat_P Parameter: Tissue Value: Aerial
attctccaccttcttcaaaggttcaactcagagaggagagaactagagaaagatccccacccccaggcgacgcgaccggcgagccccgaaaccctaggtcgcgcgacccgggcagcgcgcttctgcgtgactgcgtgtctttcggggaggggacagcgttaggacgcgacgaggttagcgaggccgtctggccgactataagcggaagaatctcctccgaagccttcctagagctgtgaagagcgcgtggatctcctggatttgcagactcgaggggagctgagacaagacatgggttggggaatatccaggttgattggactgaaggctgctgccctgctttctgtagcatgttttttccaaggactaggagtgacccttatctcatttcctctcatatatgcatccataattgcaatactagtctcgatagcttcccgcccatctattgatcttcctttactccttggcaaggcatccgatggaagttttccattgtggtcatggatcatcttctcaccatttcttcttttcattcacctgttcgtgctgctacggagatttgtgaaaaacgagcccttatacactgaggttgcagatggtgtgtttgttggagggtggccttcttcagttgaacacctgccaccaggtgaccccgcgatcatagattgcacgtgcgagctgccaaaaagctcgactatctctaacaatgcatatttgtgcattgctacctgggacacgagggctcctcagccatcacagattgagtctgccgtgcaatgggctgtgagaaagcggtcacagaacaagcctgtctatgtccactgtgcctatggtcatggcagaagtgtctgtgtgatgtgtgcgcttcttgtcgcattagggttcgctgaagattggaaagctgctgcacaaatgatccgtgagaagcgaccttctattagcatgaatactcttcaccgcaaaagcttggaggaatggtcaaaacatttgctctcctctaaaagaagtggggaatcagatgtgagttctgttatacattcggattataaccggaaataaaattgaaccagcaagggacaggcgtgttcagttgctgtgacattgaagatgcattacattcggtagtattgtttgctgctgtcctagtgaatgcctatggttcattttaaattatccttttgtggcatttgtgttgtaaaaactatatgtatcaaattatattagtactgtaggtttacccggctagttcttcaaggaagatgtactgtccttgtctccttttttctgataccagtgcccttgcctctcatcgaatgcttgccagggaagtgctgttgccggaccctttggggcgagaaaaccctgcattcttgcattcctgctgggttctcatttatagctatatgtgatatgtttcgt

SEQ ID NO: 7771 - protein, 256 aa, Zea mays subsp. mays
  peptide (1)..(256): Ceres Seq. ID no. 12356591
  misc_feature (99)..(230): Pfam Name: Dual specificity phosphatase, catalytic domain Pfam Description: Dual specificity phosphatase, catalytic domain
  misc_feature (1)..(256): Homolog of NCBI NO: 34908470 NR Description: P0489B03.9 [Oryza sativa (japonica
  misc_feature (60)..(230): Homolog of NCBI NO: 3041758 NR Description: unnamed protein product [Escherichia coli]
  misc_feature (60)..(230): Homolog of NCBI NO: 16129372 NR Description: putative enzymes [Escherichia coli K12]
  misc_feature (11)..(232): Homolog of NCBI NO: 28896859 NR Description: hypothetical protein [Vibrio parahaemolyticus
  misc_feature (60)..(230): Homolog of NCBI NO: 15801736 NR Description: putative enzymes [Escherichia coli O157:H7 >gi|15831267|ref|NP_310040.1| putative enzymes [Escherichia coli
  misc_feature (60)..(230): Homolog of NCBI NO: 26247698 NR Description: Hypothetical protein ynbD [Escherichia coli >gi|26108100|gb|AAN80300.1|AE016760_159 Hypothetical protein ynbD
  misc_feature (28)..(237): Homolog of NCBI NO: 23030039 NR Description: hypothetical protein [Microbulbifer degradans
  misc_feature (13)..(227): Homolog of NCBI NO: 21241287 NR Description: conserved hypothetical protein [Xanthomonas pv. citri str. 306] >gi|21106606|gb|AAM35405.1| conserved
  misc_feature (72)..(227): Homolog of NCBI NO: 32037532 NR Description: hypothetical protein [Pseudomonas aeruginosa
MGWGISRLIGLKAAALLSVACFFQGLGVTLISFPLIYASIIAILVSIASRPSIDLPLLLGKASDGSFPLWSWIIFSPFLLFIHLFVLLRRFVKNEPLYTEVADGVFVGGWPSSVEHLPPGDPAIIDCTCELPKSSTISNNAYLCIATWDTRAPQPSQIESAVQWAVRKRSQNKPVYVHCAYGHGRSVCVMCALLVALGFAEDWKAAAQMIREKRPSISMNTLHRKSLEEWSKHLLSSKRSGESDVSSVIHSDYNRK

SEQ ID NO: 7772 - DNA, 1502 bp, Zea mays subsp. mays
  misc_feature (1)..(1502): Ceres Seq. ID no. 12381206
  misc_feature: MA Experiment ID: 108529 Result: Up-regulated in Transcription
  misc_feature: MA Experiment 108529 PARAMETER Experiment Name: Zm_Imbibed_Seeds_P Parameter: Age (day) Value: 5 vs. 2
  misc_feature: MA Experiment 108529 PARAMETER Experiment Name: Zm_Imbibed_Seeds_P Parameter: Organism Value: Zea mays
  misc_feature: MA Experiment 108529 PARAMETER Experiment Name: Zm_Imbibed_Seeds_P Parameter: Plant Line Value: 35A19
  misc_feature: MA Experiment 108529 PARAMETER Experiment Name: Zm_Imbibed_Seeds_P Parameter: Tissue Value: Roots vs. Embryo
  misc_feature: MA Experiment ID: 108530 Result: Up-regulated in Transcription
  misc_feature: MA Experiment 108530 PARAMETER Experiment Name: Zm_Imbibed_Seeds_P Parameter: Age (day) Value: 6 vs. 2
  misc_feature: MA Experiment 108530 PARAMETER Experiment Name: Zm_Imbibed_Seeds_P Parameter: Organism Value: Zea mays
  misc_feature: MA Experiment 108530 PARAMETER Experiment Name: Zm_Imbibed_Seeds_P Parameter: Plant Line Value: 35A19
  misc_feature: MA Experiment 108530 PARAMETER Experiment Name: Zm_Imbibed_Seeds_P Parameter: Tissue Value: Aerial vs. Embryo
  misc_feature: MA Experiment ID: 108535 Result: Down-regulated in Transcription
  misc_feature: MA Experiment 108535 PARAMETER Experiment Name: Zm_Meristem_P Parameter: Age (day) Value: 8
  misc_feature: MA Experiment 108535 PARAMETER Experiment Name: Zm_Meristem_P Parameter: Organism Value: Zea mays
  misc_feature: MA Experiment 108535 PARAMETER Experiment Name: Zm_Meristem_P Parameter: Plant Line Value: 35A19
  misc_feature: MA Experiment 108535 PARAMETER Experiment Name: Zm_Meristem_P Parameter: Tissue Value: Root Meristem vs. Above Root Meristem
ctcaatctcctctccttgtccactggcttgggcgtgcctttgcgtgcgacgggagctaggaatccacggcatcggaaaagtggccgcctgaagaaccgatttctccaagatttttttgtccatcctatcgcttgcaggatcggattcgccgtctctggccatggttctcgccggcctccgccggcacgtcggccagttcttgaccagcagtaatgagcttatggcggcgtcgctctcggccgtgagctgcgcggacgaggtgcagaaggcggagggggcggggtgccgtgacgacgccgcggcgctgcggctcaagaaggtggccatggcggcgatactggtggccggggtgctcggggtggtcctgccgctcgcagggcggaagcggcgcgcgctgcgcacggacagcgccgcgttcctggcggccaaggcgttcgccgccggggtcatcctggccacggggttcgtccacatgcttcacgacgccgagcacgcgctgtccagcccgtgcctccccgccgcgccgtggcgacggttcccagtccccgggttcgtcgccatggccgccgcgctagccacgctggtgctcgacttcctggccaccaggttttacgaggccaagcatcgcgacgaggccgcgcgcgtcaaggtggccgccgccgccgcactggttgcgacctcctctgggagcgacgaggacatcaccgtggtcaccgtcgacgaggacgagcgcaaggccccgctgttgcaaacgcactgccatggacacggtcacagccacagccacagccatgtgcatgagccggtgcaagtagagggtagcgagggggaggtgtcggcacatgtgcgctctattgtcgtgtcacagatactggagatggggattgtgtcacactctgtgatcatcggattgtcactgggagtgtcgcggagcccatgcacaatcaggccacttgtcgcagcacttgcattccaccagttcttcgaggggtttgcactaggtgggtgcattgctcaggcacaattcaagaacctttcagcagttctaatggcatctttcttcgccatcacaacaccggcaggaatagctgctggggcaggcatgaccacattctacaatcccaatagcccaagggcccttgtggtcgagggcattcttgactcggtatctgctggcattctcatatacatgtcactagtggatctcattgctgtagatttcttgggtggaaagatgacagggaccctgcgacagcaagtgatggcatacatcgcattgttcctcggtgcgctctctatgtcatcacttgcaatatgggcttgagacctgcccttgatgaaatatcagacaaaagatgaagtagtgtccatatatagaatgtctgtggtatatgtacagttttaatgtgtagtattcatgcactgttttttaagggcatgaaaaaaaaaaacaccgctgatgtactcaagggtgaactatgtggtttctttaatcgatgatc

SEQ ID NO: 7773 - protein, 387 aa, Zea mays subsp. mays
  peptide (1)..(387): Ceres Seq. ID no. 12381207
  misc_feature (6)..(387): Homolog of NCBI NO: 30526082 NR Description: putative ZIP-like zinc transporter [Oryza sativa
  misc_feature (21)..(387): Homolog of NCBI NO: 40888862 NR Description: TPA: putative ZIP-like protein [Oryza sativa
  misc_feature (188)..(387): Homolog of NCBI NO: 18406954 NR Description: putative iron-regulated transporter; protein id: supported by cDNA: 15980. [Arabidopsis thaliana]
  misc_feature (19)..(214): Homolog of NCBI NO: 18406954 NR Description: putative iron-regulated transporter; protein id: supported by cDNA: 15980. [Arabidopsis thaliana]
  misc_feature (237)..(387): Homolog of NCBI NO: 40888856 NR Description: TPA: putative ZIP-like protein [Oryza sativa
  misc_feature (21)..(154): Homolog of NCBI NO: 40888856 NR Description: TPA: putative ZIP-like protein [Oryza sativa
  misc_feature (188)..(387): Homolog of NCBI NO: 21553732 NR Description: putative iron-regulated transporter [Arabidopsis
  misc_feature (21)..(214): Homolog of NCBI NO: 21553732 NR Description: putative iron-regulated transporter [Arabidopsis
  misc_feature (19)..(387): Homolog of NCBI NO: 30682009 NR Description: metal transporter, putative (ZIP4) [Arabidopsis
  misc_feature (19)..(387): Homolog of NCBI NO: 14582255 NR Description: ZIP-like zinc transporter [Thlaspi caerulescens]
MVLAGLRRHVGQFLTSSNELMAASLSAVSCADEVQKAEGAGCRDDAAALRLKKVAMAAILVAGVLGVVLPLAGRKRRALRTDSAAFLAAKAFAAGVILATGFVHMLHDAEHALSSPCLPAAPWRRFPVPGFVAMAAALATLVLDFLATRFYEAKHRDEAARVKVAAAAALVATSSGSDEDITVVTVDEDERKAPLLQTHCHGHGHSHSHSHVHEPVQVEGSEGEVSAHVRSIVVSQILEMGIVSHSVIIGLSLGVSRSPCTIRPLVAALAFHQFFEGFALGGCIAQAQFKNLSAVLMASFFAITTPAGIAAGAGMTTFYNPNSPRALVVEGILDSVSAGILIYMSLVDLIAVDFLGGKMTGTLRQQVMAYIALFLGALSMSSLAIWA

SEQ ID NO: 7774 - protein, 367 aa, Zea mays subsp. mays
  peptide (1)..(367): Ceres Seq. ID no. 12381208
  misc_feature (1)..(367): Homolog of NCBI NO: 30526082 NR Description: putative ZIP-like zinc transporter [Oryza sativa
  misc_feature (1)..(367): Homolog of NCBI NO: 40888862 NR Description: TPA: putative ZIP-like protein [Oryza sativa
  misc_feature (168)..(367): Homolog of NCBI NO: 18406954 NR Description: putative iron-regulated transporter; protein id: supported by cDNA: 15980. [Arabidopsis thaliana]
  misc_feature (1)..(194): Homolog of NCBI NO: 18406954 NR Description: putative iron-regulated transporter; protein id: supported by cDNA: 15980. [Arabidopsis thaliana]
  misc_feature (217)..(367): Homolog of NCBI NO: 40888856 NR Description: TPA: putative ZIP-like protein [Oryza sativa
  misc_feature (1)..(134): Homolog of NCBI NO: 40888856 NR Description: TPA: putative ZIP-like protein [Oryza sativa
  misc_feature (168)..(367): Homolog of NCBI NO: 21553732 NR Description: putative iron-regulated transporter [Arabidopsis
  misc_feature (1)..(194): Homolog of NCBI NO: 21553732 NR Description: putative iron-regulated transporter [Arabidopsis
  misc_feature (1)..(367): Homolog of NCBI NO: 30682009 NR Description: metal transporter, putative (ZIP4) [Arabidopsis
  misc_feature (1)..(367): Homolog of NCBI NO: 14582255 NR Description: ZIP-like zinc transporter [Thlaspi caerulescens]
MAASLSAVSCADEVQKAEGAGCRDDAAALRLKKVAMAAILVAGVLGVVLPLAGRKRRALRTDSAAFLAAKAFAAGVILATGFVHMLHDAEHALSSPCLPAAPWRRFPVPGFVAMAAALATLVLDFLATRFYEAKHRDEAARVKVAAAAALVATSSGSDEDITVVTVDEDERKAPLLQTHCHGHGHSHSHSHVHEPVQVEGSEGEVSAHVRSIVVSQILEMGIVSHSVIIGLSLGVSRSPCTIRPLVAALAFHQFFEGFALGGCIAQAQFKNLSAVLMASFFAITTPAGIAAGAGMTTFYNPNSPRALVVEGILDSVSAGILIYMSLVDLIAVDFLGGKMTGTLRQQVMAYIALFLGALSMSSLAIWA

SEQ ID NO: 7775 - protein, 332 aa, Zea mays subsp. mays
  peptide (1)..(332): Ceres Seq. ID no. 12381209
  misc_feature (1)..(332): Homolog of NCBI NO: 30526082 NR Description: putative ZIP-like zinc transporter [Oryza sativa
  misc_feature (1)..(332): Homolog of NCBI NO: 40888862 NR Description: TPA: putative ZIP-like protein [Oryza sativa
  misc_feature (133)..(332): Homolog of NCBI NO: 18406954 NR Description: putative iron-regulated transporter; protein id: supported by cDNA: 15980. [Arabidopsis thaliana]
  misc_feature (1)..(159): Homolog of NCBI NO: 18406954 NR Description: putative iron-regulated transporter; protein id: supported by cDNA: 15980. [Arabidopsis thaliana]
  misc_feature (182)..(332): Homolog of NCBI NO: 40888856 NR Description: TPA: putative ZIP-like protein [Oryza sativa
  misc_feature (1)..(99): Homolog of NCBI NO: 40888856 NR Description: TPA: putative ZIP-like protein [Oryza sativa
  misc_feature (133)..(332): Homolog of NCBI NO: 21553732 NR Description: putative iron-regulated transporter [Arabidopsis
  misc_feature (1)..(159): Homolog of NCBI NO: 21553732 NR Description: putative iron-regulated transporter [Arabidopsis
  misc_feature (1)..(332): Homolog of NCBI NO: 30682009 NR Description: metal transporter, putative (ZIP4) [Arabidopsis
  misc_feature (1)..(332): Homolog of NCBI NO: 14582255 NR Description: ZIP-like zinc transporter [Thlaspi caerulescens]
MAAILVAGVLGVVLPLAGRKRRALRTDSAAFLAAKAFAAGVILATGFVHMLHDAEHALSSPCLPAAPWRRFPVPGFVAMAAALATLVLDFLATRFYEAKHRDEAARVKVAAAAALVATSSGSDEDITVVTVDEDERKAPLLQTHCHGHGHSHSHSHVHEPVQVEGSEGEVSAHVRSIVVSQILEMGIVSHSVIIGLSLGVSRSPCTIRPLVAALAFHQFFEGFALGGCIAQAQFKNLSAVLMASFFAITTPAGIAAGAGMTTFYNPNSPRALVVEGILDSVSAGILIYMSLVDLIAVDFLGGKMTGTLRQQVMAYIALFLGALSMSSLAIWA

SEQ ID NO: 7776 - DNA, 1547 bp, Zea mays subsp. mays
  misc_feature (1)..(1547): Ceres Seq. ID no. 12365695
  misc_feature: MA Experiment ID: 108535 Result: Up-regulated in Transcription
  misc_feature: MA Experiment 108535 PARAMETER Experiment Name: Zm_Meristem_P Parameter: Age (day) Value: 8
  misc_feature: MA Experiment 108535 PARAMETER Experiment Name: Zm_Meristem_P Parameter: Organism Value: Zea mays
  misc_feature: MA Experiment 108535 PARAMETER Experiment Name: Zm_Meristem_P Parameter: Plant Line Value: 35A19
  misc_feature: MA Experiment 108535 PARAMETER Experiment Name: Zm_Meristem_P Parameter: Tissue Value: Root Meristem vs. Above Root Meristem
  misc_feature: MA Experiment ID: 108543 Result: Down-regulated in Transcription
  misc_feature: MA Experiment ID: 20000534 Result: Down-regulated in Transcription
  misc_feature: MA Experiment 20000534 PARAMETER Experiment Name: Zm_Hybrid_Pollen_P Parameter: Age (day) Value: 8
  misc_feature: MA Experiment 20000534 PARAMETER Experiment Name: Zm_Hybrid_Pollen_P Parameter: Organism Value: Zea mays
  misc_feature: MA Experiment 20000534 PARAMETER Experiment Name: Zm_Hybrid_Pollen_P Parameter: Plant Line Value: 35A19
  misc_feature: MA Experiment 20000534 PARAMETER Experiment Name: Zm_Hybrid_Pollen_P Parameter: Tissue Value: Pollen vs. Aerial
  misc_feature: MA Experiment ID: 20000629 Result: Up-regulated in Transcription
  misc_feature: MA Experiment 20000629 PARAMETER Experiment Name: Zm_Herbicide-Treatments_P Parameter: Timepoint (hr) Value: 12
  misc_feature: MA Experiment 20000629 PARAMETER Experiment Name: Zm_Herbicide-Treatments_P Parameter: Tissue Value: Aerial
  misc_feature: MA Experiment 20000629 PARAMETER Experiment Name: Zm_Herbicide-Treatments_P Parameter: Treatment Value: Trimec vs. No Treatment
ttcttggtttgctagagagaggaaaaacaaaaaaacaaaaaaaacagtctagatggctgctgctatagatctgtcaggggaggagctgatgagagcactcgagccttttatccgggatgcctctgctcacggatccagtccgctcctccacccgcaccagccacttagcccctcgtcgccgttctccttccaccaagctgtcgccgtcgccgccgcctcctcctacggaggaaactacccgttcgccgcgcccgacgaggcgggccagctgagcccttcccagatgcagtacatccaggcccgcctccacctgcagcgtcgccaggcgcagacctccgtgctgggcccgcgtgcccagcccatgaaggcgtcggcgtccgcggcccccgccccggcgcggccgcagaagctgtacccgcggcgtgcggcagcggcactggggcaagtgggtggcggagatccggctcccgcgcaaccgcacccggctctggctcggcaccttcgacaccgccgaggaggcggcgctggcctacgaccaggccgcctaccgcctccgcggcgacgcggcgcgcctcaacttccccgacaacgccgcctcccgcggcccgctccacgcctccgtcgacgccaagctccagagcctgtgccagagcatcgccgcgtccaagaagggcgccaagaagccagcctccgccgcagctgccgcgtcgtcgtccgcccccaccagcaactgctgctcctcgccgtcgtccgacgacgcgacctcgtcctgcctcgagtccgccaccgagtcctcgtgcccgtccccgtccacgtcgccgtccgcctcgcccgggccgacggtgccggagatgcagcagctggacttcagcgaggcgccgtgggacgaggccgccggcttcgcgctcaccaagtacccgtcgtacgagatcgactgggactccctcctcgccaattaatcgtcgccccctgttggctggctggctggctcccttcctacccacactgccgtcgtgcagctggaggagggttaaagaaggttaacggccgtcgcgcagatgggattttagacatcctgcgcgggcactagttggatcattagtgctaatccccgtccgtccgttcgttcgttcgttctgtgtagatgtccgtccgattcgtttggtccttgtcactggtgagtcagttgtagatctcgggttatttagggtttggttctccggaggaggagagaaccacaaccgacgggaagccggcgtttttgtgtccggcgttctccggcggtggccggtacgtgtcacactggtcagtgaccccaccccccccggccgttcaggtgtccgttgttctggtagctgtttcttgtgctagatggtgtgctgtgctctacaggttgtaaagagcagcacggtgtgatgtgaaggagatgcttgtcaagcagtagtactccgtatgtatgttgtaaaatcagctagctagctgtgtccaggagttgtaatttgatgaactgctactgttggtgctactattgtatggtttattgttgt

SEQ ID NO: 7777 - protein, 345 aa, Zea mays subsp. mays
  peptide (1)..(345): Ceres Seq. ID no. 12365696
  misc_feature (34)..(121): Homolog of NCBI NO: 37572971 NR Description: AP2-domain DRE binding factor DBF1 [Oryza sativa
MAAAIDLSGEELMRALEPFIRDASAHGSSPLLHPHQPLSPSSPFSFHQAVAVAAASSYGGNYPFAAPDEAGQLSPSQMQYIQARLHLQRRQAQTSVLGPRAQPMKASASAAPAPARPQKLYPRRAAAALGQVGGGDPAPAQPHPALARHLRHRRGGGAGLRPGRLPPPRRRGAPQLPRQRRLPRPAPRLRRRQAPEPVPEHRRVQEGRQEASLRRSCRVVVRPHQQLLLLAVVRRRDLVLPRVRHRVLVPVPVHVAVRLARADGAGDAAAGLQRGAVGRGRRLRAHQVPVVRDRLGLPPRQLIVAPCWLAGWLPSYPHCRRAAGGGLKKVNGRRADGILDILRGH

SEQ ID NO: 7778 - protein, 333 aa, Zea mays subsp. mays
  peptide (1)..(333): Ceres Seq. ID no. 12365697
  misc_feature (22)..(109): Homolog of NCBI NO: 37572971 NR Description: AP2-domain DRE binding factor DBF1 [Oryza sativa
MRALEPFIRDASAHGSSPLLHPHQPLSPSSPFSFHQAVAVAAASSYGGNYPFAAPDEAGQLSPSQMQYIQARLHLQRRQAQTSVLGPRAQPMKASASAAPAPARPQKLYPRRAAAALGQVGGGDPAPAQPHPALARHLRHRRGGGAGLRPGRLPPPRRRGAPQLPRQRRLPRPAPRLRRRQAPEPVPEHRRVQEGRQEASLRRSCRVVVRPHQQLLLLAVVRRRDLVLPRVRHRVLVPVPVHVAVRLARADGAGDAAAGLQRGAVGRGRRLRAHQVPVVRDRLGLPPRQLIVAPCWLAGWLPSYPHCRRAAGGGLKKVNGRRADGILDILRGH

SEQ ID NO: 7779 - protein, 268 aa, Zea mays subsp. mays
  peptide (1)..(268): Ceres Seq. ID no. 12365698
  misc_feature (1)..(44): Homolog of NCBI NO: 37572971 NR Description: AP2-domain DRE binding factor DBF1 [Oryza sativa
MQYIQARLHLQRRQAQTSVLGPRAQPMKASASAAPAPARPQKLYPRRAAAALGQVGGGDPAPAQPHPALARHLRHRRGGGAGLRPGRLPPPRRRGAPQLPRQRRLPRPAPRLRRRQAPEPVPEHRRVQEGRQEASLRRSCRVVVRPHQQLLLLAVVRRRDLVLPRVRHRVLVPVPVHVAVRLARADGAGDAAAGLQRGAVGRGRRLRAHQVPVVRDRLGLPPRQLIVAPCWLAGWLPSYPHCRRAAGGGLKKVNGRRADGILDILRGH

SEQ ID NO: 7780 - DNA, 1003 bp, Zea mays subsp. mays
  misc_feature (1)..(1003): Ceres Seq. ID no. 12407190
  misc_feature: MA Experiment ID: 108523 Result: Down-regulated in Transcription
  misc_feature: MA Experiment 108523 PARAMETER Experiment Name: Zm_42deg_Heat_P Parameter: Age (day) Value: 8
  misc_feature: MA Experiment 108523 PARAMETER Experiment Name: Zm_42deg_Heat_P Parameter: Organism Value: Zea mays
  misc_feature: MA Experiment 108523 PARAMETER Experiment Name: Zm_42deg_Heat_P Parameter: Plant Line Value: 35A19
  misc_feature: MA Experiment 108523 PARAMETER Experiment Name: Zm_42deg_Heat_P Parameter: Temperature (deg C) Value: 42 vs. 22
  misc_feature: MA Experiment 108523 PARAMETER Experiment Name: Zm_42deg_Heat_P Parameter: Timepoint (hr) Value: 6
  misc_feature: MA Experiment 108523 PARAMETER Experiment Name: Zm_42deg_Heat_P Parameter: Tissue Value: Aerial
  misc_feature: MA Experiment ID: 108528 Result: Up-regulated in Transcription
  misc_feature: MA Experiment 108528 PARAMETER Experiment Name: Zm_Imbibed_Seeds_P Parameter: Age (day) Value: 5 vs. 2
  misc_feature: MA Experiment 108528 PARAMETER Experiment Name: Zm_Imbibed_Seeds_P Parameter: Organism Value: Zea mays
  misc_feature: MA Experiment 108528 PARAMETER Experiment Name: Zm_Imbibed_Seeds_P Parameter: Plant Line Value: 35A19
  misc_feature: MA Experiment 108528 PARAMETER Experiment Name: Zm_Imbibed_Seeds_P Parameter: Tissue Value: Aerial vs. Embryo
  misc_feature: MA Experiment ID: 108530 Result: Up-regulated in Transcription
  misc_feature: MA Experiment 108530 PARAMETER Experiment Name: Zm_Imbibed_Seeds_P Parameter: Age (day) Value: 6 vs. 2
  misc_feature: MA Experiment 108530 PARAMETER Experiment Name: Zm_Imbibed_Seeds_P Parameter: Organism Value: Zea mays
  misc_feature: MA Experiment 108530 PARAMETER Experiment Name: Zm_Imbibed_Seeds_P Parameter: Plant Line Value: 35A19
  misc_feature: MA Experiment 108530 PARAMETER Experiment Name: Zm_Imbibed_Seeds_P Parameter: Tissue Value: Aerial vs. Embryo
  misc_feature: MA Experiment ID: 108535 Result: Down-regulated in Transcription
  misc_feature: MA Experiment 108535 PARAMETER Experiment Name: Zm_Meristem_P Parameter: Age (day) Value: 8
  misc_feature: MA Experiment 108535 PARAMETER Experiment Name: Zm_Meristem_P Parameter: Organism Value: Zea mays
  misc_feature: MA Experiment 108535 PARAMETER Experiment Name: Zm_Meristem_P Parameter: Plant Line Value: 35A19
  misc_feature: MA Experiment 108535 PARAMETER Experiment Name: Zm_Meristem_P Parameter: Tissue Value: Root Meristem vs. Above Root Meristem
  misc_feature: MA Experiment ID: 108536 Result: Down-regulated in Transcription
  misc_feature: MA Experiment 108536 PARAMETER Experiment Name: Zm_Meristem_P Parameter: Age (day) Value: 8
  misc_feature: MA Experiment 108536 PARAMETER Experiment Name: Zm_Meristem_P Parameter: Organism Value: Zea mays
  misc_feature: MA Experiment 108536 PARAMETER Experiment Name: Zm_Meristem_P Parameter: Plant Line Value: 35A19
  misc_feature: MA Experiment 108536 PARAMETER Experiment Name: Zm_Meristem_P Parameter: Tissue Value: Shoot Meristem vs. Above Shoot Meristem
  misc_feature: MA Experiment ID: 108545 Result: Up-regulated in Transcription
  misc_feature: MA Experiment 108545 PARAMETER Experiment Name: Zm_Imbibed_Seeds_P Parameter: Age (day) Value: 3 vs. 2
  misc_feature: MA Experiment 108545 PARAMETER Experiment Name: Zm_Imbibed_Seeds_P Parameter: Organism Value: Zea mays
  misc_feature: MA Experiment 108545 PARAMETER Experiment Name: Zm_Imbibed_Seeds_P Parameter: Plant Line Value: 35A19
  misc_feature: MA Experiment 108545 PARAMETER Experiment Name: Zm_Imbibed_Seeds_P Parameter: Tissue Value: Aerial vs. Embryo
  misc_feature: MA Experiment ID: 108547 Result: Up-regulated in Transcription
  misc_feature: MA Experiment 108547 PARAMETER Experiment Name: Zm_Imbibed_Seeds_P Parameter: Age (day) Value: 4 vs. 2
  misc_feature: MA Experiment 108547 PARAMETER Experiment Name: Zm_Imbibed_Seeds_P Parameter: Organism Value: Zea mays
  misc_feature: MA Experiment 108547 PARAMETER Experiment Name: Zm_Imbibed_Seeds_P Parameter: Plant Line Value: 35A19
  misc_feature: MA Experiment 108547 PARAMETER Experiment Name: Zm_Imbibed_Seeds_P Parameter: Tissue Value: Aerial vs. Embryo
  misc_feature: MA Experiment ID: 108556 Result: Down-regulated in Transcription
  misc_feature: MA Experiment 108556 PARAMETER Experiment Name: Zm_Drought_P Parameter: Age (day) Value: 9
  misc_feature: MA Experiment 108556 PARAMETER Experiment Name: Zm_Drought_P Parameter: Organism Value: Zea mays
  misc_feature: MA Experiment 108556 PARAMETER Experiment Name: Zm_Drought_P Parameter: Plant Line Value: 35A19
  misc_feature: MA Experiment 108556 PARAMETER Experiment Name: Zm_Drought_P Parameter: Timepoint (hr) Value: 24
  misc_feature: MA Experiment 108556 PARAMETER Experiment Name: Zm_Drought_P Parameter: Tissue Value: Aerial
  misc_feature: MA Experiment 108556 PARAMETER Experiment Name: Zm_Drought_P Parameter: Treatment Value: Drought vs. No Drought
  misc_feature: MA Experiment ID: 108559 Result: Down-regulated in Transcription
  misc_feature: MA Experiment 108559 PARAMETER Experiment Name: Zm_5mM_NO_P Parameter: Age (day) Value: 8
  misc_feature: MA Experiment 108559 PARAMETER Experiment Name: Zm_5mM_NO_P Parameter: Organism Value: Zea mays
  misc_feature: MA Experiment 108559 PARAMETER Experiment Name: Zm_5mM_NO_P Parameter: Plant Line Value: 35A19
  misc_feature: MA Experiment 108559 PARAMETER Experiment Name: Zm_5mM_NO_P Parameter: Timepoint (hr) Value: 12
  misc_feature: MA Experiment 108559 PARAMETER Experiment Name: Zm_5mM_NO_P Parameter: Tissue Value: Aerial
  misc_feature: MA Experiment 108559 PARAMETER Experiment Name: Zm_5mM_NO_P Parameter: Treatment Value: 5mM NO vs. No Treatment
  misc_feature: MA Experiment ID: 108597 Result: Down-regulated in Transcription
  misc_feature: MA Experiment 108597 PARAMETER Experiment Name: Zm_100uM_ABA_P Parameter: Age (day) Value: 9
  misc_feature: MA Experiment 108597 PARAMETER Experiment Name: Zm_100uM_ABA_P Parameter: Organism Value: Zea mays
  misc_feature: MA Experiment 108597 PARAMETER Experiment Name: Zm_100uM_ABA_P Parameter: Plant Line Value: 35A19
  misc_feature: MA Experiment 108597 PARAMETER Experiment Name: Zm_100uM_ABA_P Parameter: Timepoint (hr) Value: 24
  misc_feature: MA Experiment 108597 PARAMETER Experiment Name: Zm_100uM_ABA_P Parameter: Tissue Value: Aerial
  misc_feature: MA Experiment 108597 PARAMETER Experiment Name: Zm_100uM_ABA_P Parameter: Treatment Value: 100uM ABA vs. No Treatment
  misc_feature: MA Experiment ID: 20000479 Result: Down-regulated in Transcription
  misc_feature: MA Experiment 20000479 PARAMETER Experiment Name: Zm_Drought_P Parameter: Age (day) Value: 10
  misc_feature: MA Experiment 20000479 PARAMETER Experiment Name: Zm_Drought_P Parameter: Organism Value: Zea mays
  misc_feature: MA Experiment 20000479 PARAMETER Experiment Name: Zm_Drought_P Parameter: Plant Line Value: 35A19
  misc_feature: MA Experiment 20000479 PARAMETER Experiment Name: Zm_Drought_P Parameter: Timepoint (hr) Value: 48
  misc_feature: MA Experiment 20000479 PARAMETER Experiment Name: Zm_Drought_P Parameter: Tissue Value: Aerial
  misc_feature: MA Experiment 20000479 PARAMETER Experiment Name: Zm_Drought_P Parameter: Treatment Value: Drought vs. No Drought
  misc_feature: MA Experiment ID: 20000480 Result: Down-regulated in Transcription
  misc_feature: MA Experiment 20000480 PARAMETER Experiment Name: Zm_Drought_P Parameter: Age (day) Value: 11
  misc_feature: MA Experiment 20000480 PARAMETER Experiment Name: Zm_Drought_P Parameter: Organism Value: Zea mays
  misc_feature: MA Experiment 20000480 PARAMETER Experiment Name: Zm_Drought_P Parameter: Plant Line Value: 35A19
  misc_feature: MA Experiment 20000480 PARAMETER Experiment Name: Zm_Drought_P Parameter: Timepoint (hr) Value: 72
  misc_feature: MA Experiment 20000480 PARAMETER Experiment Name: Zm_Drought_P Parameter: Tissue Value: Aerial
  misc_feature: MA Experiment 20000480 PARAMETER Experiment Name: Zm_Drought_P Parameter: Treatment Value: Drought vs. No Drought
  misc_feature: MA Experiment ID: 20000488 Result: Up-regulated in Transcription
  misc_feature: MA Experiment 20000488 PARAMETER Experiment Name: Zm_50mM_NH4NO3_L_to_H_P Parameter: Organism Value: Zea mays
  misc_feature: MA Experiment 20000488 PARAMETER Experiment Name: Zm_50mM_NH4NO3_L_to_H_P Parameter: Timepoint (hr) Value: 8
  misc_feature: MA Experiment 20000488 PARAMETER Experiment Name: Zm_50mM_NH4NO3_L_to_H_P Parameter: Tissue Value: Leaves
  misc_feature: MA Experiment 20000488 PARAMETER Experiment Name: Zm_50mM_NH4NO3_L_to_H_P Parameter: Treatment Value: 50mM NH4NO3 vs. 100mM Mannitol
acactctcctctcctgtctatccactttccactccttcactgccctccgtctccctcccctcccccctttgctcgccatggccatggcgacctccaccttctccccgcgtcccgccagcctcaggcccctgcgggcgggcggcaagcccgtcggactcctccccttcccgcgccgcctcgcctgtgccaccgccgccggggaggcgccgcccgtggagcagcgggacaaggcggagccggcccccgccgcggcctccaacggggccgccgtcaagtacgaggccccgccgccgcccgcgccagcgccggtcccggccttccgggacgccaggtgggtcaacggcacctgggacctcgccaagttcgacaagggcagcggcgtcgactgggacgccgtcatcgacgccgaggccaggagaaggagatggctcgaagactatccggaggcgactaacacagacgaggctgtcgtcttcgacacttccattattccatggtgggcttggatgaaacgcttccaccttcccgaagccgagaagctaaatggtcgcgccgccatggtcggcttcttcatggcctacttcgtggacagcttgacgggcgcgggcctcgtcgaccagatgggcaacttcttctgcaagacgctgctgttcgccgccgtcgcaggcgtgctgctggtcaggaaaaacgaggacgtcgagtcgctgaagaagctcgtcgacgagaccacgttctatgacaggcagtggcaggcgacctggcaagatgactccgctgggggaccaaacaactagttcagagttggggtacaaaaaaattagcttatctatttcctcggccttcttgttttccctgtgtagtgagaacttttttttgtttttgtttttgacaaacgcaatgatctacgtcatgttgtaagattgtatgaaaaataattctgcagtttcagtttttttttaaaaaaaccgataatattcagacatggtaatttattcacatatcg

SEQ ID NO: 7781 - protein, 263 aa, Zea mays subsp. mays
  peptide (1)..(263): Ceres Seq. ID no. 12407191
  misc_feature (13)..(258): Homolog of NCBI NO: 8978078 NR Description: Lil3 protein [Arabidopsis thaliana]
  misc_feature (13)..(258): Homolog of NCBI NO: 30695110 NR Description: Lil3 protein [Arabidopsis thaliana]
  misc_feature (62)..(256): Homolog of NCBI NO: 7485188 NR Description: hypothetical protein - Arabidopsis thaliana hypothetical protein [Arabidopsis thaliana]
  misc_feature (62)..(256): Homolog of NCBI NO: 18414927 NR Description: Lil3 protein; protein id: At4g17600.1, supported cDNA: 29150., supported by cDNA: gi_14030672, supported by cDNA: supported by cDNA: gi_4741965 [Arabidopsis thaliana] thaliana
  misc_feature (62)..(256): Homolog of NCBI NO: 21555799 NR Description: Lil3 protein [Arabidopsis thaliana]
TLLSCLSTFHSFTALRLPPLPPLLAMAMATSTFSPRPASLRPLRAGGKPVGLLPFPRRLACATAAGEAPPVEQRDKAEPAPAAASNGAAVKYEAPPPPAPAPVPAFRDARWVNGTWDLAKFDKGSGVDWDAVIDAEARRRRWLEDYPEATNTDEAVVFDTSIIPWWAWMKRFHLPEAEKLNGRAAMVGFFMAYFVDSLTGAGLVDQMGNFFCKTLLFAAVAGVLLVRKNEDVESLKKLVDETTFYDRQWQATWQDDSAGGPNN

SEQ ID NO: 7782 - protein, 238 aa, Zea mays subsp. mays
  peptide (1)..(238): Ceres Seq. ID no. 12407192
  misc_feature (1)..(233): Homolog of NCBI NO: 8978078 NR Description: Lil3 protein [Arabidopsis thaliana]
  misc_feature (1)..(233): Homolog of NCBI NO: 30695110 NR Description: Lil3 protein [Arabidopsis thaliana]
  misc_feature (37)..(231): Homolog of NCBI NO: 7485188 NR Description: hypothetical protein - Arabidopsis thaliana hypothetical protein [Arabidopsis thaliana]
  misc_feature (37)..(231): Homolog of NCBI NO: 18414927 NR Description: Lil3 protein; protein id: At4g17600.1, supported cDNA: 29150., supported by cDNA: gi_14030672, supported by cDNA: supported by cDNA: gi_4741965 [Arabidopsis thaliana] thaliana
  misc_feature (37)..(231): Homolog of NCBI NO: 21555799 NR Description: Lil3 protein [Arabidopsis thaliana]
MAMATSTFSPRPASLRPLRAGGKPVGLLPFPRRLACATAAGEAPPVEQRDKAEPAPAAASNGAAVKYEAPPPPAPAPVPAFRDARWVNGTWDLAKFDKGSGVDWDAVIDAEARRRRWLEDYPEATNTDEAVVFDTSIIPWWAWMKRFHLPEAEKLNGRAAMVGFFMAYFVDSLTGAGLVDQMGNFFCKTLLFAAVAGVLLVRKNEDVESLKKLVDETTFYDRQWQATWQDDSAGGPNN

SEQ ID NO: 7783 - protein, 236 aa, Zea mays subsp. mays
  peptide (1)..(236): Ceres Seq. ID no. 12407193
  misc_feature (1)..(231): Homolog of NCBI NO: 8978078 NR Description: Lil3 protein [Arabidopsis thaliana]
  misc_feature (1)..(231): Homolog of NCBI NO: 30695110 NR Description: Lil3 protein [Arabidopsis thaliana]
  misc_feature (35)..(229): Homolog of NCBI NO: 7485188 NR Description: hypothetical protein - Arabidopsis thaliana hypothetical protein [Arabidopsis thaliana]
  misc_feature (35)..(229): Homolog of NCBI NO: 18414927 NR Description: Lil3 protein; protein id: At4g17600.1, supported cDNA: 29150., supported by cDNA: gi_14030672, supported by cDNA: supported by cDNA: gi_4741965 [Arabidopsis thaliana] thaliana
  misc_feature (35)..(229): Homolog of NCBI NO: 21555799 NR Description: Lil3 protein [Arabidopsis thaliana]
MATSTFSPRPASLRPLRAGGKPVGLLPFPRRLACATAAGEAPPVEQRDKAEPAPAAASNGAAVKYEAPPPPAPAPVPAFRDARWVNGTWDLAKFDKGSGVDWDAVIDAEARRRRWLEDYPEATNTDEAVVFDTSIIPWWAWMKRFHLPEAEKLNGRAAMVGFFMAYFVDSLTGAGLVDQMGNFFCKTLLFAAVAGVLLVRKNEDVESLKKLVDETTFYDRQWQATWQDDSAGGPNN

SEQ ID NO: 7784 - DNA, 1038 bp, Zea mays subsp. mays
  misc_feature (1)..(1038): Ceres Seq. ID no. 12402461
  misc_feature: MA Experiment ID: 108527 Result: Down-regulated in Transcription
  misc_feature: MA Experiment 108527 PARAMETER Experiment Name: Zm_5mM_NO_P Parameter: Age (day) Value: 8
  misc_feature: MA Experiment 108527 PARAMETER Experiment Name: Zm_5mM_NO_P Parameter: Organism Value: Zea mays
  misc_feature: MA Experiment 108527 PARAMETER Experiment Name: Zm_5mM_NO_P Parameter: Plant Line Value: 35A19
  misc_feature: MA Experiment 108527 PARAMETER Experiment Name: Zm_5mM_NO_P Parameter: Timepoint (hr) Value: 6
  misc_feature: MA Experiment 108527 PARAMETER Experiment Name: Zm_5mM_NO_P Parameter: Tissue Value: Aerial
  misc_feature: MA Experiment 108527 PARAMETER Experiment Name: Zm_5mM_NO_P Parameter: Treatment Value: 5mM NO vs. No Treatment
  misc_feature: MA Experiment ID: 108528 Result: Up-regulated in Transcription
  misc_feature: MA Experiment 108528 PARAMETER Experiment Name: Zm_Imbibed_Seeds_P Parameter: Age (day) Value: 5 vs. 2
  misc_feature: MA Experiment 108528 PARAMETER Experiment Name: Zm_Imbibed_Seeds_P Parameter: Organism Value: Zea mays
  misc_feature: MA Experiment 108528 PARAMETER Experiment Name: Zm_Imbibed_Seeds_P Parameter: Plant Line Value: 35A19
  misc_feature: MA Experiment 108528 PARAMETER Experiment Name: Zm_Imbibed_Seeds_P Parameter: Tissue Value: Aerial vs. Embryo
  misc_feature: MA Experiment ID: 108529 Result: Down-regulated in Transcription
  misc_feature: MA Experiment 108529 PARAMETER Experiment Name: Zm_Imbibed_Seeds_P Parameter: Age (day) Value: 5 vs. 2
  misc_feature: MA Experiment 108529 PARAMETER Experiment Name: Zm_Imbibed_Seeds_P Parameter: Organism Value: Zea mays
  misc_feature: MA Experiment 108529 PARAMETER Experiment Name: Zm_Imbibed_Seeds_P Parameter: Plant Line Value: 35A19
  misc_feature: MA Experiment 108529 PARAMETER Experiment Name: Zm_Imbibed_Seeds_P Parameter: Tissue Value: Roots vs. Embryo
  misc_feature: MA Experiment ID: 108530 Result: Up-regulated in Transcription
  misc_feature: MA Experiment 108530 PARAMETER Experiment Name: Zm_Imbibed_Seeds_P Parameter: Age (day) Value: 6 vs. 2
  misc_feature: MA Experiment 108530 PARAMETER Experiment Name: Zm_Imbibed_Seeds_P Parameter: Organism Value: Zea mays
  misc_feature: MA Experiment 108530 PARAMETER Experiment Name: Zm_Imbibed_Seeds_P Parameter: Plant Line Value: 35A19
  misc_feature: MA Experiment 108530 PARAMETER Experiment Name: Zm_Imbibed_Seeds_P Parameter: Tissue Value: Aerial vs. Embryo
  misc_feature: MA Experiment ID: 108536 Result: Down-regulated in Transcription
  misc_feature: MA Experiment 108536 PARAMETER Experiment Name: Zm_Meristem_P Parameter: Age (day) Value: 8
  misc_feature: MA Experiment 108536 PARAMETER Experiment Name: Zm_Meristem_P Parameter: Organism Value: Zea mays
  misc_feature: MA Experiment 108536 PARAMETER Experiment Name: Zm_Meristem_P Parameter: Plant Line Value: 35A19
  misc_feature: MA Experiment 108536 PARAMETER Experiment Name: Zm_Meristem_P Parameter: Tissue Value: Shoot Meristem vs. Above Shoot Meristem
  misc_feature: MA Experiment ID: 108545 Result: Up-regulated in Transcription
  misc_feature: MA Experiment 108545 PARAMETER Experiment Name: Zm_Imbibed_Seeds_P Parameter: Age (day) Value: 3 vs. 2
  misc_feature: MA Experiment 108545 PARAMETER Experiment Name: Zm_Imbibed_Seeds_P Parameter: Organism Value: Zea mays
  misc_feature: MA Experiment 108545 PARAMETER Experiment Name: Zm_Imbibed_Seeds_P Parameter: Plant Line Value: 35A19
  misc_feature: MA Experiment 108545 PARAMETER Experiment Name: Zm_Imbibed_Seeds_P Parameter: Tissue Value: Aerial vs. Embryo
  misc_feature: MA Experiment ID: 108546 Result: Down-regulated in Transcription
  misc_feature: MA Experiment 108546 PARAMETER Experiment Name: Zm_Imbibed_Seeds_P Parameter: Age (day) Value: 3 vs. 2
  misc_feature: MA Experiment 108546 PARAMETER Experiment Name: Zm_Imbibed_Seeds_P Parameter: Organism Value: Zea mays
  misc_feature: MA Experiment 108546 PARAMETER Experiment Name: Zm_Imbibed_Seeds_P Parameter: Plant Line Value: 35A19
  misc_feature: MA Experiment 108546 PARAMETER Experiment Name: Zm_Imbibed_Seeds_P Parameter: Tissue Value: Roots vs. Embryo
  misc_feature: MA Experiment ID: 108547 Result: Up-regulated in Transcription
  misc_feature: MA Experiment 108547 PARAMETER Experiment Name: Zm_Imbibed_Seeds_P Parameter: Age (day) Value: 4 vs. 2
  misc_feature: MA Experiment 108547 PARAMETER Experiment Name: Zm_Imbibed_Seeds_P Parameter: Organism Value: Zea mays
  misc_feature: MA Experiment 108547 PARAMETER Experiment Name: Zm_Imbibed_Seeds_P Parameter: Plant Line Value: 35A19
  misc_feature: MA Experiment 108547 PARAMETER Experiment Name: Zm_Imbibed_Seeds_P Parameter: Tissue Value: Aerial vs. Embryo
  misc_feature: MA Experiment ID: 108556 Result: Down-regulated in Transcription
  misc_feature: MA Experiment 108556 PARAMETER Experiment Name: Zm_Drought_P Parameter: Age (day) Value: 9
  misc_feature: MA Experiment 108556 PARAMETER Experiment Name: Zm_Drought_P Parameter: Organism Value: Zea mays
  misc_feature: MA Experiment 108556 PARAMETER Experiment Name: Zm_Drought_P Parameter: Plant Line Value: 35A19
  misc_feature: MA Experiment 108556 PARAMETER Experiment Name: Zm_Drought_P Parameter: Timepoint (hr) Value: 24
  misc_feature: MA Experiment 108556 PARAMETER Experiment Name: Zm_Drought_P Parameter: Tissue Value: Aerial
  misc_feature: MA Experiment 108556 PARAMETER Experiment Name: Zm_Drought_P Parameter: Treatment Value: Drought vs. No Drought
  misc_feature: MA Experiment ID: 108559 Result: Down-regulated in Transcription
  misc_feature: MA Experiment 108559 PARAMETER Experiment Name: Zm_5mM_NO_P Parameter: Age (day) Value: 8
  misc_feature: MA Experiment 108559 PARAMETER Experiment Name: Zm_5mM_NO_P Parameter: Organism Value: Zea mays
  misc_feature: MA Experiment 108559 PARAMETER Experiment Name: Zm_5mM_NO_P Parameter: Plant Line Value: 35A19
  misc_feature: MA Experiment 108559 PARAMETER Experiment Name: Zm_5mM_NO_P Parameter: Timepoint (hr) Value: 12
  misc_feature: MA Experiment 108559 PARAMETER Experiment Name: Zm_5mM_NO_P Parameter: Tissue Value: Aerial
  misc_feature: MA Experiment 108559 PARAMETER Experiment Name: Zm_5mM_NO_P Parameter: Treatment Value: 5mM NO vs. No Treatment
  misc_feature: MA Experiment ID: 108688 Result: Down-regulated in Transcription
  misc_feature: MA Experiment 108688 PARAMETER Experiment Name: Zm_Embryos-Flowers__P Parameter: Tissue Value: Immature Flowers vs. Aerial+
  misc_feature: MA Experiment ID: 20000477 Result: Down-regulated in Transcription
  misc_feature: MA Experiment 20000477 PARAMETER Experiment Name: Zm_5mM_SA_P Parameter: Age (day) Value: 10
  misc_feature: MA Experiment 20000477 PARAMETER Experiment Name: Zm_5mM_SA_P Parameter: Organism Value: Zea mays
  misc_feature: MA Experiment 20000477 PARAMETER Experiment Name: Zm_5mM_SA_P Parameter: Plant Line Value: 35A19
  misc_feature: MA Experiment 20000477 PARAMETER Experiment Name: Zm_5mM_SA_P Parameter: Timepoint (hr) Value: 48
  misc_feature: MA Experiment 20000477 PARAMETER Experiment Name: Zm_5mM_SA_P Parameter: Tissue Value: Aerial
  misc_feature: MA Experiment 20000477 PARAMETER Experiment Name: Zm_5mM_SA_P Parameter: Treatment Value: 5mM SA vs. No Treatment
  misc_feature: MA Experiment ID: 20000478 Result: Down-regulated in Transcription
  misc_feature: MA Experiment 20000478 PARAMETER Experiment Name: Zm_5mM_SA_P Parameter: Age (day) Value: 11
  misc_feature: MA Experiment 20000478 PARAMETER Experiment Name: Zm_5mM_SA_P Parameter: Organism Value: Zea mays
  misc_feature: MA Experiment 20000478 PARAMETER Experiment Name: Zm_5mM_SA_P Parameter: Plant Line Value: 35A19
  misc_feature: MA Experiment 20000478 PARAMETER Experiment Name: Zm_5mM_SA_P Parameter: Timepoint (hr) Value: 72
  misc_feature: MA Experiment 20000478 PARAMETER Experiment Name: Zm_5mM_SA_P Parameter: Tissue Value: Aerial
  misc_feature: MA Experiment 20000478 PARAMETER Experiment Name: Zm_5mM_SA_P Parameter: Treatment Value: 5mM SA vs. No Treatment
  misc_feature: MA Experiment ID: 20000479 Result: Down-regulated in Transcription
  misc_feature: MA Experiment 20000479 PARAMETER Experiment Name: Zm_Drought_P Parameter: Age (day) Value: 10
  misc_feature: MA Experiment 20000479 PARAMETER Experiment Name: Zm_Drought_P Parameter: Organism Value: Zea mays
  misc_feature: MA Experiment 20000479 PARAMETER Experiment Name: Zm_Drought_P Parameter: Plant Line Value: 35A19
  misc_feature: MA Experiment 20000479 PARAMETER Experiment Name: Zm_Drought_P Parameter: Timepoint (hr) Value: 48
  misc_feature: MA Experiment 20000479 PARAMETER Experiment Name: Zm_Drought_P Parameter: Tissue Value: Aerial
  misc_feature: MA Experiment 20000479 PARAMETER Experiment Name: Zm_Drought_P Parameter: Treatment Value: Drought vs. No Drought
  misc_feature: MA Experiment ID: 20000480 Result: Down-regulated in Transcription
  misc_feature: MA Experiment 20000480 PARAMETER Experiment Name: Zm_Drought_P Parameter: Age (day) Value: 11
  misc_feature: MA Experiment 20000480 PARAMETER Experiment Name: Zm_Drought_P Parameter: Organism Value: Zea mays
  misc_feature: MA Experiment 20000480 PARAMETER Experiment Name: Zm_Drought_P Parameter: Plant Line Value: 35A19
  misc_feature: MA Experiment 20000480 PARAMETER Experiment Name: Zm_Drought_P Parameter: Timepoint (hr) Value: 72
  misc_feature: MA Experiment 20000480 PARAMETER Experiment Name: Zm_Drought_P Parameter: Tissue Value: Aerial
  misc_feature: MA Experiment 20000480 PARAMETER Experiment Name: Zm_Drought_P Parameter: Treatment Value: Drought vs. No Drought
  misc_feature: MA Experiment ID: 20000534 Result: Down-regulated in Transcription
  misc_feature: MA Experiment 20000534 PARAMETER Experiment Name: Zm_Hybrid_Pollen_P Parameter: Age (day) Value: 8
  misc_feature: MA Experiment 20000534 PARAMETER Experiment Name: Zm_Hybrid_Pollen_P Parameter: Organism Value: Zea mays
  misc_feature: MA Experiment 20000534 PARAMETER Experiment Name: Zm_Hybrid_Pollen_P Parameter: Plant Line Value: 35A19
  misc_feature: MA Experiment 20000534 PARAMETER Experiment Name: Zm_Hybrid_Pollen_P Parameter: Tissue Value: Pollen vs. Aerial
  misc_feature: MA Experiment ID: 20000626 Result: Down-regulated in Transcription
  misc_feature: MA Experiment 20000626 PARAMETER Experiment Name: Zm_Herbicide-Treatments_P Parameter: Timepoint (hr) Value: 12
  misc_feature: MA Experiment 20000626 PARAMETER Experiment Name: Zm_Herbicide-Treatments_P Parameter: Tissue Value: Aerial
  misc_feature: MA Experiment 20000626 PARAMETER Experiment Name: Zm_Herbicide-Treatments_P Parameter: Treatment Value: Roundup vs. No Treatment
  misc_feature: MA Experiment ID: 20001608 Result: Up-regulated in Transcription
  misc_feature: MA Experiment 20001608 PARAMETER Experiment Name: Zm_50ppm_KNO3_L-to-H_P Parameter: Age (day) Value: 21
  misc_feature: MA Experiment 20001608 PARAMETER Experiment Name: Zm_50ppm_KNO3_L-to-H_P Parameter: Organism Value: Zea mays
  misc_feature: MA Experiment 20001608 PARAMETER Experiment Name: Zm_50ppm_KNO3_L-to-H_P Parameter: Plant Line Value: 35A19
  misc_feature: MA Experiment 20001608 PARAMETER Experiment Name: Zm_50ppm_KNO3_L-to-H_P Parameter: Timepoint (hr) Value: 48
  misc_feature: MA Experiment 20001608 PARAMETER Experiment Name: Zm_50ppm_KNO3_L-to-H_P Parameter: Tissue Value: Shoots
  misc_feature: MA Experiment 20001608 PARAMETER Experiment Name: Zm_50ppm_KNO3_L-to-H_P Parameter: Treatment Value: 50ppm KNO3 vs. 50ppm KCl
ctcagccccttccccggccattcgagcgccgccctgctcttgctcggctgcccttgcccactacggcctcttgatttctccctccattccgatatataagcgaaaaaaatccgataagccaagccaaacccaaacccaaccatggcgtgcatgccggctgtgtctgcccccgtcgtcctcgcgccggcaccggcgtcgacccgcacccacctctgctactcaacggaaatgcgacgcggcgcgctctccctccgtcccgcccgcgctatccccacgttgaggctcggcggccaccgcgacgcccgtggcgctgtcgtcgtccgcgccactgcggcagagggagccgtggagctgcaggccaaggtgacgagcaagtgcttcttcgacgtggaggtcggcggggagcctgcgggccgcattgtcatcgggctcttcggagaggtcgtacctaagaccatcgacaacttccgtgcgctctgcactggtgagaaagggtacggctacaagggctgctccttccaccggatcatcaaggactttatgattcaaggcggagacttccagcaaaacaatggtactggtgggagaagtatttatggtgaatgctttgatgatgaaaattttacactgaagcatgttggtcctggtgtgctaagcatggcaaatgctggccccaacacaaatggaagtcaatttttcatttgcactgtgaagacaccgtggttggacaaccgtcacgtcgtgtttggacatgtattagaggggatggacgtggtgaagcagcttgaatcgcaagagaccagcaggtccgatactcccaagcagccttgccgaatcgttaactgcggcgaggtccccctggacagctgagcgagcgaaatgctcttggtgagtttgaacctgaggtcttcccttacgttagagcgtcgacgcccatttgtgctagcatcattcagtcagttgagttatgtgtacgtgccgtgacggaagtttaattactcagatgtggacacattaccagttaatagcaacgaattg

SEQ ID NO: 7785 - protein, 242 aa, Zea mays subsp. mays
  peptide (1)..(242): Ceres Seq. ID no. 12402462
  misc_feature (1)..(241): Homolog of NCBI NO: 34902534 NR Description: putative peptidyl-prolyl cis-trans isomerase,
  misc_feature (13)..(242): Homolog of NCBI NO: 15228674 NR Description: peptidylprolyl isomerase ROC4; protein id: supported by cDNA: 29220., supported by cDNA: gi_13358215, by cDNA: gi_16648946, supported by cDNA: gi_20259871, supported
  misc_feature (13)..(242): Homolog of NCBI NO: 21555831 NR Description: peptidylprolyl isomerase ROC4 [Arabidopsis
  misc_feature (13)..(242): Homolog of NCBI NO: 11762200 NR Description: AT3g62030 [Arabidopsis thaliana]
  misc_feature (44)..(241): Homolog of NCBI NO: 6014889 NR Description: Peptidyl-prolyl cis-trans isomerase, chloroplast
  misc_feature (1)..(240): Homolog of NCBI NO: 37788312 NR Description: cyclophilin-like protein [Triticum aestivum]
  misc_feature (6)..(240): Homolog of NCBI NO: 37788308 NR Description: cyclophilin-like protein [Triticum aestivum]
  misc_feature (65)..(240): Homolog of NCBI NO: 15240008 NR Description: peptidyl-prolyl isomerase protein; protein id: supported by cDNA: 620., supported by cDNA: gi_13605816, by cDNA: gi_16323327 [Arabidopsis thaliana]
  misc_feature (65)..(240): Homolog of NCBI NO: 21593963 NR Description: peptidylprolyl isomerase-like protein
  misc_feature (70)..(240): Homolog of NCBI NO: 9955556 NR Description: peptidylprolyl isomerase-like protein
MACMPAVSAPVVLAPAPASTRTHLCYSTEMRRGALSLRPARAIPTLRLGGHRDARGAVVVRATAAEGAVELQAKVTSKCFFDVEVGGEPAGRIVIGLFGEVVPKTIDNFRALCTGEKGYGYKGCSFHRIIKDFMIQGGDFQQNNGTGGRSIYGECFDDENFTLKHVGPGVLSMANAGPNTNGSQFFICTVKTPWLDNRHVVFGHVLEGMDVVKQLESQETSRSDTPKQPCRIVNCGEVPLDS

SEQ ID NO: 7786 - protein, 239 aa, Zea mays subsp. mays
  peptide (1)..(239): Ceres Seq. ID no. 12402463
  misc_feature (1)..(238): Homolog of NCBI NO: 34902534 NR Description: putative peptidyl-prolyl cis-trans isomerase,
  misc_feature (10)..(239): Homolog of NCBI NO: 15228674 NR Description: peptidylprolyl isomerase ROC4; protein id: supported by cDNA: 29220., supported by cDNA: gi_13358215, by cDNA: gi_16648946, supported by cDNA: gi_20259871, supported
  misc_feature (10)..(239): Homolog of NCBI NO: 21555831 NR Description: peptidylprolyl isomerase ROC4 [Arabidopsis
  misc_feature (10)..(239): Homolog of NCBI NO: 11762200 NR Description: AT3g62030 [Arabidopsis thaliana]
  misc_feature (41)..(238): Homolog of NCBI NO: 6014889 NR Description: Peptidyl-prolyl cis-trans isomerase, chloroplast
  misc_feature (1)..(237): Homolog of NCBI NO: 37788312 NR Description: cyclophilin-like protein [Triticum aestivum]
  misc_feature (3)..(237): Homolog of NCBI NO: 37788308 NR Description: cyclophilin-like protein [Triticum aestivum]
  misc_feature (62)..(237): Homolog of NCBI NO: 15240008 NR Description: peptidyl-prolyl isomerase protein; protein id: supported by cDNA: 620., supported by cDNA: gi_13605816, by cDNA: gi_16323327 [Arabidopsis thaliana]
  misc_feature (62)..(237): Homolog of NCBI NO: 21593963 NR Description: peptidylprolyl isomerase-like protein
  misc_feature (67)..(237): Homolog of NCBI NO: 9955556 NR Description: peptidylprolyl isomerase-like protein
MPAVSAPVVLAPAPASTRTHLCYSTEMRRGALSLRPARAIPTLRLGGHRDARGAVVVRATAAEGAVELQAKVTSKCFFDVEVGGEPAGRIVIGLFGEVVPKTIDNFRALCTGEKGYGYKGCSFHRIIKDFMIQGGDFQQNNGTGGRSIYGECFDDENFTLKHVGPGVLSMANAGPNTNGSQFFICTVKTPWLDNRHVVFGHVLEGMDVVKQLESQETSRSDTPKQPCRIVNCGEVPLDS

SEQ ID NO: 7787 - protein, 213 aa, Zea mays subsp. mays
  peptide (1)..(213): Ceres Seq. ID no. 12402464
  misc_feature (1)..(212): Homolog of NCBI NO: 34902534 NR Description: putative peptidyl-prolyl cis-trans isomerase,
  misc_feature (1)..(213): Homolog of NCBI NO: 15228674 NR Description: peptidylprolyl isomerase ROC4; protein id: supported by cDNA: 29220., supported by cDNA: gi_13358215, by cDNA: gi_16648946, supported by cDNA: gi_20259871, supported
  misc_feature (1)..(213): Homolog of NCBI NO: 21555831 NR Description: peptidylprolyl isomerase ROC4 [Arabidopsis
  misc_feature (1)..(213): Homolog of NCBI NO: 11762200 NR Description: AT3g62030 [Arabidopsis thaliana]
  misc_feature (15)..(212): Homolog of NCBI NO: 6014889 NR Description: Peptidyl-prolyl cis-trans isomerase, chloroplast
  misc_feature (1)..(211): Homolog of NCBI NO: 37788312 NR Description: cyclophilin-like protein [Triticum aestivum]
  misc_feature (1)..(211): Homolog of NCBI NO: 37788308 NR Description: cyclophilin-like protein [Triticum aestivum]
  misc_feature (36)..(211): Homolog of NCBI NO: 15240008 NR Description: peptidyl-prolyl isomerase protein; protein id: supported by cDNA: 620., supported by cDNA: gi_13605816, by cDNA: gi_16323327 [Arabidopsis thaliana]
  misc_feature (36)..(211): Homolog of NCBI NO: 21593963 NR Description: peptidylprolyl isomerase-like protein
  misc_feature (41)..(211): Homolog of NCBI NO: 9955556 NR Description: peptidylprolyl isomerase-like protein
MRRGALSLRPARAIPTLRLGGHRDARGAVVVRATAAEGAVELQAKVTSKCFFDVEVGGEPAGRIVIGLFGEVVPKTIDNFRALCTGEKGYGYKGCSFHRIIKDFMIQGGDFQQNNGTGGRSIYGECFDDENFTLKHVGPGVLSMANAGPNTNGSQFFICTVKTPWLDNRHVVFGHVLEGMDVVKQLESQETSRSDTPKQPCRIVNCGEVPLDS

SEQ ID NO: 7788 - DNA, 984 bp, Zea mays subsp. mays
  misc_feature (1)..(984): Ceres Seq. ID no. 12401112
  misc_feature: MA Experiment ID: 108504 Result: Down-regulated in Transcription
  misc_feature: MA Experiment 108504 PARAMETER Experiment Name: Zm_Drought_P Parameter: Age (day) Value: 8
  misc_feature: MA Experiment 108504 PARAMETER Experiment Name: Zm_Drought_P Parameter: Organism Value: Zea mays
  misc_feature: MA Experiment 108504 PARAMETER Experiment Name: Zm_Drought_P Parameter: Plant Line Value: 35A19
  misc_feature: MA Experiment 108504 PARAMETER Experiment Name: Zm_Drought_P Parameter: Timepoint (hr) Value: 12
  misc_feature: MA Experiment 108504 PARAMETER Experiment Name: Zm_Drought_P Parameter: Tissue Value: Aerial
  misc_feature: MA Experiment 108504 PARAMETER Experiment Name: Zm_Drought_P Parameter: Treatment Value: Drought vs. No Drought
  misc_feature: MA Experiment ID: 108523 Result: Down-regulated in Transcription
  misc_feature: MA Experiment 108523 PARAMETER Experiment Name: Zm_42deg_Heat_P Parameter: Age (day) Value: 8
  misc_feature: MA Experiment 108523 PARAMETER Experiment Name: Zm_42deg_Heat_P Parameter: Organism Value: Zea mays
  misc_feature: MA Experiment 108523 PARAMETER Experiment Name: Zm_42deg_Heat_P Parameter: Plant Line Value: 35A19
  misc_feature: MA Experiment 108523 PARAMETER Experiment Name: Zm_42deg_Heat_P Parameter: Temperature (deg C) Value: 42 vs. 22
  misc_feature: MA Experiment 108523 PARAMETER Experiment Name: Zm_42deg_Heat_P Parameter: Timepoint (hr) Value: 6
  misc_feature: MA Experiment 108523 PARAMETER Experiment Name: Zm_42deg_Heat_P Parameter: Tissue Value: Aerial
  misc_feature: MA Experiment ID: 108535 Result: Down-regulated in Transcription
  misc_feature: MA Experiment 108535 PARAMETER Experiment Name: Zm_Meristem_P Parameter: Age (day) Value: 8
  misc_feature: MA Experiment 108535 PARAMETER Experiment Name: Zm_Meristem_P Parameter: Organism Value: Zea mays
  misc_feature: MA Experiment 108535 PARAMETER Experiment Name: Zm_Meristem_P Parameter: Plant Line Value: 35A19
  misc_feature: MA Experiment 108535 PARAMETER Experiment Name: Zm_Meristem_P Parameter: Tissue Value: Root Meristem vs. Above Root Meristem
  misc_feature: MA Experiment ID: 108536 Result: Up-regulated in Transcription
  misc_feature: MA Experiment 108536 PARAMETER Experiment Name: Zm_Meristem_P Parameter: Age (day) Value: 8
  misc_feature: MA Experiment 108536 PARAMETER Experiment Name: Zm_Meristem_P Parameter: Organism Value: Zea mays
  misc_feature: MA Experiment 108536 PARAMETER Experiment Name: Zm_Meristem_P Parameter: Plant Line Value: 35A19
  misc_feature: MA Experiment 108536 PARAMETER Experiment Name: Zm_Meristem_P Parameter: Tissue Value: Shoot Meristem vs. Above Shoot Meristem
  misc_feature: MA Experiment ID: 108543 Result: Up-regulated in Transcription
  misc_feature: MA Experiment ID: 108544 Result: Up-regulated in Transcription
  misc_feature: MA Experiment ID: 108556 Result: Down-regulated in Transcription
  misc_feature: MA Experiment 108556 PARAMETER Experiment Name: Zm_Drought_P Parameter: Age (day) Value: 9
  misc_feature: MA Experiment 108556 PARAMETER Experiment Name: Zm_Drought_P Parameter: Organism Value: Zea mays
  misc_feature: MA Experiment 108556 PARAMETER Experiment Name: Zm_Drought_P Parameter: Plant Line Value: 35A19
  misc_feature: MA Experiment 108556 PARAMETER Experiment Name: Zm_Drought_P Parameter: Timepoint (hr) Value: 24
  misc_feature: MA Experiment 108556 PARAMETER Experiment Name: Zm_Drought_P Parameter: Tissue Value: Aerial
  misc_feature: MA Experiment 108556 PARAMETER Experiment Name: Zm_Drought_P Parameter: Treatment Value: Drought vs. No Drought
  misc_feature: MA Experiment ID: 108597 Result: Down-regulated in Transcription
  misc_feature: MA Experiment 108597 PARAMETER Experiment Name: Zm_100uM_ABA_P Parameter: Age (day) Value: 9
  misc_feature: MA Experiment 108597 PARAMETER Experiment Name: Zm_100uM_ABA_P Parameter: Organism Value: Zea mays
  misc_feature: MA Experiment 108597 PARAMETER Experiment Name: Zm_100uM_ABA_P Parameter: Plant Line Value: 35A19
  misc_feature: MA Experiment 108597 PARAMETER Experiment Name: Zm_100uM_ABA_P Parameter: Timepoint (hr) Value: 24
  misc_feature: MA Experiment 108597 PARAMETER Experiment Name: Zm_100uM_ABA_P Parameter: Tissue Value: Aerial
  misc_feature: MA Experiment 108597 PARAMETER Experiment Name: Zm_100uM_ABA_P Parameter: Treatment Value: 100uM ABA vs. No Treatment
  misc_feature: MA Experiment ID: 108687 Result: Down-regulated in Transcription
  misc_feature: MA Experiment 108687 PARAMETER Experiment Name: Zm_Embryos-Flowers__P Parameter: Tissue Value: Embryo vs. Aerial+
  misc_feature: MA Experiment ID: 20000479 Result: Down-regulated in Transcription
  misc_feature: MA Experiment 20000479 PARAMETER Experiment Name: Zm_Drought_P Parameter: Age (day) Value: 10
  misc_feature: MA Experiment 20000479 PARAMETER Experiment Name: Zm_Drought_P Parameter: Organism Value: Zea mays
  misc_feature: MA Experiment 20000479 PARAMETER Experiment Name: Zm_Drought_P Parameter: Plant Line Value: 35A19
  misc_feature: MA Experiment 20000479 PARAMETER Experiment Name: Zm_Drought_P Parameter: Timepoint (hr) Value: 48
  misc_feature: MA Experiment 20000479 PARAMETER Experiment Name: Zm_Drought_P Parameter: Tissue Value: Aerial
  misc_feature: MA Experiment 20000479 PARAMETER Experiment Name: Zm_Drought_P Parameter: Treatment Value: Drought vs. No Drought
  misc_feature: MA Experiment ID: 20000480 Result: Down-regulated in Transcription
  misc_feature: MA Experiment 20000480 PARAMETER Experiment Name: Zm_Drought_P Parameter: Age (day) Value: 11
  misc_feature: MA Experiment 20000480 PARAMETER Experiment Name: Zm_Drought_P Parameter: Organism Value: Zea mays
  misc_feature: MA Experiment 20000480 PARAMETER Experiment Name: Zm_Drought_P Parameter: Plant Line Value: 35A19
  misc_feature: MA Experiment 20000480 PARAMETER Experiment Name: Zm_Drought_P Parameter: Timepoint (hr) Value: 72
  misc_feature: MA Experiment 20000480 PARAMETER Experiment Name: Zm_Drought_P Parameter: Tissue Value: Aerial
  misc_feature: MA Experiment 20000480 PARAMETER Experiment Name: Zm_Drought_P Parameter: Treatment Value: Drought vs. No Drought
  misc_feature: MA Experiment ID: 20000492 Result: Down-regulated in Transcription
  misc_feature: MA Experiment 20000492 PARAMETER Experiment Name: Zm_Hybrid_Seed_Dev_P Parameter: DAP Value: 12
  misc_feature: MA Experiment 20000492 PARAMETER Experiment Name: Zm_Hybrid_Seed_Dev_P Parameter: Organism Value: Zea mays
  misc_feature: MA Experiment 20000492 PARAMETER Experiment Name: Zm_Hybrid_Seed_Dev_P Parameter: Plant Line Value: 35A19
  misc_feature: MA Experiment 20000492 PARAMETER Experiment Name: Zm_Hybrid_Seed_Dev_P Parameter: Tissue Value: Fert Kernel vs. Unfert Floret
  misc_feature: MA Experiment ID: 20000535 Result: Down-regulated in Transcription
  misc_feature: MA Experiment 20000535 PARAMETER Experiment Name: Zm_Hybrid_Seed_Dev_P Parameter: DAP Value: 30 vs. 12
  misc_feature: MA Experiment 20000535 PARAMETER Experiment Name: Zm_Hybrid_Seed_Dev_P Parameter: Organism Value: Zea mays
  misc_feature: MA Experiment 20000535 PARAMETER Experiment Name: Zm_Hybrid_Seed_Dev_P Parameter: Plant Line Value: 35A19
  misc_feature: MA Experiment 20000535 PARAMETER Experiment Name: Zm_Hybrid_Seed_Dev_P Parameter: Tissue Value: Embryo vs. Unfert Floret
catttgctccaagtcccaaatactagcaggcggcaggcggccaagaccggtgtccctcgacgacctgccgagtgccgaggcaagcaagacgcgaggaggctgtaagcctgccatcagcagcggcgatggcgggcgccgaggtgggagaagacaagtaccgctccttcatccacggcgagggcgagagggacaccgtgtggaggtacggcgccccgcccaactacgacgtggtcaacaagctcttcgaggaggagaggactcaggtgtggcccgagggctcgctggaggagaaggtgcagcggttgctcaagagctgggagatggagctggtgcacaaggtgcggcccgaggaccagaagaccgtcaactcggagaaatactctgccagcaccaacgggatgagcgctctgacccgggccgaggtgatggccatcggcggctacaacaacttcctgcgcaccaagctgcccccggagcaccgcatctacgacccggacagcgagaccgtggagtccgccatggccaccttcaccacggccttcccgcggggcttcgccatcgaggtgctcgacgtctacagcggcccgcccaggatcgccttcaagttccgccactggggctacatggaggggcccttcaagggccacccgccgcacggccagcgggtcgagctcttcggcgtctgcatcttccatgttgacgaagacatgaaggtggacaagtcagagtacttctacgagcgcggcaacttcctcgccggcttcttgagtgcccctgcccctgatggctcaggcggttgccccgtgatgcgcgggaactgaatgggcctgcaatgggacattggaagactaggcattggaacattgggattattagcattagcgatcccgaatccgcttttattacggtttaataattccatcatgtaacatgacacttgcatttgtgtttgaataaacatgtcgttgcttcgacatattagcg

SEQ ID NO: 7789 - protein, 232 aa, Zea mays subsp. mays
  peptide (1)..(232): Ceres Seq. ID no. 12401113
ICSKSQILAGGRRPRPVSLDDLPSAEASKTRGGCKPAISSGDGGRRGGRRQVPLLHPRRGREGHRVEVRRPAQLRRGQQALRGGEDSGVARGLAGGEGAAVAQELGDGAGAQGAARGPEDRQLGEILCQHQRDERSDPGRGDGHRRLQQLPAHQAAPGAPHLRPGQRDRGVRHGHLHHGLPAGLRHRGARRLQRPAQDRLQVPPLGLHGGALQGPPAARPAGRALRRLHLPC

SEQ ID NO: 7790 - protein, 231 aa, Zea mays subsp. mays
  peptide (1)..(231): Ceres Seq. ID no. 12401114
  misc_feature (1)..(231): Homolog of NCBI NO: 34904656 NR Description: putative pathogenesis related protein [Oryza
  misc_feature (1)..(230): Homolog of NCBI NO: 1346809 NR Description: Pathogen-related protein >gi|7489402|pir||T06168
  misc_feature (1)..(231): Homolog of NCBI NO: 34904652 NR Description: putative pathogenesis related protein [Oryza
  misc_feature (1)..(144): Homolog of NCBI NO: 100602 NR Description: infection-related protein - barley
  misc_feature (7)..(217): Homolog of NCBI NO: 34910862 NR Description: putative pathogenesis related protein [Oryza
  misc_feature (1)..(217): Homolog of NCBI NO: 34910864 NR Description: putative pathogenesis related protein [Oryza
  misc_feature (9)..(217): Homolog of NCBI NO: 18412106 NR Description: expressed protein; protein id: At1g78780.1,
  misc_feature (18)..(217): Homolog of NCBI NO: 25372796 NR Description: hypothetical protein F9K20.18 [imported] - thaliana >gi|3834316|gb|AAC83032.1| Similar to gb|X16648 related protein from Hordeum vulgare. EST gb|Z18206 comes from
  misc_feature (66)..(217): Homolog of NCBI NO: 30699354 NR Description: expressed protein [Arabidopsis thaliana]
  misc_feature (22)..(226): Homolog of NCBI NO: 17227713 NR Description: similar to pathogenesis related protein [Nostoc
MAGAEVGEDKYRSFIHGEGERDTVWRYGAPPNYDVVNKLFEEERTQVWPEGSLEEKVQRLLKSWEMELVHKVRPEDQKTVNSEKYSASTNGMSALTRAEVMAIGGYNNFLRTKLPPEHRIYDPDSETVESAMATFTTAFPRGFAIEVLDVYSGPPRIAFKFRHWGYMEGPFKGHPPHGQRVELFGVCIFHVDEDMKVDKSEYFYERGNFLAGFLSAPAPDGSGGCPVMRGN

SEQ ID NO: 7791 - protein, 166 aa, Zea mays subsp. mays
  peptide (1)..(166): Ceres Seq. ID no. 12401115
  misc_feature (1)..(166): Homolog of NCBI NO: 34904656 NR Description: putative pathogenesis related protein [Oryza
  misc_feature (1)..(165): Homolog of NCBI NO: 1346809 NR Description: Pathogen-related protein >gi|7489402|pir||T06168
  misc_feature (1)..(166): Homolog of NCBI NO: 34904652 NR Description: putative pathogenesis related protein [Oryza
  misc_feature (1)..(79): Homolog of NCBI NO: 100602 NR Description: infection-related protein - barley
  misc_feature (1)..(152): Homolog of NCBI NO: 34910862 NR Description: putative pathogenesis related protein [Oryza
  misc_feature (1)..(152): Homolog of NCBI NO: 34910864 NR Description: putative pathogenesis related protein [Oryza
  misc_feature (1)..(152): Homolog of NCBI NO: 18412106 NR Description: expressed protein; protein id: At1g78780.1,
  misc_feature (1)..(152): Homolog of NCBI NO: 25372796 NR Description: hypothetical protein F9K20.18 [imported] - thaliana >gi|3834316|gb|AAC83032.1| Similar to gb|X16648 related protein from Hordeum vulgare. EST gb|Z18206 comes from
  misc_feature (1)..(152): Homolog of NCBI NO: 30699354 NR Description: expressed protein [Arabidopsis thaliana]
  misc_feature (1)..(161): Homolog of NCBI NO: 17227713 NR Description: similar to pathogenesis related protein [Nostoc
MELVHKVRPEDQKTVNSEKYSASTNGMSALTRAEVMAIGGYNNFLRTKLPPEHRIYDPDSETVESAMATFTTAFPRGFAIEVLDVYSGPPRIAFKFRHWGYMEGPFKGHPPHGQRVELFGVCIFHVDEDMKVDKSEYFYERGNFLAGFLSAPAPDGSGGCPVMRGN

SEQ ID NO: 7792 - DNA, 881 bp, Zea mays subsp. mays
  misc_feature (1)..(881): Ceres Seq. ID no. 12341797
  misc_feature: MA Experiment ID: 108543 Result: Down-regulated in Transcription
tctctctttcttccccagcaatgcaattccgcagacagacgcaggcggcaggcggcaggcggcggcgcaccgcaccgcttcttcctcttctatctctcatctacagccttcgctgcgccgccatggccaccacccgcttgctgccgctgctccgacgccgcctcgccgccgcaatcgccggatcgcctgctccctactccctccgaggaccctcatttcctgcaccagcagctgcagggctaaggtccctcctaacagttgctggagcgagcgatactgcaacagaaccccaggaccaacagcattccgaaacaactcccccgccggcttctgtcccgacaccggagtccggtctcaaagtcagggacacctccaacctgaagatctcaccaaggcatgacctcgccatgatctttacgtgcaaggtgtgcgagaccaggtccatgaagatggccagcagggactcgtacgagaacggagtcgtggtcgtgcggtgcggtggctgcaacaacctccacctcatggcggacaggcttggctggtttggggagccagggagcatcgaggacttcctagcgacgcaaggggaggaggtgaagaaaggttcgacagatactatcagctttactttggacgacttggctgggtctcaggtcagttctaaggggccttccgaacaaaattaatatgatagtgtttggtccagtaagaacctgtagaagcctctctttactataaagaagatgcgcgtgtcacctgtgtgttgaagaaaaaaacgcctctagaagcctaccttaactgttgcacctgtagttctgcttaacttcatggcttttcatgtgtagctttcgagcccatcaaatatgcgatgttgttattct

SEQ ID NO: 7793 - protein, 227 aa, Zea mays subsp. mays
  peptide (1)..(227): Ceres Seq. ID no. 12341798
  misc_feature (134)..(198): Pfam Name: DNL zinc finger Pfam Description: DNL zinc finger
  misc_feature (82)..(221): Homolog of NCBI NO: 29028810 NR Description: At3g54830 [Arabidopsis thaliana]
  misc_feature (134)..(213): Homolog of NCBI NO: 23485607 NR Description: Drosophila melanogaster CG12379 gene product
  misc_feature (127)..(200): Homolog of NCBI NO: 31212801 NR Description: ENSANGP00000021116 [Anopheles gambiae]
  misc_feature (136)..(204): Homolog of NCBI NO: 12835133 NR Description: unnamed protein product [Mus musculus]
  misc_feature (134)..(198): Homolog of NCBI NO: 24642261 NR Description: CG12379-PA [Drosophila melanogaster]
  misc_feature (134)..(203): Homolog of NCBI NO: 17553552 NR Description: Protein required for cell viability like elegans] >gi|6042159|gb|AAF02170.1|AF025460_6 Hypothetical
  misc_feature (136)..(200): Homolog of NCBI NO: 34853079 NR Description: similar to CG12379-PA [Rattus norvegicus]
  misc_feature (134)..(213): Homolog of NCBI NO: 23509418 NR Description: hypothetical protein [Plasmodium falciparum 3D7]
  misc_feature (122)..(207): Homolog of NCBI NO: 19113862 NR Description: hypothetical protein [Schizosaccharomyces pombe]
  misc_feature (39)..(183): Homolog of NCBI NO: 21912576 NR Description: hypothetical protein [Taenia solium]
SLSSPAMQFRRQTQAAGGRRRRTAPLLPLLSLIYSLRCAAMATTRLLPLLRRRLAAAIAGSPAPYSLRGPSFPAPAAAGLRSLLTVAGASDTATEPQDQQHSETTPPPASVPTPESGLKVRDTSNLKISPRHDLAMIFTCKVCETRSMKMASRDSYENGVVVVRCGGCNNLHLMADRLGWFGEPGSIEDFLATQGEEVKKGSTDTISFTLDDLAGSQVSSKGPSEQN

SEQ ID NO: 7794 - protein, 221 aa, Zea mays subsp. mays
  peptide (1)..(221): Ceres Seq. ID no. 12341799
  misc_feature (128)..(192): Pfam Name: DNL zinc finger Pfam Description: DNL zinc finger
  misc_feature (76)..(215): Homolog of NCBI NO: 29028810 NR Description: At3g54830 [Arabidopsis thaliana]
  misc_feature (128)..(207): Homolog of NCBI NO: 23485607 NR Description: Drosophila melanogaster CG12379 gene product
  misc_feature (121)..(194): Homolog of NCBI NO: 31212801 NR Description: ENSANGP00000021116 [Anopheles gambiae]
  misc_feature (130)..(198): Homolog of NCBI NO: 12835133 NR Description: unnamed protein product [Mus musculus]
  misc_feature (128)..(192): Homolog of NCBI NO: 24642261 NR Description: CG12379-PA [Drosophila melanogaster]
  misc_feature (128)..(197): Homolog of NCBI NO: 17553552 NR Description: Protein required for cell viability like elegans] >gi|6042159|gb|AAF02170.1|AF025460_6 Hypothetical
  misc_feature (130)..(194): Homolog of NCBI NO: 34853079 NR Description: similar to CG12379-PA [Rattus norvegicus]
  misc_feature (128)..(207): Homolog of NCBI NO: 23509418 NR Description: hypothetical protein [Plasmodium falciparum 3D7]
  misc_feature (116)..(201): Homolog of NCBI NO: 19113862 NR Description: hypothetical protein [Schizosaccharomyces pombe]
  misc_feature (33)..(177): Homolog of NCBI NO: 21912576 NR Description: hypothetical protein [Taenia solium]
MQFRRQTQAAGGRRRRTAPLLPLLSLIYSLRCAAMATTRLLPLLRRRLAAAIAGSPAPYSLRGPSFPAPAAAGLRSLLTVAGASDTATEPQDQQHSETTPPPASVPTPESGLKVRDTSNLKISPRHDLAMIFTCKVCETRSMKMASRDSYENGVVVVRCGGCNNLHLMADRLGWFGEPGSIEDFLATQGEEVKKGSTDTISFTLDDLAGSQVSSKGPSEQN

SEQ ID NO: 7795 - protein, 187 aa, Zea mays subsp. mays
  peptide (1)..(187): Ceres Seq. ID no. 12341800
  misc_feature (94)..(158): Pfam Name: DNL zinc finger Pfam Description: DNL zinc finger
  misc_feature (42)..(181): Homolog of NCBI NO: 29028810 NR Description: At3g54830 [Arabidopsis thaliana]
  misc_feature (94)..(173): Homolog of NCBI NO: 23485607 NR Description: Drosophila melanogaster CG12379 gene product
  misc_feature (87)..(160): Homolog of NCBI NO: 31212801 NR Description: ENSANGP00000021116 [Anopheles gambiae]
  misc_feature (96)..(164): Homolog of NCBI NO: 12835133 NR Description: unnamed protein product [Mus musculus]
  misc_feature (94)..(158): Homolog of NCBI NO: 24642261 NR Description: CG12379-PA [Drosophila melanogaster]
  misc_feature (94)..(163): Homolog of NCBI NO: 17553552 NR Description: Protein required for cell viability like elegans] >gi|6042159|gb|AAF02170.1|AF025460_6 Hypothetical
  misc_feature (96)..(160): Homolog of NCBI NO: 34853079 NR Description: similar to CG12379-PA [Rattus norvegicus]
  misc_feature (94)..(173): Homolog of NCBI NO: 23509418 NR Description: hypothetical protein [Plasmodium falciparum 3D7]
  misc_feature (82)..(167): Homolog of NCBI NO: 19113862 NR Description: hypothetical protein [Schizosaccharomyces pombe]
  misc_feature (1)..(143): Homolog of NCBI NO: 21912576 NR Description: hypothetical protein [Taenia solium]
MATTRLLPLLRRRLAAAIAGSPAPYSLRGPSFPAPAAAGLRSLLTVAGASDTATEPQDQQHSETTPPPASVPTPESGLKVRDTSNLKISPRHDLAMIFTCKVCETRSMKMASRDSYENGVVVVRCGGCNNLHLMADRLGWFGEPGSIEDFLATQGEEVKKGSTDTISFTLDDLAGSQVSSKGPSEQN

SEQ ID NO: 7796 - DNA, 1207 bp, Zea mays subsp. mays
  misc_feature (1)..(1207): Ceres Seq. ID no. 13492697
  misc_feature: MA Experiment ID: 108529 Result: Up-regulated in Transcription
  misc_feature: MA Experiment 108529 PARAMETER Experiment Name: Zm_Imbibed_Seeds_P Parameter: Age (day) Value: 5 vs. 2
  misc_feature: MA Experiment 108529 PARAMETER Experiment Name: Zm_Imbibed_Seeds_P Parameter: Organism Value: Zea mays
  misc_feature: MA Experiment 108529 PARAMETER Experiment Name: Zm_Imbibed_Seeds_P Parameter: Plant Line Value: 35A19
  misc_feature: MA Experiment 108529 PARAMETER Experiment Name: Zm_Imbibed_Seeds_P Parameter: Tissue Value: Roots vs. Embryo
  misc_feature: MA Experiment ID: 108530 Result: Up-regulated in Transcription
  misc_feature: MA Experiment 108530 PARAMETER Experiment Name: Zm_Imbibed_Seeds_P Parameter: Age (day) Value: 6 vs. 2
  misc_feature: MA Experiment 108530 PARAMETER Experiment Name: Zm_Imbibed_Seeds_P Parameter: Organism Value: Zea mays
  misc_feature: MA Experiment 108530 PARAMETER Experiment Name: Zm_Imbibed_Seeds_P Parameter: Plant Line Value: 35A19
  misc_feature: MA Experiment 108530 PARAMETER Experiment Name: Zm_Imbibed_Seeds_P Parameter: Tissue Value: Aerial vs. Embryo
  misc_feature: MA Experiment ID: 108535 Result: Down-regulated in Transcription
  misc_feature: MA Experiment 108535 PARAMETER Experiment Name: Zm_Meristem_P Parameter: Age (day) Value: 8
  misc_feature: MA Experiment 108535 PARAMETER Experiment Name: Zm_Meristem_P Parameter: Organism Value: Zea mays
  misc_feature: MA Experiment 108535 PARAMETER Experiment Name: Zm_Meristem_P Parameter: Plant Line Value: 35A19
  misc_feature: MA Experiment 108535 PARAMETER Experiment Name: Zm_Meristem_P Parameter: Tissue Value: Root Meristem vs. Above Root Meristem
  misc_feature: MA Experiment ID: 108559 Result: Down-regulated in Transcription
  misc_feature: MA Experiment 108559 PARAMETER Experiment Name: Zm_5mM_NO_P Parameter: Age (day) Value: 8
  misc_feature: MA Experiment 108559 PARAMETER Experiment Name: Zm_5mM_NO_P Parameter: Organism Value: Zea mays
  misc_feature: MA Experiment 108559 PARAMETER Experiment Name: Zm_5mM_NO_P Parameter: Plant Line Value: 35A19
  misc_feature: MA Experiment 108559 PARAMETER Experiment Name: Zm_5mM_NO_P Parameter: Timepoint (hr) Value: 12
  misc_feature: MA Experiment 108559 PARAMETER Experiment Name: Zm_5mM_NO_P Parameter: Tissue Value: Aerial
  misc_feature: MA Experiment 108559 PARAMETER Experiment Name: Zm_5mM_NO_P Parameter: Treatment Value: 5mM NO vs. No Treatment
  misc_feature: MA Experiment ID: 108687 Result: Up-regulated in Transcription
  misc_feature: MA Experiment 108687 PARAMETER Experiment Name: Zm_Embryos-Flowers__P Parameter: Tissue Value: Embryo vs. Aerial+
aaccatttggacaccgatccatccatccatccagccccgtacgtgtctcgctggccgtccgtatatatagagagaggcatcggagattggccgccacgttgccatcgcgcgcggcgcccgccggccaaggccaaccatgctggcgagggctcctccgccgcggcccgtgctccagcggcgtttgcatcgcccgcgcacatccaagagccgccgccgtcgcggccaggccggggacgacgaggacgacgacgacggtcgcggcggcggcggcagaggccgcttctaacgggtcagcggcggcggccgtcgcagggatcagcagcagcagcagcgcgctggtgacctcgaccgtcgggaaatcgacgaacatcctgtggcatgagtgcgccatcgggcagaaggagcgacagggtctgctgaaccagaagggctgcgtcgtgtggatcactggcctaagcggttcagggaaaagcacgctcgcgtgcgcgctgagccgcgagctgcacggcagaggccacctcacgtacgtcctcgacggcgacaacctcaggcacgggctgaacagggacctcagcttcggagcagaggaccgcgccgagaacatccgcagagtaggggaagtagcgaagctgttcgccgacgctggcctcgtctgcatcgccagcctcatatcgccctacagaagcgaccgaagcgcgtgtcgcgatctgctgcccaagcactcgtttatcgaggtgttcctggacgtgccgcttcaagtgtgcgaagccagggaccccaaaggcctctacaagctcgcacgcgccggcaaaatcaaagggttcaccggcatcgacgatccttacgaaccgccgtcggactgtgagatagtgatccagtgtaaagtcggcgactgcccttcgcctgaatcgatggctggtcacgttgtgtcgtaccttgagacgaatggtttcctccaggactagacatggaatgcgatcgatgcgtctgatgtgtatatatgtagcagcagccggagcggcattgccaaggctgtgtaatctcatggctgtctttctctttaagaccaaaacaaacaagagatggcagtgtaaaaaggaaaaaaaaaactgcgtctgacagagtcgctgaatcaaccatgcttctgataaaagctattgtttgtaggtacggcgttgattcttacgacatttatgacaatgctttc

SEQ ID NO: 7797 - protein, 320 aa, Zea mays subsp. mays
  peptide (1)..(320): Ceres Seq. ID no. 13492698
  misc_feature (142)..(296): Pfam Name: Adenylylsulphate kinase Pfam Description: Adenylylsulphate kinase
  misc_feature (142)..(296): Pfam Name: Adenylylsulphate kinase Pfam Description: Adenylylsulphate kinase
  misc_feature (115)..(320): Homolog of NCBI NO: 15228666 NR Description: adenylylsulfate kinase -related [Arabidopsis >gi|6006852|gb|AAF00628.1|AC009540_5 putative adenylylsulfate
  misc_feature (64)..(320): Homolog of NCBI NO: 34393551 NR Description: putative adenosine-5'-phosphosulfate kinase
  misc_feature (112)..(319): Homolog of NCBI NO: 7387809 NR Description: Adenylylsulfate kinase, chloroplast precursor
  misc_feature (115)..(319): Homolog of NCBI NO: 15225999 NR Description: adenosine phosphosulfate kinase -related thaliana] >gi|7387811|sp|Q43295|KAP1_ARATH Adenylylsulfate kinase
  misc_feature (115)..(319): Homolog of NCBI NO: 21553403 NR Description: putative adenosine phosphosulfate kinase
  misc_feature (64)..(320): Homolog of NCBI NO: 34393551 NR Description: putative adenosine-5'-phosphosulfate kinase
  misc_feature (115)..(319): Homolog of NCBI NO: 15225999 NR Description: adenosine phosphosulfate kinase -related thaliana] >gi|7387811|sp|Q43295|KAP1_ARATH Adenylylsulfate kinase
  misc_feature (119)..(319): Homolog of NCBI NO: 15236087 NR Description: adenosine-5-phosphosulfate-kinase [Arabidopsis >gi|7387808|sp|O49196|KAP2_ARATH Adenylylsulfate kinase 2,
  misc_feature (107)..(319): Homolog of NCBI NO: 21537248 NR Description: adenylylsulfate kinase-like protein [Arabidopsis
  misc_feature (107)..(319): Homolog of NCBI NO: 18425199 NR Description: adenylylsulfate kinase-related protein thaliana] >gi|28393175|gb|AAO42019.1| putative adenylylsulfate [Arabidopsis thaliana] >gi|28827764|gb|AAO50726.1| putative
  misc_feature (107)..(319): Homolog of NCBI NO: 9757873 NR Description: adenylylsulfate kinase-like protein [Arabidopsis
  misc_feature (103)..(320): Homolog of NCBI NO: 6563285 NR Description: adenosine-5'-phosphosulfate kinase [Zea mays]
  misc_feature (115)..(319): Homolog of NCBI NO: 21553403 NR Description: putative adenosine phosphosulfate kinase
  misc_feature (112)..(319): Homolog of NCBI NO: 7387809 NR Description: Adenylylsulfate kinase, chloroplast precursor
  misc_feature (115)..(320): Homolog of NCBI NO: 15228666 NR Description: adenylylsulfate kinase -related [Arabidopsis >gi|6006852|gb|AAF00628.1|AC009540_5 putative adenylylsulfate
  misc_feature (103)..(320): Homolog of NCBI NO: 6563285 NR Description: adenosine-5'-phosphosulfate kinase [Zea mays]
  misc_feature (107)..(319): Homolog of NCBI NO: 9757873 NR Description: adenylylsulfate kinase-like protein [Arabidopsis
  misc_feature (107)..(319): Homolog of NCBI NO: 18425199 NR Description: adenylylsulfate kinase-related protein thaliana] >gi|28393175|gb|AAO42019.1| putative adenylylsulfate [Arabidopsis thaliana] >gi|28827764|gb|AAO50726.1| putative
  misc_feature (107)..(319): Homolog of NCBI NO: 21537248 NR Description: adenylylsulfate kinase-like protein [Arabidopsis
  misc_feature (119)..(319): Homolog of NCBI NO: 15236087 NR Description: adenosine-5-phosphosulfate-kinase [Arabidopsis >gi|7387808|sp|O49196|KAP2_ARATH Adenylylsulfate kinase 2,
PFGHRSIHPSSPVRVSLAVRIYRERHRRLAATLPSRAAPAGQGQPCWRGLLRRGPCSSGVCIARAHPRAAAVAARPGTTRTTTTVAAAAAEAASNGSAAAAVAGISSSSSALVTSTVGKSTNILWHECAIGQKERQGLLNQKGCVVWITGLSGSGKSTLACALSRELHGRGHLTYVLDGDNLRHGLNRDLSFGAEDRAENIRRVGEVAKLFADAGLVCIASLISPYRSDRSACRDLLPKHSFIEVFLDVPLQVCEARDPKGLYKLARAGKIKGFTGIDDPYEPPSDCEIVIQCKVGDCPSPESMAGHVVSYLETNGFLQD

SEQ ID NO: 7798 - DNA, 1047 bp, Zea mays subsp. mays
  misc_feature (1)..(1047): Ceres Seq. ID no. 12343255
  misc_feature: MA Experiment ID: 108535 Result: Down-regulated in Transcription
  misc_feature: MA Experiment 108535 PARAMETER Experiment Name: Zm_Meristem_P Parameter: Age (day) Value: 8
  misc_feature: MA Experiment 108535 PARAMETER Experiment Name: Zm_Meristem_P Parameter: Organism Value: Zea mays
  misc_feature: MA Experiment 108535 PARAMETER Experiment Name: Zm_Meristem_P Parameter: Plant Line Value: 35A19
  misc_feature: MA Experiment 108535 PARAMETER Experiment Name: Zm_Meristem_P Parameter: Tissue Value: Root Meristem vs. Above Root Meristem
ctaatcgaaaaaccctatgttcatgccaccatggaagggcttcgtattggagcaccgattatgcaggtttatcatgagaaatcttttatcttacctgatgtttcaagggtgcttgcttgcctttatgagaaggatgtcaagtttgagactcacacagcctcatacaggagcctactcggattgcaggcatcatctcatgctccagttccattctatgaaggccctacttttctagaagaatccagagaaatctgccgttatatagcagaaaagtatgaaaatcaaggatatccgttcctccttggaaaggatgcccttgagagggcttcaattgaacaatggctccacaacgaggagcatgctttcaaccctccgagccgggccttgttctttcatttggcctttcccctgggtgaaggagaagatgatgatattgatgttcatacaaggaagctagaagaggttctggaagtttatgagcaaaggctcagtgacagcgaattccttgttggaaacaagttcactcttgccgaccttgttcacctgccaaattcccactatatcaaagcatctaacaagtttctttacctttatgattcgaggaaaaatgtaaggaggtggtgggatgctatttctgaccggagttcttggaagaaagtgctgaggtatatgaagagcgtggaggagaagaacaaacaagaagaactcaagaagcagcagcagcagcaggaagaggctcctagaacctccaccgacccaactcgggtagactcgagaaagcagagcagaacagagcctcggacaatattggttcctcctgctgataacgagtcatcagcttcgatagttcctcgaacaaagaagcctcttcctggtgatcacttagtgtctactcaacaaattgatggtgttggtatgccagccacaaattgatggtgatggtcgtcttagtggtgtttgtcttgtcttttattgtttggttctttaacaagagttatatttttaccttctgaccaaagagttgtttaacaggatagtcattgtacg

SEQ ID NO: 7799 - protein, 310 aa, Zea mays subsp. mays
  peptide (1)..(310): Ceres Seq. ID no. 12343256
  misc_feature (11)..(310): Homolog of NCBI NO: 11385483 NR Description: glutathione S-transferase GST 16 [Zea mays]
  misc_feature (11)..(295): Homolog of NCBI NO: 32490475 NR Description: putative protein kinase [Oryza sativa (japonica
  misc_feature (33)..(135): Homolog of NCBI NO: 37536564 NR Description: putative glutathione S-transferase [Oryza sativa
  misc_feature (149)..(220): Homolog of NCBI NO: 37536564 NR Description: putative glutathione S-transferase [Oryza sativa
  misc_feature (33)..(161): Homolog of NCBI NO: 11385479 NR Description: glutathione S-transferase GST 14 [Zea mays]
  misc_feature (150)..(220): Homolog of NCBI NO: 11385479 NR Description: glutathione S-transferase GST 14 [Zea mays]
  misc_feature (33)..(225): Homolog of NCBI NO: 11385469 NR Description: glutathione S-transferase GST 9 [Zea mays]
  misc_feature (150)..(276): Homolog of NCBI NO: 22758271 NR Description: Putative glutathione S-transferase [Oryza sativa
  misc_feature (33)..(135): Homolog of NCBI NO: 22758271 NR Description: Putative glutathione S-transferase [Oryza sativa
  misc_feature (33)..(225): Homolog of NCBI NO: 11385475 NR Description: glutathione S-transferase GST 12 [Zea mays]
LIEKPYVHATMEGLRIGAPIMQVYHEKSFILPDVSRVLACLYEKDVKFETHTASYRSLLGLQASSHAPVPFYEGPTFLEESREICRYIAEKYENQGYPFLLGKDALERASIEQWLHNEEHAFNPPSRALFFHLAFPLGEGEDDDIDVHTRKLEEVLEVYEQRLSDSEFLVGNKFTLADLVHLPNSHYIKASNKFLYLYDSRKNVRRWWDAISDRSSWKKVLRYMKSVEEKNKQEELKKQQQQQEEAPRTSTDPTRVDSRKQSRTEPRTILVPPADNESSASIVPRTKKPLPGDHLVSTQQIDGVGMPATN

SEQ ID NO: 7800 - protein, 300 aa, Zea mays subsp. mays
  peptide (1)..(300): Ceres Seq. ID no. 12343257
  misc_feature (1)..(300): Homolog of NCBI NO: 11385483 NR Description: glutathione S-transferase GST 16 [Zea mays]
  misc_feature (1)..(285): Homolog of NCBI NO: 32490475 NR Description: putative protein kinase [Oryza sativa (japonica
  misc_feature (23)..(125): Homolog of NCBI NO: 37536564 NR Description: putative glutathione S-transferase [Oryza sativa
  misc_feature (139)..(210): Homolog of NCBI NO: 37536564 NR Description: putative glutathione S-transferase [Oryza sativa
  misc_feature (23)..(151): Homolog of NCBI NO: 11385479 NR Description: glutathione S-transferase GST 14 [Zea mays]
  misc_feature (140)..(210): Homolog of NCBI NO: 11385479 NR Description: glutathione S-transferase GST 14 [Zea mays]
  misc_feature (23)..(215): Homolog of NCBI NO: 11385469 NR Description: glutathione S-transferase GST 9 [Zea mays]
  misc_feature (140)..(266): Homolog of NCBI NO: 22758271 NR Description: Putative glutathione S-transferase [Oryza sativa
  misc_feature (23)..(125): Homolog of NCBI NO: 22758271 NR Description: Putative glutathione S-transferase [Oryza sativa
  misc_feature (23)..(215): Homolog of NCBI NO: 11385475 NR Description: glutathione S-transferase GST 12 [Zea mays]
MEGLRIGAPIMQVYHEKSFILPDVSRVLACLYEKDVKFETHTASYRSLLGLQASSHAPVPFYEGPTFLEESREICRYIAEKYENQGYPFLLGKDALERASIEQWLHNEEHAFNPPSRALFFHLAFPLGEGEDDDIDVHTRKLEEVLEVYEQRLSDSEFLVGNKFTLADLVHLPNSHYIKASNKFLYLYDSRKNVRRWWDAISDRSSWKKVLRYMKSVEEKNKQEELKKQQQQQEEAPRTSTDPTRVDSRKQSRTEPRTILVPPADNESSASIVPRTKKPLPGDHLVSTQQIDGVGMPATN

SEQ ID NO: 7801 - protein, 290 aa, Zea mays subsp. mays
  peptide (1)..(290): Ceres Seq. ID no. 12343258
  misc_feature (1)..(290): Homolog of NCBI NO: 11385483 NR Description: glutathione S-transferase GST 16 [Zea mays]
  misc_feature (1)..(275): Homolog of NCBI NO: 32490475 NR Description: putative protein kinase [Oryza sativa (japonica
  misc_feature (13)..(115): Homolog of NCBI NO: 37536564 NR Description: putative glutathione S-transferase [Oryza sativa
  misc_feature (129)..(200): Homolog of NCBI NO: 37536564 NR Description: putative glutathione S-transferase [Oryza sativa
  misc_feature (13)..(141): Homolog of NCBI NO: 11385479 NR Description: glutathione S-transferase GST 14 [Zea mays]
  misc_feature (130)..(200): Homolog of NCBI NO: 11385479 NR Description: glutathione S-transferase GST 14 [Zea mays]
  misc_feature (13)..(205): Homolog of NCBI NO: 11385469 NR Description: glutathione S-transferase GST 9 [Zea mays]
  misc_feature (130)..(256): Homolog of NCBI NO: 22758271 NR Description: Putative glutathione S-transferase [Oryza sativa
  misc_feature (13)..(115): Homolog of NCBI NO: 22758271 NR Description: Putative glutathione S-transferase [Oryza sativa
  misc_feature (13)..(205): Homolog of NCBI NO: 11385475 NR Description: glutathione S-transferase GST 12 [Zea mays]
MQVYHEKSFILPDVSRVLACLYEKDVKFETHTASYRSLLGLQASSHAPVPFYEGPTFLEESREICRYIAEKYENQGYPFLLGKDALERASIEQWLHNEEHAFNPPSRALFFHLAFPLGEGEDDDIDVHTRKLEEVLEVYEQRLSDSEFLVGNKFTLADLVHLPNSHYIKASNKFLYLYDSRKNVRRWWDAISDRSSWKKVLRYMKSVEEKNKQEELKKQQQQQEEAPRTSTDPTRVDSRKQSRTEPRTILVPPADNESSASIVPRTKKPLPGDHLVSTQQIDGVGMPATN

SEQ ID NO: 7802 - DNA, 1738 bp, Zea mays subsp. mays
  misc_feature (1)..(1738): Ceres Seq. ID no. 12413950
  misc_feature: MA Experiment ID: 108529 Result: Down-regulated in Transcription
  misc_feature: MA Experiment 108529 PARAMETER Experiment Name: Zm_Imbibed_Seeds_P Parameter: Age (day) Value: 5 vs. 2
  misc_feature: MA Experiment 108529 PARAMETER Experiment Name: Zm_Imbibed_Seeds_P Parameter: Organism Value: Zea mays
  misc_feature: MA Experiment 108529 PARAMETER Experiment Name: Zm_Imbibed_Seeds_P Parameter: Plant Line Value: 35A19
  misc_feature: MA Experiment 108529 PARAMETER Experiment Name: Zm_Imbibed_Seeds_P Parameter: Tissue Value: Roots vs. Embryo
  misc_feature: MA Experiment ID: 108530 Result: Down-regulated in Transcription
  misc_feature: MA Experiment 108530 PARAMETER Experiment Name: Zm_Imbibed_Seeds_P Parameter: Age (day) Value: 6 vs. 2
  misc_feature: MA Experiment 108530 PARAMETER Experiment Name: Zm_Imbibed_Seeds_P Parameter: Organism Value: Zea mays
  misc_feature: MA Experiment 108530 PARAMETER Experiment Name: Zm_Imbibed_Seeds_P Parameter: Plant Line Value: 35A19
  misc_feature: MA Experiment 108530 PARAMETER Experiment Name: Zm_Imbibed_Seeds_P Parameter: Tissue Value: Aerial vs. Embryo
  misc_feature: MA Experiment ID: 108535 Result: Up-regulated in Transcription
  misc_feature: MA Experiment 108535 PARAMETER Experiment Name: Zm_Meristem_P Parameter: Age (day) Value: 8
  misc_feature: MA Experiment 108535 PARAMETER Experiment Name: Zm_Meristem_P Parameter: Organism Value: Zea mays
  misc_feature: MA Experiment 108535 PARAMETER Experiment Name: Zm_Meristem_P Parameter: Plant Line Value: 35A19
  misc_feature: MA Experiment 108535 PARAMETER Experiment Name: Zm_Meristem_P Parameter: Tissue Value: Root Meristem vs. Above Root Meristem
  misc_feature: MA Experiment ID: 108544 Result: Down-regulated in Transcription
  misc_feature: MA Experiment ID: 20000487 Result: Up-regulated in Transcription
  misc_feature: MA Experiment 20000487 PARAMETER Experiment Name: Zm_50mM_NH4NO3_L_to_H_P Parameter: Organism Value: Zea mays
  misc_feature: MA Experiment 20000487 PARAMETER Experiment Name: Zm_50mM_NH4NO3_L_to_H_P Parameter: Timepoint (hr) Value: 4
  misc_feature: MA Experiment 20000487 PARAMETER Experiment Name: Zm_50mM_NH4NO3_L_to_H_P Parameter: Tissue Value: Leaves
  misc_feature: MA Experiment 20000487 PARAMETER Experiment Name: Zm_50mM_NH4NO3_L_to_H_P Parameter: Treatment Value: 50mM NH4NO3 vs. 100mM Mannitol
  misc_feature: MA Experiment ID: 20000488 Result: Up-regulated in Transcription
  misc_feature: MA Experiment 20000488 PARAMETER Experiment Name: Zm_50mM_NH4NO3_L_to_H_P Parameter: Organism Value: Zea mays
  misc_feature: MA Experiment 20000488 PARAMETER Experiment Name: Zm_50mM_NH4NO3_L_to_H_P Parameter: Timepoint (hr) Value: 8
  misc_feature: MA Experiment 20000488 PARAMETER Experiment Name: Zm_50mM_NH4NO3_L_to_H_P Parameter: Tissue Value: Leaves
  misc_feature: MA Experiment 20000488 PARAMETER Experiment Name: Zm_50mM_NH4NO3_L_to_H_P Parameter: Treatment Value: 50mM NH4NO3 vs. 100mM Mannitol
  misc_feature: MA Experiment ID: 20000492 Result: Up-regulated in Transcription
  misc_feature: MA Experiment 20000492 PARAMETER Experiment Name: Zm_Hybrid_Seed_Dev_P Parameter: DAP Value: 12
  misc_feature: MA Experiment 20000492 PARAMETER Experiment Name: Zm_Hybrid_Seed_Dev_P Parameter: Organism Value: Zea mays
  misc_feature: MA Experiment 20000492 PARAMETER Experiment Name: Zm_Hybrid_Seed_Dev_P Parameter: Plant Line Value: 35A19
  misc_feature: MA Experiment 20000492 PARAMETER Experiment Name: Zm_Hybrid_Seed_Dev_P Parameter: Tissue Value: Fert Kernel vs. Unfert Floret
  misc_feature: MA Experiment ID: 20000626 Result: Up-regulated in Transcription
  misc_feature: MA Experiment 20000626 PARAMETER Experiment Name: Zm_Herbicide-Treatments_P Parameter: Timepoint (hr) Value: 12
  misc_feature: MA Experiment 20000626 PARAMETER Experiment Name: Zm_Herbicide-Treatments_P Parameter: Tissue Value: Aerial
  misc_feature: MA Experiment 20000626 PARAMETER Experiment Name: Zm_Herbicide-Treatments_P Parameter: Treatment Value: Roundup vs. No Treatment
gcacgagaccattacctagaacatcctaatcgaaaaaaacccctcacactcccatccagccgccaccaggtgcagagtctttcgtcatctcttctccggcgaagaacccccagtcgcccaccagatcacttgttaaactttgttgaggggtgatggcggtttctttcgcaaacctcaactccgaggcagggcttaaaaagcttgatgagtaccttctcactcgcagctacatcactggctaccaagcttccaaggatgaggaggaaatgggtgacaaggaggaagaagcggagctggatgggagaggagggaatggtgtggaggatgaattcctgaaaatagatgaattgacggagttcctggagaagggtgaagaagaggagtatggtgatggagccaaacggagagagaagtcagtgaaaaactggatggttgagagtgacaatgaggatgaagatgaggatcaattggatttagaagattttgaggatgatgacgaggatggtgaagcaggcggtggagatattctgtataaagatttttttgagagtggacacaacaagcaagctaagaagagagatggttccacaaagaaagttcaattcaaggatgaagcacatgaagttgaactccatgacagtgagaatgatgatggaaatgatgaacaagaacatggtctctcaactcacgaaaaggagcgtctgaagatgcgtactaaaatagagcaaatggagaaagctaatcttgaacccagcacgtggaccatgcagggagaggttactgcttctaggaggcccaaaaacagtgccctagaagtggaccttgattttgagcacaatgtaagacctgcccctgtaataaccgaggaagtgacagcttcccttgaagaaatgataaagaaaagaatcgcagagagtcattttgatgatgttgagaagccgtctctcttgccatctaaagctccaaaggagcacaaggaactggatgaaactaagagcaagaagggtcttgctgaactgtatgaggatgactatgcacaaaaagcaggcattgcacctgccccactttctatttcagatgaactaaaggaagaggcaaatactttatttaagaggatatgtttgaaattggatgcgctatcgcatttccactttgctccaaagccagtcattgaggatatgtctgtgcaagcaaatgtgcctgctttagccatggaagagattgcacctgtagctgtttcggatgctgcaatgcttgcccctgaagagatctttgaaggaaaaggtgatgttaaggaagagggggaacttacacaggctgagcgcaagagaagaagagctaacaagaaaaggagatatgcagcatcccataaggagaggacagcgccagccaagttgcagaaagattaaactcaatgtttttttctcactagtttctaaatggtacaagagcgataaactggcaatacatattttccaaattttgtattgtaccctctgctagtagcttttacatgaacagtaaaatgtggccatttatatttctacagaagcacacaagttcgagagttttgatttgctgaagtgcaattttgagagtgcaaaaaaagacttgtctgttgaaccctaggtatcggtagaaacatcatcctacgacctaaccgacctaaccgatggttatggttatgagtataattttctttccagctattgcaattgaagtcggtcatattcaatct

SEQ ID NO: 7803 - protein, 418 aa, Zea mays subsp. mays
  peptide (1)..(418): Ceres Seq. ID no. 12413951
  misc_feature (31)..(404): Pfam Name: Mpp10 protein Pfam Description: Mpp10 protein
  misc_feature (31)..(404): Homolog of NCBI NO: 18425086 NR Description: expressed protein; protein id: At5g66540.1, by cDNA: gi_14488062 [Arabidopsis thaliana] gene_id:K1F13.21~unknown protein [Arabidopsis thaliana]
  misc_feature (38)..(415): Homolog of NCBI NO: 29351667 NR Description: similar to U3 small nucleolar ribonucleoprotein
  misc_feature (38)..(415): Homolog of NCBI NO: 34856326 NR Description: similar to U3 small nucleolar ribonucleoprotein
  misc_feature (41)..(415): Homolog of NCBI NO: 2230873 NR Description: M phase phosphoprotein 10 [Homo sapiens]
  misc_feature (26)..(418): Homolog of NCBI NO: 28175284 NR Description: Unknown (protein for IMAGE:5543289) [Xenopus
  misc_feature (95)..(405): Homolog of NCBI NO: 6322461 NR Description: part of small (ribosomal) subunit (SSU) (contains U3 snoRNA); Mpp10p [Saccharomyces cerevisiae] U3 small nucleolar ribonucleoprotein protein MPP10
  misc_feature (14)..(409): Homolog of NCBI NO: 19920954 NR Description: CG13097-PA [Drosophila melanogaster]
  misc_feature (5)..(409): Homolog of NCBI NO: 19114546 NR Description: putative component of the U3 small nucleolar [Schizosaccharomyces pombe] >gi|3183346|sp|O13910|YDW3_SCHPO protein C23C11.03 in chromosome I >gi|7493124|pir||T38241
  misc_feature (193)..(415): Homolog of NCBI NO: 21312690 NR Description: RIKEN cDNA 2810453H10 [Mus musculus]
  misc_feature (13)..(390): Homolog of NCBI NO: 40740848 NR Description: hypothetical protein AN4298.2 [Aspergillus
MAVSFANLNSEAGLKKLDEYLLTRSYITGYQASKDEEEMGDKEEEAELDGRGGNGVEDEFLKIDELTEFLEKGEEEEYGDGAKRREKSVKNWMVESDNEDEDEDQLDLEDFEDDDEDGEAGGGDILYKDFFESGHNKQAKKRDGSTKKVQFKDEAHEVELHDSENDDGNDEQEHGLSTHEKERLKMRTKIEQMEKANLEPSTWTMQGEVTASRRPKNSALEVDLDFEHNVRPAPVITEEVTASLEEMIKKRIAESHFDDVEKPSLLPSKAPKEHKELDETKSKKGLAELYEDDYAQKAGIAPAPLSISDELKEEANTLFKRICLKLDALSHFHFAPKPVIEDMSVQANVPALAMEEIAPVAVSDAAMLAPEEIFEGKGDVKEEGELTQAERKRRRANKKRRYAASHKERTAPAKLQKD

SEQ ID NO: 7804 - protein, 380 aa, Zea mays subsp. mays
  peptide (1)..(380): Ceres Seq. ID no. 12413952
  misc_feature (1)..(366): Pfam Name: Mpp10 protein Pfam Description: Mpp10 protein
  misc_feature (1)..(366): Homolog of NCBI NO: 18425086 NR Description: expressed protein; protein id: At5g66540.1, by cDNA: gi_14488062 [Arabidopsis thaliana] gene_id:K1F13.21~unknown protein [Arabidopsis thaliana]
  misc_feature (1)..(377): Homolog of NCBI NO: 29351667 NR Description: similar to U3 small nucleolar ribonucleoprotein
  misc_feature (1)..(377): Homolog of NCBI NO: 34856326 NR Description: similar to U3 small nucleolar ribonucleoprotein
  misc_feature (3)..(377): Homolog of NCBI NO: 2230873 NR Description: M phase phosphoprotein 10 [Homo sapiens]
  misc_feature (1)..(380): Homolog of NCBI NO: 28175284 NR Description: Unknown (protein for IMAGE:5543289) [Xenopus
  misc_feature (57)..(367): Homolog of NCBI NO: 6322461 NR Description: part of small (ribosomal) subunit (SSU) (contains U3 snoRNA); Mpp10p [Saccharomyces cerevisiae] U3 small nucleolar ribonucleoprotein protein MPP10
  misc_feature (1)..(371): Homolog of NCBI NO: 19920954 NR Description: CG13097-PA [Drosophila melanogaster]
  misc_feature (1)..(371): Homolog of NCBI NO: 19114546 NR Description: putative component of the U3 small nucleolar [Schizosaccharomyces pombe] >gi|3183346|sp|O13910|YDW3_SCHPO protein C23C11.03 in chromosome I >gi|7493124|pir||T38241
  misc_feature (155)..(377): Homolog of NCBI NO: 21312690 NR Description: RIKEN cDNA 2810453H10 [Mus musculus]
  misc_feature (1)..(352): Homolog of NCBI NO: 40740848 NR Description: hypothetical protein AN4298.2 [Aspergillus
MGDKEEEAELDGRGGNGVEDEFLKIDELTEFLEKGEEEEYGDGAKRREKSVKNWMVESDNEDEDEDQLDLEDFEDDDEDGEAGGGDILYKDFFESGHNKQAKKRDGSTKKVQFKDEAHEVELHDSENDDGNDEQEHGLSTHEKERLKMRTKIEQMEKANLEPSTWTMQGEVTASRRPKNSALEVDLDFEHNVRPAPVITEEVTASLEEMIKKRIAESHFDDVEKPSLLPSKAPKEHKELDETKSKKGLAELYEDDYAQKAGIAPAPLSISDELKEEANTLFKRICLKLDALSHFHFAPKPVIEDMSVQANVPALAMEEIAPVAVSDAAMLAPEEIFEGKGDVKEEGELTQAERKRRRANKKRRYAASHKERTAPAKLQKD

SEQ ID NO: 7805 - protein, 326 aa, Zea mays subsp. mays
  peptide (1)..(326): Ceres Seq. ID no. 12413953
  misc_feature (1)..(312): Pfam Name: Mpp10 protein Pfam Description: Mpp10 protein
  misc_feature (101)..(323): Homolog of NCBI NO: 21312690 NR Description: RIKEN cDNA 2810453H10 [Mus musculus]
  misc_feature (1)..(312): Homolog of NCBI NO: 18425086 NR Description: expressed protein; protein id: At5g66540.1, by cDNA: gi_14488062 [Arabidopsis thaliana] gene_id:K1F13.21~unknown protein [Arabidopsis thaliana]
  misc_feature (1)..(323): Homolog of NCBI NO: 34856326 NR Description: similar to U3 small nucleolar ribonucleoprotein
  misc_feature (1)..(326): Homolog of NCBI NO: 28175284 NR Description: Unknown (protein for IMAGE:5543289) [Xenopus
  misc_feature (1)..(317): Homolog of NCBI NO: 19920954 NR Description: CG13097-PA [Drosophila melanogaster]
  misc_feature (1)..(317): Homolog of NCBI NO: 19114546 NR Description: putative component of the U3 small nucleolar [Schizosaccharomyces pombe] >gi|3183346|sp|O13910|YDW3_SCHPO protein C23C11.03 in chromosome I >gi|7493124|pir||T38241
  misc_feature (3)..(313): Homolog of NCBI NO: 6322461 NR Description: part of small (ribosomal) subunit (SSU) (contains U3 snoRNA); Mpp10p [Saccharomyces cerevisiae] U3 small nucleolar ribonucleoprotein protein MPP10
  misc_feature (1)..(323): Homolog of NCBI NO: 2230873 NR Description: M phase phosphoprotein 10 [Homo sapiens]
  misc_feature (1)..(323): Homolog of NCBI NO: 29351667 NR Description: similar to U3 small nucleolar ribonucleoprotein
  misc_feature (1)..(298): Homolog of NCBI NO: 40740848 NR Description: hypothetical protein AN4298.2 [Aspergillus
MVESDNEDEDEDQLDLEDFEDDDEDGEAGGGDILYKDFFESGHNKQAKKRDGSTKKVQFKDEAHEVELHDSENDDGNDEQEHGLSTHEKERLKMRTKIEQMEKANLEPSTWTMQGEVTASRRPKNSALEVDLDFEHNVRPAPVITEEVTASLEEMIKKRIAESHFDDVEKPSLLPSKAPKEHKELDETKSKKGLAELYEDDYAQKAGIAPAPLSISDELKEEANTLFKRICLKLDALSHFHFAPKPVIEDMSVQANVPALAMEEIAPVAVSDAAMLAPEEIFEGKGDVKEEGELTQAERKRRRANKKRRYAASHKERTAPAKLQKD

SEQ ID NO: 7806 - DNA, 1443 bp, Zea mays subsp. mays
  misc_feature (1)..(1443): Ceres Seq. ID no. 12373180
  misc_feature: MA Experiment ID: 108527 Result: Down-regulated in Transcription
  misc_feature: MA Experiment 108527 PARAMETER Experiment Name: Zm_5mM_NO_P Parameter: Age (day) Value: 8
  misc_feature: MA Experiment 108527 PARAMETER Experiment Name: Zm_5mM_NO_P Parameter: Organism Value: Zea mays
  misc_feature: MA Experiment 108527 PARAMETER Experiment Name: Zm_5mM_NO_P Parameter: Plant Line Value: 35A19
  misc_feature: MA Experiment 108527 PARAMETER Experiment Name: Zm_5mM_NO_P Parameter: Timepoint (hr) Value: 6
  misc_feature: MA Experiment 108527 PARAMETER Experiment Name: Zm_5mM_NO_P Parameter: Tissue Value: Aerial
  misc_feature: MA Experiment 108527 PARAMETER Experiment Name: Zm_5mM_NO_P Parameter: Treatment Value: 5mM NO vs. No Treatment
  misc_feature: MA Experiment ID: 108528 Result: Up-regulated in Transcription
  misc_feature: MA Experiment 108528 PARAMETER Experiment Name: Zm_Imbibed_Seeds_P Parameter: Age (day) Value: 5 vs. 2
  misc_feature: MA Experiment 108528 PARAMETER Experiment Name: Zm_Imbibed_Seeds_P Parameter: Organism Value: Zea mays
  misc_feature: MA Experiment 108528 PARAMETER Experiment Name: Zm_Imbibed_Seeds_P Parameter: Plant Line Value: 35A19
  misc_feature: MA Experiment 108528 PARAMETER Experiment Name: Zm_Imbibed_Seeds_P Parameter: Tissue Value: Aerial vs. Embryo
  misc_feature: MA Experiment ID: 108529 Result: Down-regulated in Transcription
  misc_feature: MA Experiment 108529 PARAMETER Experiment Name: Zm_Imbibed_Seeds_P Parameter: Age (day) Value: 5 vs. 2
  misc_feature: MA Experiment 108529 PARAMETER Experiment Name: Zm_Imbibed_Seeds_P Parameter: Organism Value: Zea mays
  misc_feature: MA Experiment 108529 PARAMETER Experiment Name: Zm_Imbibed_Seeds_P Parameter: Plant Line Value: 35A19
  misc_feature: MA Experiment 108529 PARAMETER Experiment Name: Zm_Imbibed_Seeds_P Parameter: Tissue Value: Roots vs. Embryo
  misc_feature: MA Experiment ID: 108530 Result: Up-regulated in Transcription
  misc_feature: MA Experiment 108530 PARAMETER Experiment Name: Zm_Imbibed_Seeds_P Parameter: Age (day) Value: 6 vs. 2
  misc_feature: MA Experiment 108530 PARAMETER Experiment Name: Zm_Imbibed_Seeds_P Parameter: Organism Value: Zea mays
  misc_feature: MA Experiment 108530 PARAMETER Experiment Name: Zm_Imbibed_Seeds_P Parameter: Plant Line Value: 35A19
  misc_feature: MA Experiment 108530 PARAMETER Experiment Name: Zm_Imbibed_Seeds_P Parameter: Tissue Value: Aerial vs. Embryo
  misc_feature: MA Experiment ID: 108536 Result: Down-regulated in Transcription
  misc_feature: MA Experiment 108536 PARAMETER Experiment Name: Zm_Meristem_P Parameter: Age (day) Value: 8
  misc_feature: MA Experiment 108536 PARAMETER Experiment Name: Zm_Meristem_P Parameter: Organism Value: Zea mays
  misc_feature: MA Experiment 108536 PARAMETER Experiment Name: Zm_Meristem_P Parameter: Plant Line Value: 35A19
  misc_feature: MA Experiment 108536 PARAMETER Experiment Name: Zm_Meristem_P Parameter: Tissue Value: Shoot Meristem vs. Above Shoot Meristem
  misc_feature: MA Experiment ID: 108543 Result: Down-regulated in Transcription
  misc_feature: MA Experiment ID: 108545 Result: Up-regulated in Transcription
  misc_feature: MA Experiment 108545 PARAMETER Experiment Name: Zm_Imbibed_Seeds_P Parameter: Age (day) Value: 3 vs. 2
  misc_feature: MA Experiment 108545 PARAMETER Experiment Name: Zm_Imbibed_Seeds_P Parameter: Organism Value: Zea mays
  misc_feature: MA Experiment 108545 PARAMETER Experiment Name: Zm_Imbibed_Seeds_P Parameter: Plant Line Value: 35A19
  misc_feature: MA Experiment 108545 PARAMETER Experiment Name: Zm_Imbibed_Seeds_P Parameter: Tissue Value: Aerial vs. Embryo
  misc_feature: MA Experiment ID: 108546 Result: Down-regulated in Transcription
  misc_feature: MA Experiment 108546 PARAMETER Experiment Name: Zm_Imbibed_Seeds_P Parameter: Age (day) Value: 3 vs. 2
  misc_feature: MA Experiment 108546 PARAMETER Experiment Name: Zm_Imbibed_Seeds_P Parameter: Organism Value: Zea mays
  misc_feature: MA Experiment 108546 PARAMETER Experiment Name: Zm_Imbibed_Seeds_P Parameter: Plant Line Value: 35A19
  misc_feature: MA Experiment 108546 PARAMETER Experiment Name: Zm_Imbibed_Seeds_P Parameter: Tissue Value: Roots vs. Embryo
  misc_feature: MA Experiment ID: 108547 Result: Up-regulated in Transcription
  misc_feature: MA Experiment 108547 PARAMETER Experiment Name: Zm_Imbibed_Seeds_P Parameter: Age (day) Value: 4 vs. 2
  misc_feature: MA Experiment 108547 PARAMETER Experiment Name: Zm_Imbibed_Seeds_P Parameter: Organism Value: Zea mays
  misc_feature: MA Experiment 108547 PARAMETER Experiment Name: Zm_Imbibed_Seeds_P Parameter: Plant Line Value: 35A19
  misc_feature: MA Experiment 108547 PARAMETER Experiment Name: Zm_Imbibed_Seeds_P Parameter: Tissue Value: Aerial vs. Embryo
  misc_feature: MA Experiment ID: 108559 Result: Down-regulated in Transcription
  misc_feature: MA Experiment 108559 PARAMETER Experiment Name: Zm_5mM_NO_P Parameter: Age (day) Value: 8
  misc_feature: MA Experiment 108559 PARAMETER Experiment Name: Zm_5mM_NO_P Parameter: Organism Value: Zea mays
  misc_feature: MA Experiment 108559 PARAMETER Experiment Name: Zm_5mM_NO_P Parameter: Plant Line Value: 35A19
  misc_feature: MA Experiment 108559 PARAMETER Experiment Name: Zm_5mM_NO_P Parameter: Timepoint (hr) Value: 12
  misc_feature: MA Experiment 108559 PARAMETER Experiment Name: Zm_5mM_NO_P Parameter: Tissue Value: Aerial
  misc_feature: MA Experiment 108559 PARAMETER Experiment Name: Zm_5mM_NO_P Parameter: Treatment Value: 5mM NO vs. No Treatment
  misc_feature: MA Experiment ID: 108687 Result: Down-regulated in Transcription
  misc_feature: MA Experiment 108687 PARAMETER Experiment Name: Zm_Embryos-Flowers__P Parameter: Tissue Value: Embryo vs. Aerial+
  misc_feature: MA Experiment ID: 20000477 Result: Down-regulated in Transcription
  misc_feature: MA Experiment 20000477 PARAMETER Experiment Name: Zm_5mM_SA_P Parameter: Age (day) Value: 10
  misc_feature: MA Experiment 20000477 PARAMETER Experiment Name: Zm_5mM_SA_P Parameter: Organism Value: Zea mays
  misc_feature: MA Experiment 20000477 PARAMETER Experiment Name: Zm_5mM_SA_P Parameter: Plant Line Value: 35A19
  misc_feature: MA Experiment 20000477 PARAMETER Experiment Name: Zm_5mM_SA_P Parameter: Timepoint (hr) Value: 48
  misc_feature: MA Experiment 20000477 PARAMETER Experiment Name: Zm_5mM_SA_P Parameter: Tissue Value: Aerial
  misc_feature: MA Experiment 20000477 PARAMETER Experiment Name: Zm_5mM_SA_P Parameter: Treatment Value: 5mM SA vs. No Treatment
  misc_feature: MA Experiment ID: 20000479 Result: Down-regulated in Transcription
  misc_feature: MA Experiment 20000479 PARAMETER Experiment Name: Zm_Drought_P Parameter: Age (day) Value: 10
  misc_feature: MA Experiment 20000479 PARAMETER Experiment Name: Zm_Drought_P Parameter: Organism Value: Zea mays
  misc_feature: MA Experiment 20000479 PARAMETER Experiment Name: Zm_Drought_P Parameter: Plant Line Value: 35A19
  misc_feature: MA Experiment 20000479 PARAMETER Experiment Name: Zm_Drought_P Parameter: Timepoint (hr) Value: 48
  misc_feature: MA Experiment 20000479 PARAMETER Experiment Name: Zm_Drought_P Parameter: Tissue Value: Aerial
  misc_feature: MA Experiment 20000479 PARAMETER Experiment Name: Zm_Drought_P Parameter: Treatment Value: Drought vs. No Drought
  misc_feature: MA Experiment ID: 20000480 Result: Down-regulated in Transcription
  misc_feature: MA Experiment 20000480 PARAMETER Experiment Name: Zm_Drought_P Parameter: Age (day) Value: 11
  misc_feature: MA Experiment 20000480 PARAMETER Experiment Name: Zm_Drought_P Parameter: Organism Value: Zea mays
  misc_feature: MA Experiment 20000480 PARAMETER Experiment Name: Zm_Drought_P Parameter: Plant Line Value: 35A19
  misc_feature: MA Experiment 20000480 PARAMETER Experiment Name: Zm_Drought_P Parameter: Timepoint (hr) Value: 72
  misc_feature: MA Experiment 20000480 PARAMETER Experiment Name: Zm_Drought_P Parameter: Tissue Value: Aerial
  misc_feature: MA Experiment 20000480 PARAMETER Experiment Name: Zm_Drought_P Parameter: Treatment Value: Drought vs. No Drought
  misc_feature: MA Experiment ID: 20000488 Result: Up-regulated in Transcription
  misc_feature: MA Experiment 20000488 PARAMETER Experiment Name: Zm_50mM_NH4NO3_L_to_H_P Parameter: Organism Value: Zea mays
  misc_feature: MA Experiment 20000488 PARAMETER Experiment Name: Zm_50mM_NH4NO3_L_to_H_P Parameter: Timepoint (hr) Value: 8
  misc_feature: MA Experiment 20000488 PARAMETER Experiment Name: Zm_50mM_NH4NO3_L_to_H_P Parameter: Tissue Value: Leaves
  misc_feature: MA Experiment 20000488 PARAMETER Experiment Name: Zm_50mM_NH4NO3_L_to_H_P Parameter: Treatment Value: 50mM NH4NO3 vs. 100mM Mannitol
  misc_feature: MA Experiment ID: 20000534 Result: Down-regulated in Transcription
  misc_feature: MA Experiment 20000534 PARAMETER Experiment Name: Zm_Hybrid_Pollen_P Parameter: Age (day) Value: 8
  misc_feature: MA Experiment 20000534 PARAMETER Experiment Name: Zm_Hybrid_Pollen_P Parameter: Organism Value: Zea mays
  misc_feature: MA Experiment 20000534 PARAMETER Experiment Name: Zm_Hybrid_Pollen_P Parameter: Plant Line Value: 35A19
  misc_feature: MA Experiment 20000534 PARAMETER Experiment Name: Zm_Hybrid_Pollen_P Parameter: Tissue Value: Pollen vs. Aerial
agcattctagttctactgctgatcttctgcatggccatggtgaggaacccaagagaccttgaaacatactaggagtactagcagtagaggatttaaacctatcttggagtttgcaactggtatcttcttgcaagatcccaaggccaccgtaagatttgttgcagcgtgagacaggagctgcggctgcggaggaagtgagcaaaagcatggatctttccggcacgcagggcgagctgccgatggcaacaatgcacgccggcgggtcgccgtacctggggctgcaccacgggcacccacagcagcacaaccatggcgcgaacggccggcacatgtcgccgccggatgtggtggcggaggaggccaagaaccggcagctggcggtggtgcccgtgggcacaggaggcggaggcggggcaggggtgaggtaccgcgagtgcctgaagaaccacgcggctgccatcggcgggagcgcgacggacgggtgcggcgagttcatgcccgcgggcgaggaggggtcgctggacgcgctccggtgctcggcgtgcgggtgccaccgcaacttccaccgcaaggagccgccgggcggcgacgggcggcagctgtacgggcaccaccaccaccacccgctgagcccgctggccgcggtgcacccccaccatcaccgggggctgctggtggcggcgcttcccccggcgccgacgcgcatggtgatgccgctgagcgccgccatgcaccatcaccagcagccgccgcagcagcaccacagctcggcgtcagcggactccgacgacgcacacgtgccaggggtgcgcgggggggaggtgcagcagcagcagcaggcaccggcacggaagcggttccggaccaagttcaccgcggagcagaaggcccggatgctggggttcgcggaggacgccgggtggcggctgcagaagctggacgaggcggcggtgcagcgcttctgccaggaggtcggcgtgaagcggcgcgtgctcaaggtgtggatgcacaacaacaagcacaccctggcgcggcgcggccacgccgggctccccggcgacccggagctgctggggccgcacgacggccagctcggcatgccgctcccggagccggcggcggagcccgcagttgctgctgcggctgcggctggacttggagtgaccgaccaagccatgtctttcgggactggacgacattgatcaagagagtctaatgctgactgaatcagccttgcggcatagggaagctgttttctttgttaatctgctgctgatctcatcaatctagccgtagctttagctgcatttgcattccactgttccatccatcctagctatccatcaaccacaaactgatgatgcggagtctccatggatttctattccttgttgatttctgtagctgctctccccgctcttgactttaattttttagtgctcg

SEQ ID NO: 7807 - protein, 331 aa, Zea mays subsp. mays
  peptide (1)..(331): Ceres Seq. ID no. 12373181
  misc_feature (72)..(126): Pfam Name: ZF-HD protein dimerisation region Pfam Description: ZF-HD protein dimerisation region
  misc_feature (65)..(277): Homolog of NCBI NO: 13374061 NR Description: ZF-HD homeobox protein [Flaveria bidentis]
  misc_feature (62)..(166): Homolog of NCBI NO: 15233925 NR Description: putative protein; protein id: At4g24660.1, by cDNA: gi_16612294 [Arabidopsis thaliana]
  misc_feature (178)..(277): Homolog of NCBI NO: 15233925 NR Description: putative protein; protein id: At4g24660.1, by cDNA: gi_16612294 [Arabidopsis thaliana]
  misc_feature (72)..(282): Homolog of NCBI NO: 15223757 NR Description: hypothetical protein; protein id: At1g14440.1, by cDNA: gi_18377625, supported by cDNA: gi_20465766 [Arabidopsis
  misc_feature (72)..(279): Homolog of NCBI NO: 15226993 NR Description: hypothetical protein; protein id: At2g02540.1, by cDNA: gi_20148767 [Arabidopsis thaliana]
  misc_feature (72)..(279): Homolog of NCBI NO: 20148768 NR Description: hypothetical protein At2g02540/T822.16
  misc_feature (66)..(287): Homolog of NCBI NO: 5091602 NR Description: 10A19I.6 [Oryza sativa]
  misc_feature (150)..(277): Homolog of NCBI NO: 13277218 NR Description: ZF-HD homeobox protein [Flaveria bidentis]
  misc_feature (71)..(149): Homolog of NCBI NO: 13277218 NR Description: ZF-HD homeobox protein [Flaveria bidentis]
  misc_feature (74)..(281): Homolog of NCBI NO: 18421904 NR Description: putative protein; protein id: At5g39760.1, by cDNA: 249321., supported by cDNA: gi_20259469 [Arabidopsis >gi|10177976|dbj|BAB11382.1| gene_id:MKM21.8~pir||T00609~similar
MDLSGTQGELPMATMHAGGSPYLGLHHGHPQQHNHGANGRHMSPPDVVAEEAKNRQLAVVPVGTGGGGGAGVRYRECLKNHAAAIGGSATDGCGEFMPAGEEGSLDALRCSACGCHRNFHRKEPPGGDGRQLYGHHHHHPLSPLAAVHPHHHRGLLVAALPPAPTRMVMPLSAAMHHHQQPPQQHHSSASADSDDAHVPGVRGGEVQQQQQAPARKRFRTKFTAEQKARMLGFAEDAGWRLQKLDEAAVQRFCQEVGVKRRVLKVWMHNNKHTLARRGHAGLPGDPELLGPHDGQLGMPLPEPAAEPAVAAAAAAGLGVTDQAMSFGTGRH

SEQ ID NO: 7808 - protein, 320 aa, Zea mays subsp. mays
  peptide (1)..(320): Ceres Seq. ID no. 12373182
  misc_feature (61)..(115): Pfam Name: ZF-HD protein dimerisation region Pfam Description: ZF-HD protein dimerisation region
  misc_feature (54)..(266): Homolog of NCBI NO: 13374061 NR Description: ZF-HD homeobox protein [Flaveria bidentis]
  misc_feature (51)..(155): Homolog of NCBI NO: 15233925 NR Description: putative protein; protein id: At4g24660.1, by cDNA: gi_16612294 [Arabidopsis thaliana]
  misc_feature (167)..(266): Homolog of NCBI NO: 15233925 NR Description: putative protein; protein id: At4g24660.1, by cDNA: gi_16612294 [Arabidopsis thaliana]
  misc_feature (61)..(271): Homolog of NCBI NO: 15223757 NR Description: hypothetical protein; protein id: At1g14440.1, by cDNA: gi_18377625, supported by cDNA: gi_20465766 [Arabidopsis
  misc_feature (61)..(268): Homolog of NCBI NO: 15226993 NR Description: hypothetical protein; protein id: At2g02540.1, by cDNA: gi_20148767 [Arabidopsis thaliana]
  misc_feature (61)..(268): Homolog of NCBI NO: 20148768 NR Description: hypothetical protein At2g02540/T822.16
  misc_feature (55)..(276): Homolog of NCBI NO: 5091602 NR Description: 10A19I.6 [Oryza sativa]
  misc_feature (139)..(266): Homolog of NCBI NO: 13277218 NR Description: ZF-HD homeobox protein [Flaveria bidentis]
  misc_feature (60)..(138): Homolog of NCBI NO: 13277218 NR Description: ZF-HD homeobox protein [Flaveria bidentis]
  misc_feature (63)..(270): Homolog of NCBI NO: 18421904 NR Description: putative protein; protein id: At5g39760.1, by cDNA: 249321., supported by cDNA: gi_20259469 [Arabidopsis >gi|10177976|dbj|BAB11382.1| gene_id:MKM21.8~pir||T00609~similar
MATMHAGGSPYLGLHHGHPQQHNHGANGRHMSPPDVVAEEAKNRQLAVVPVGTGGGGGAGVRYRECLKNHAAAIGGSATDGCGEFMPAGEEGSLDALRCSACGCHRNFHRKEPPGGDGRQLYGHHHHHPLSPLAAVHPHHHRGLLVAALPPAPTRMVMPLSAAMHHHQQPPQQHHSSASADSDDAHVPGVRGGEVQQQQQAPARKRFRTKFTAEQKARMLGFAEDAGWRLQKLDEAAVQRFCQEVGVKRRVLKVWMHNNKHTLARRGHAGLPGDPELLGPHDGQLGMPLPEPAAEPAVAAAAAAGLGVTDQAMSFGTGRH

SEQ ID NO: 7809 - protein, 317 aa, Zea mays subsp. mays
  peptide (1)..(317): Ceres Seq. ID no. 12373183
  misc_feature (58)..(112): Pfam Name: ZF-HD protein dimerisation region Pfam Description: ZF-HD protein dimerisation region
  misc_feature (51)..(263): Homolog of NCBI NO: 13374061 NR Description: ZF-HD homeobox protein [Flaveria bidentis]
  misc_feature (48)..(152): Homolog of NCBI NO: 15233925 NR Description: putative protein; protein id: At4g24660.1, by cDNA: gi_16612294 [Arabidopsis thaliana]
  misc_feature (164)..(263): Homolog of NCBI NO: 15233925 NR Description: putative protein; protein id: At4g24660.1, by cDNA: gi_16612294 [Arabidopsis thaliana]
  misc_feature (58)..(268): Homolog of NCBI NO: 15223757 NR Description: hypothetical protein; protein id: At1g14440.1, by cDNA: gi_18377625, supported by cDNA: gi_20465766 [Arabidopsis
  misc_feature (58)..(265): Homolog of NCBI NO: 15226993 NR Description: hypothetical protein; protein id: At2g02540.1, by cDNA: gi_20148767 [Arabidopsis thaliana]
  misc_feature (58)..(265): Homolog of NCBI NO: 20148768 NR Description: hypothetical protein At2g02540/T822.16
  misc_feature (52)..(273): Homolog of NCBI NO: 5091602 NR Description: 10A19I.6 [Oryza sativa]
  misc_feature (136)..(263): Homolog of NCBI NO: 13277218 NR Description: ZF-HD homeobox protein [Flaveria bidentis]
  misc_feature (57)..(135): Homolog of NCBI NO: 13277218 NR Description: ZF-HD homeobox protein [Flaveria bidentis]
  misc_feature (60)..(267): Homolog of NCBI NO: 18421904 NR Description: putative protein; protein id: At5g39760.1, by cDNA: 249321., supported by cDNA: gi_20259469 [Arabidopsis >gi|10177976|dbj|BAB11382.1| gene_id:MKM21.8~pir||T00609~similar
MHAGGSPYLGLHHGHPQQHNHGANGRHMSPPDVVAEEAKNRQLAVVPVGTGGGGGAGVRYRECLKNHAAAIGGSATDGCGEFMPAGEEGSLDALRCSACGCHRNFHRKEPPGGDGRQLYGHHHHHPLSPLAAVHPHHHRGLLVAALPPAPTRMVMPLSAAMHHHQQPPQQHHSSASADSDDAHVPGVRGGEVQQQQQAPARKRFRTKFTAEQKARMLGFAEDAGWRLQKLDEAAVQRFCQEVGVKRRVLKVWMHNNKHTLARRGHAGLPGDPELLGPHDGQLGMPLPEPAAEPAVAAAAAAGLGVTDQAMSFGTGRH

SEQ ID NO: 7810 - DNA, 1229 bp, Zea mays subsp. mays
  misc_feature (1)..(1229): Ceres Seq. ID no. 12353971
  misc_feature: MA Experiment ID: 108544 Result: Down-regulated in Transcription
  misc_feature: MA Experiment ID: 108556 Result: Down-regulated in Transcription
  misc_feature: MA Experiment 108556 PARAMETER Experiment Name: Zm_Drought_P Parameter: Age (day) Value: 9
  misc_feature: MA Experiment 108556 PARAMETER Experiment Name: Zm_Drought_P Parameter: Organism Value: Zea mays
  misc_feature: MA Experiment 108556 PARAMETER Experiment Name: Zm_Drought_P Parameter: Plant Line Value: 35A19
  misc_feature: MA Experiment 108556 PARAMETER Experiment Name: Zm_Drought_P Parameter: Timepoint (hr) Value: 24
  misc_feature: MA Experiment 108556 PARAMETER Experiment Name: Zm_Drought_P Parameter: Tissue Value: Aerial
  misc_feature: MA Experiment 108556 PARAMETER Experiment Name: Zm_Drought_P Parameter: Treatment Value: Drought vs. No Drought
  misc_feature: MA Experiment ID: 20000534 Result: Down-regulated in Transcription
  misc_feature: MA Experiment 20000534 PARAMETER Experiment Name: Zm_Hybrid_Pollen_P Parameter: Age (day) Value: 8
  misc_feature: MA Experiment 20000534 PARAMETER Experiment Name: Zm_Hybrid_Pollen_P Parameter: Organism Value: Zea mays
  misc_feature: MA Experiment 20000534 PARAMETER Experiment Name: Zm_Hybrid_Pollen_P Parameter: Plant Line Value: 35A19
  misc_feature: MA Experiment 20000534 PARAMETER Experiment Name: Zm_Hybrid_Pollen_P Parameter: Tissue Value: Pollen vs. Aerial
ctttttgtgttgctctaaccctttcggctgcgctgcgcacgtcccctcccacgagaaacaccccacgtctcaagctgcccctttctcaccgccacggccgccacgcgcagcagcaaccgagcaggagcgcagccagcaagctcaggcccgagccctactgcaaccgccgctgctaccgcactgaacaccatggccgacccggcggagcaccgtccagcggaggaggacgaggaagccgcggcggccggcgaggatgaggacaccggcgctcaggtcgcgcccatcgtgaagctggaggaggtcgccgttaccaccggagaggaggacgaggacgtacttgtcgacatgaaggcgaagctctaccggttcgacaaggaggcgaaccagtggaaagaacgtggcacaggcactgtgaagctgcttaagcacaaggagaccgccaaggtccgcctcgtcatgcgtcaggcgaagacgcttaagatctgtgctaaccatcttgtggtggcgacgactaagatgcaggagcacgcagggagcgacaagtcgtgcgtgtggcacgcgctggacttcgccgacggtgagctcaaggaggagatgtttgctatccgttttggatctgtcgagaattgcaagaagttcaaggacactgttgaagagatagctgaagagcaaggaaagaccgaggtgaaagaaaacgaggaagtctccattgccgccgcagatttggtacagaagttaacagtgacagaggctagcaaggagggagatgcagaggaagaggaggctcctgcatctgaccataagaaggatgctaaagggtaaagattgaaggcaaacaaggccaaatgattatgattccattcatttcgttgtcaaggttcatcttccccacaaattttcattacaaagtttcattgcattttctcctgagatgatttgtgtgtgtgtgtgtgtgtgtgtgtgttgggtgaaatctgagttgtcagtcatctacatgtctttcttggttgttagacttattctcagtcgcctgtttatctgggatggctaggtacatcatgtttgtacaattatttggggttgattttggaatggctctaaagctcgagatgagatagatggtatcatggtagttattagtgatgatttcttttcgcttcttgttcgttcgttctgaaataatatgggatgctttgttatacttgttgatccattattagcttgatgcg

SEQ ID NO: 7811 - protein, 210 aa, Zea mays subsp. mays
  peptide (1)..(210): Ceres Seq. ID no. 12353972
  misc_feature (39)..(159): Pfam Name: RanBP1 domain Pfam Description: RanBP1 domain
  misc_feature (1)..(209): Homolog of NCBI NO: 14091665 NR Description: Ran binding protein-1 [Lycopersicon esculentum]
  misc_feature (5)..(210): Homolog of NCBI NO: 15222310 NR Description: Ran-binding protein (atranbp1a); protein id: supported by cDNA: gi_13877580, supported by cDNA: gi_15294205,
  misc_feature (5)..(209): Homolog of NCBI NO: 2058282 NR Description: atranbp1a [Arabidopsis thaliana]
  misc_feature (1)..(209): Homolog of NCBI NO: 8843780 NR Description: contains similarity to small GTPase Ran binding
  misc_feature (1)..(209): Homolog of NCBI NO: 30697102 NR Description: Ran binding protein 1 homolog - like [Arabidopsis >gi|1732511|gb|AAB38776.1| Ran binding protein 1 homolog
  misc_feature (7)..(208): Homolog of NCBI NO: 2058284 NR Description: atranbp1b [Arabidopsis thaliana]
  misc_feature (6)..(208): Homolog of NCBI NO: 20260400 NR Description: Ran binding protein [Arabidopsis thaliana]
  misc_feature (7)..(208): Homolog of NCBI NO: 15227700 NR Description: Ran binding protein (AtRanBP1b); protein id: supported by cDNA: gi_20260399 [Arabidopsis thaliana]
  misc_feature (5)..(210): Homolog of NCBI NO: 5106769 NR Description: Ran-binding protein siRanBP [Arabidopsis thaliana]
  misc_feature (1)..(163): Homolog of NCBI NO: 6320205 NR Description: Yeast Ran Binder #1; suppressor of FUS1; homolog
MADPAEHRPAEEDEEAAAAGEDEDTGAQVAPIVKLEEVAVTTGEEDEDVLVDMKAKLYRFDKEANQWKERGTGTVKLLKHKETAKVRLVMRQAKTLKICANHLVVATTKMQEHAGSDKSCVWHALDFADGELKEEMFAIRFGSVENCKKFKDTVEEIAEEQGKTEVKENEEVSIAAADLVQKLTVTEASKEGDAEEEEAPASDHKKDAKG

SEQ ID NO: 7812 - protein, 158 aa, Zea mays subsp. mays
  peptide (1)..(158): Ceres Seq. ID no. 12353973
  misc_feature (1)..(107): Pfam Name: RanBP1 domain Pfam Description: RanBP1 domain
  misc_feature (1)..(157): Homolog of NCBI NO: 14091665 NR Description: Ran binding protein-1 [Lycopersicon esculentum]
  misc_feature (1)..(158): Homolog of NCBI NO: 15222310 NR Description: Ran-binding protein (atranbp1a); protein id: supported by cDNA: gi_13877580, supported by cDNA: gi_15294205,
  misc_feature (1)..(157): Homolog of NCBI NO: 2058282 NR Description: atranbp1a [Arabidopsis thaliana]
  misc_feature (1)..(157): Homolog of NCBI NO: 8843780 NR Description: contains similarity to small GTPase Ran binding
  misc_feature (1)..(157): Homolog of NCBI NO: 30697102 NR Description: Ran binding protein 1 homolog - like [Arabidopsis >gi|1732511|gb|AAB38776.1| Ran binding protein 1 homolog
  misc_feature (1)..(156): Homolog of NCBI NO: 2058284 NR Description: atranbp1b [Arabidopsis thaliana]
  misc_feature (1)..(156): Homolog of NCBI NO: 20260400 NR Description: Ran binding protein [Arabidopsis thaliana]
  misc_feature (1)..(156): Homolog of NCBI NO: 15227700 NR Description: Ran binding protein (AtRanBP1b); protein id: supported by cDNA: gi_20260399 [Arabidopsis thaliana]
  misc_feature (1)..(158): Homolog of NCBI NO: 5106769 NR Description: Ran-binding protein siRanBP [Arabidopsis thaliana]
  misc_feature (1)..(111): Homolog of NCBI NO: 6320205 NR Description: Yeast Ran Binder #1; suppressor of FUS1; homolog
MKAKLYRFDKEANQWKERGTGTVKLLKHKETAKVRLVMRQAKTLKICANHLVVATTKMQEHAGSDKSCVWHALDFADGELKEEMFAIRFGSVENCKKFKDTVEEIAEEQGKTEVKENEEVSIAAADLVQKLTVTEASKEGDAEEEEAPASDHKKDAKG

SEQ ID NO: 7813 - protein, 121 aa, Zea mays subsp. mays
  peptide (1)..(121): Ceres Seq. ID no. 12353974
  misc_feature (1)..(70): Pfam Name: RanBP1 domain Pfam Description: RanBP1 domain
  misc_feature (1)..(120): Homolog of NCBI NO: 14091665 NR Description: Ran binding protein-1 [Lycopersicon esculentum]
  misc_feature (1)..(121): Homolog of NCBI NO: 15222310 NR Description: Ran-binding protein (atranbp1a); protein id: supported by cDNA: gi_13877580, supported by cDNA: gi_15294205,
  misc_feature (1)..(120): Homolog of NCBI NO: 2058282 NR Description: atranbp1a [Arabidopsis thaliana]
  misc_feature (1)..(120): Homolog of NCBI NO: 8843780 NR Description: contains similarity to small GTPase Ran binding
  misc_feature (1)..(120): Homolog of NCBI NO: 30697102 NR Description: Ran binding protein 1 homolog - like [Arabidopsis >gi|1732511|gb|AAB38776.1| Ran binding protein 1 homolog
  misc_feature (1)..(119): Homolog of NCBI NO: 2058284 NR Description: atranbp1b [Arabidopsis thaliana]
  misc_feature (1)..(119): Homolog of NCBI NO: 20260400 NR Description: Ran binding protein [Arabidopsis thaliana]
  misc_feature (1)..(119): Homolog of NCBI NO: 15227700 NR Description: Ran binding protein (AtRanBP1b); protein id: supported by cDNA: gi_20260399 [Arabidopsis thaliana]
  misc_feature (1)..(121): Homolog of NCBI NO: 5106769 NR Description: Ran-binding protein siRanBP [Arabidopsis thaliana]
  misc_feature (1)..(74): Homolog of NCBI NO: 6320205 NR Description: Yeast Ran Binder #1; suppressor of FUS1; homolog
MRQAKTLKICANHLVVATTKMQEHAGSDKSCVWHALDFADGELKEEMFAIRFGSVENCKKFKDTVEEIAEEQGKTEVKENEEVSIAAADLVQKLTVTEASKEGDAEEEEAPASDHKKDAKG

SEQ ID NO: 7814 - DNA, 1318 bp, Zea mays subsp. mays
  misc_feature (1)..(1318): Ceres Seq. ID no. 12566620
  misc_feature: MA Experiment ID: 108535 Result: Up-regulated in Transcription
  misc_feature: MA Experiment 108535 PARAMETER Experiment Name: Zm_Meristem_P Parameter: Age (day) Value: 8
  misc_feature: MA Experiment 108535 PARAMETER Experiment Name: Zm_Meristem_P Parameter: Organism Value: Zea mays
  misc_feature: MA Experiment 108535 PARAMETER Experiment Name: Zm_Meristem_P Parameter: Plant Line Value: 35A19
  misc_feature: MA Experiment 108535 PARAMETER Experiment Name: Zm_Meristem_P Parameter: Tissue Value: Root Meristem vs. Above Root Meristem
  misc_feature: MA Experiment ID: 20000535 Result: Up-regulated in Transcription
  misc_feature: MA Experiment 20000535 PARAMETER Experiment Name: Zm_Hybrid_Seed_Dev_P Parameter: DAP Value: 30 vs. 12
  misc_feature: MA Experiment 20000535 PARAMETER Experiment Name: Zm_Hybrid_Seed_Dev_P Parameter: Organism Value: Zea mays
  misc_feature: MA Experiment 20000535 PARAMETER Experiment Name: Zm_Hybrid_Seed_Dev_P Parameter: Plant Line Value: 35A19
  misc_feature: MA Experiment 20000535 PARAMETER Experiment Name: Zm_Hybrid_Seed_Dev_P Parameter: Tissue Value: Embryo vs. Unfert Floret
agtcgtccagctggtttgcctcccacacaaagggtaaaacggccggaacgctaaaatctcaccccttccgcttggaagttggaacccatcgccgcctccatcgctacacaccacgacgcagcgcccgattccgccggccagcaacgatgcagagctccctcgcccggccgccggtactggccggatgcggcgagagacggggcctggcagccgtggcacggtgccgcgctgaggcggcggcgcccgtgtggacggcgtccagggcgcctgtggggccgtacaccgggagggacccggaggtgaagaagcccgcgtggctgcggcagcgcgctgcgcagggggagaagtacgctcgcctgcgggagtccatcggcgagctcaagctcaacaccgtctgcgtcgaggcacaatgccccaacatcggcgagtgttggaacggaggtggaggggccggcggcgaaggggacggcatcgcgacggccaccatcatggtgcttggtgacacctgcacgcgcgggtgtcgattctgcgctgtgaagaccagcaacaaaccgccgccgcctgatcccctggagcctctgaacacggctttggctgttgcaagctggggtgtagattatgttgtgctaaccagtgtcgatagagatgacttacctgatggtggaagtagccattttgctcagacagtgaaagctttaaaggagctcaaacctggaatactggtggagtgcttaacctcggattttcgaggtgacctggaggctatctcatctttggcaaactctggcctagatgtttatgcacacaacattgaaaccgtgaggagtctacagagggttgtgagggatccccgggcagggtatgatcagagcttagcagttctcaagcatgcaaaaggttccagggaggacatgattacgaagtcttctatcatgcttggtcttggagagactgatgaagaggtgaaacaagccatgatggatctacgggcaattggtgttgacatccttactttgggacagtacttgcagccatcagaaagacatctaacagtaagagagtatgtgactccccaaaagttccaattttggaaggagtatggagaatcggtgggtttccgatatgttgctagcggacccttggttcggtcttcctaccgtgcaggagagctatttgtccaaaatttagtcagaaataacaaaactgagtcgtccatggatccgtacgcagaaataacaaaatctaactaaatatcttgtgccagagcaatccatgggatcagtacacactgtttgttaagagcagcaaacaagagtag

SEQ ID NO: 7815 - protein, 415 aa, Zea mays subsp. mays
  peptide (1)..(415): Ceres Seq. ID no. 12566621
  misc_feature (163)..(328): Pfam Name: Radical SAM superfamily Pfam Description: Radical SAM superfamily
  misc_feature (49)..(400): Homolog of NCBI NO: 34909890 NR Description: putative lipoic acid synthase-like protein [Oryza
  misc_feature (90)..(403): Homolog of NCBI NO: 18415808 NR Description: lipoic acid synthase - like protein; protein id: supported by cDNA: 152427., supported by cDNA: gi_20373022 thaliana] >gi|20373023|dbj|BAB91180.1| lipoic acid synthase
  misc_feature (90)..(403): Homolog of NCBI NO: 21553591 NR Description: lipoic acid synthase-like protein [Arabidopsis
  misc_feature (100)..(404): Homolog of NCBI NO: 33989742 NR Description: Unknown (protein for MGC:66080) [Danio rerio]
  misc_feature (100)..(404): Homolog of NCBI NO: 13277380 NR Description: lipoic acid synthetase [Mus musculus]
  misc_feature (100)..(402): Homolog of NCBI NO: 37577166 NR Description: lipoic acid synthetase isoform 1 precursor;
  misc_feature (100)..(402): Homolog of NCBI NO: 34978347 NR Description: Lipoic acid synthetase, mitochondrial precursor
  misc_feature (100)..(404): Homolog of NCBI NO: 26327671 NR Description: unnamed protein product [Mus musculus]
  misc_feature (95)..(400): Homolog of NCBI NO: 17737685 NR Description: Lipoic acid synthase CG5231-PA
  misc_feature (92)..(402): Homolog of NCBI NO: 23482377 NR Description: lipoic acid synthetase, putative [Plasmodium
SSSWFASHTKGKTAGTLKSHPFRLEVGTHRRLHRYTPRRSARFRRPATMQSSLARPPVLAGCGERRGLAAVARCRAEAAAPVWTASRAPVGPYTGRDPEVKKPAWLRQRAAQGEKYARLRESIGELKLNTVCVEAQCPNIGECWNGGGGAGGEGDGIATATIMVLGDTCTRGCRFCAVKTSNKPPPPDPLEPLNTALAVASWGVDYVVLTSVDRDDLPDGGSSHFAQTVKALKELKPGILVECLTSDFRGDLEAISSLANSGLDVYAHNIETVRSLQRVVRDPRAGYDQSLAVLKHAKGSREDMITKSSIMLGLGETDEEVKQAMMDLRAIGVDILTLGQYLQPSERHLTVREYVTPQKFQFWKEYGESVGFRYVASGPLVRSSYRAGELFVQNLVRNNKTESSMDPYAEITKSN

SEQ ID NO: 7816 - protein, 367 aa, Zea mays subsp. mays
  peptide (1)..(367): Ceres Seq. ID no. 12566622
  misc_feature (115)..(280): Pfam Name: Radical SAM superfamily Pfam Description: Radical SAM superfamily
  misc_feature (1)..(352): Homolog of NCBI NO: 34909890 NR Description: putative lipoic acid synthase-like protein [Oryza
  misc_feature (42)..(355): Homolog of NCBI NO: 18415808 NR Description: lipoic acid synthase - like protein; protein id: supported by cDNA: 152427., supported by cDNA: gi_20373022 thaliana] >gi|20373023|dbj|BAB91180.1| lipoic acid synthase
  misc_feature (42)..(355): Homolog of NCBI NO: 21553591 NR Description: lipoic acid synthase-like protein [Arabidopsis
  misc_feature (52)..(356): Homolog of NCBI NO: 33989742 NR Description: Unknown (protein for MGC:66080) [Danio rerio]
  misc_feature (52)..(356): Homolog of NCBI NO: 13277380 NR Description: lipoic acid synthetase [Mus musculus]
  misc_feature (52)..(354): Homolog of NCBI NO: 37577166 NR Description: lipoic acid synthetase isoform 1 precursor;
  misc_feature (52)..(354): Homolog of NCBI NO: 34978347 NR Description: Lipoic acid synthetase, mitochondrial precursor
  misc_feature (52)..(356): Homolog of NCBI NO: 26327671 NR Description: unnamed protein product [Mus musculus]
  misc_feature (47)..(352): Homolog of NCBI NO: 17737685 NR Description: Lipoic acid synthase CG5231-PA
  misc_feature (44)..(354): Homolog of NCBI NO: 23482377 NR Description: lipoic acid synthetase, putative [Plasmodium
MQSSLARPPVLAGCGERRGLAAVARCRAEAAAPVWTASRAPVGPYTGRDPEVKKPAWLRQRAAQGEKYARLRESIGELKLNTVCVEAQCPNIGECWNGGGGAGGEGDGIATATIMVLGDTCTRGCRFCAVKTSNKPPPPDPLEPLNTALAVASWGVDYVVLTSVDRDDLPDGGSSHFAQTVKALKELKPGILVECLTSDFRGDLEAISSLANSGLDVYAHNIETVRSLQRVVRDPRAGYDQSLAVLKHAKGSREDMITKSSIMLGLGETDEEVKQAMMDLRAIGVDILTLGQYLQPSERHLTVREYVTPQKFQFWKEYGESVGFRYVASGPLVRSSYRAGELFVQNLVRNNKTESSMDPYAEITKSN

SEQ ID NO: 7817 - protein, 253 aa, Zea mays subsp. mays
  peptide (1)..(253): Ceres Seq. ID no. 12566623
  misc_feature (1)..(166): Pfam Name: Radical SAM superfamily Pfam Description: Radical SAM superfamily
  misc_feature (1)..(238): Homolog of NCBI NO: 34909890 NR Description: putative lipoic acid synthase-like protein [Oryza
  misc_feature (1)..(241): Homolog of NCBI NO: 18415808 NR Description: lipoic acid synthase - like protein; protein id: supported by cDNA: 152427., supported by cDNA: gi_20373022 thaliana] >gi|20373023|dbj|BAB91180.1| lipoic acid synthase
  misc_feature (1)..(241): Homolog of NCBI NO: 21553591 NR Description: lipoic acid synthase-like protein [Arabidopsis
  misc_feature (1)..(242): Homolog of NCBI NO: 33989742 NR Description: Unknown (protein for MGC:66080) [Danio rerio]
  misc_feature (1)..(242): Homolog of NCBI NO: 13277380 NR Description: lipoic acid synthetase [Mus musculus]
  misc_feature (1)..(240): Homolog of NCBI NO: 37577166 NR Description: lipoic acid synthetase isoform 1 precursor;
  misc_feature (1)..(240): Homolog of NCBI NO: 34978347 NR Description: Lipoic acid synthetase, mitochondrial precursor
  misc_feature (1)..(242): Homolog of NCBI NO: 26327671 NR Description: unnamed protein product [Mus musculus]
  misc_feature (1)..(238): Homolog of NCBI NO: 17737685 NR Description: Lipoic acid synthase CG5231-PA
  misc_feature (1)..(240): Homolog of NCBI NO: 23482377 NR Description: lipoic acid synthetase, putative [Plasmodium
MVLGDTCTRGCRFCAVKTSNKPPPPDPLEPLNTALAVASWGVDYVVLTSVDRDDLPDGGSSHFAQTVKALKELKPGILVECLTSDFRGDLEAISSLANSGLDVYAHNIETVRSLQRVVRDPRAGYDQSLAVLKHAKGSREDMITKSSIMLGLGETDEEVKQAMMDLRAIGVDILTLGQYLQPSERHLTVREYVTPQKFQFWKEYGESVGFRYVASGPLVRSSYRAGELFVQNLVRNNKTESSMDPYAEITKSN

SEQ ID NO: 7818 - DNA, 592 bp, Zea mays subsp. mays
  misc_feature (1)..(592): Ceres Seq. ID no. 12566081
  misc_feature: MA Experiment ID: 108528 Result: Down-regulated in Transcription
  misc_feature: MA Experiment 108528 PARAMETER Experiment Name: Zm_Imbibed_Seeds_P Parameter: Age (day) Value: 5 vs. 2
  misc_feature: MA Experiment 108528 PARAMETER Experiment Name: Zm_Imbibed_Seeds_P Parameter: Organism Value: Zea mays
  misc_feature: MA Experiment 108528 PARAMETER Experiment Name: Zm_Imbibed_Seeds_P Parameter: Plant Line Value: 35A19
  misc_feature: MA Experiment 108528 PARAMETER Experiment Name: Zm_Imbibed_Seeds_P Parameter: Tissue Value: Aerial vs. Embryo
  misc_feature: MA Experiment ID: 108535 Result: Up-regulated in Transcription
  misc_feature: MA Experiment 108535 PARAMETER Experiment Name: Zm_Meristem_P Parameter: Age (day) Value: 8
  misc_feature: MA Experiment 108535 PARAMETER Experiment Name: Zm_Meristem_P Parameter: Organism Value: Zea mays
  misc_feature: MA Experiment 108535 PARAMETER Experiment Name: Zm_Meristem_P Parameter: Plant Line Value: 35A19
  misc_feature: MA Experiment 108535 PARAMETER Experiment Name: Zm_Meristem_P Parameter: Tissue Value: Root Meristem vs. Above Root Meristem
acgttcctcgcacggcggaggcaaacaaaccctagccgccaggcgcaggcggtcagggagcgagtaccgagcgccccagttcacacgtgagatgtcagaatacaagaacgtcgttggggggaggctaaagctgaagggtaaggcactggatgtgaaggaaggtggagtcaagaagaaaaaaaagaagcatcagcttgaagagtcgtctcagattgagcacgatgagctccacaaagggggaaactctggcttaccagctgatcacaacaatgagcttattgaagctgatgcttctttttttttcttctttcttcctagtattttcttcccttctcttcgcatcatatgatgattccttagtgtctagctgctgtttttgtgtaaacctctgtaagtttcctgttccatcacatatgagtaaggcctttttgtttctttttatttaagtaaaagatccatcttttatgtactgtcgtggcagttttattatactatgtctgaacaaggcctattcactatgtaagccaaacataaacactatccaggtgacctggttgtgatgactacagtaataagtaactgaataattttt

SEQ ID NO: 7819 - protein, 115 aa, Zea mays subsp. mays
  peptide (1)..(115): Ceres Seq. ID no. 12566082
  misc_feature (31)..(79): Homolog of NCBI NO: 18394403 NR Description: expressed protein; protein id: At1g16810.1, by cDNA: 4887., supported by cDNA: gi_15146197 [Arabidopsis
RSSHGGGKQTLAARRRRSGSEYRAPQFTREMSEYKNVVGGRLKLKGKALDVKEGGVKKKKKKHQLEESSQIEHDELHKGGNSGLPADHNNELIEADASFFFFFLPSIFFPSLRII

SEQ ID NO: 7820 - protein, 85 aa, Zea mays subsp. mays
  peptide (1)..(85): Ceres Seq. ID no. 12566083
  misc_feature (1)..(49): Homolog of NCBI NO: 18394403 NR Description: expressed protein; protein id: At1g16810.1, by cDNA: 4887., supported by cDNA: gi_15146197 [Arabidopsis
MSEYKNVVGGRLKLKGKALDVKEGGVKKKKKKHQLEESSQIEHDELHKGGNSGLPADHNNELIEADASFFFFFLPSIFFPSLRII

SEQ ID NO: 7821 - protein, 74 aa, Zea mays subsp. mays
  peptide (1)..(74): Ceres Seq. ID no. 12566084
MSSTKGETLAYQLITTMSLLKLMLLFFSSFFLVFSSLLFASYDDSLVSSCCFCVNLCKFPVPSHMSKAFLFLFI

SEQ ID NO: 7822 - DNA, 1829 bp, Zea mays subsp. mays
  misc_feature (1)..(1829): Ceres Seq. ID no. 12594668
  misc_feature: MA Experiment ID: 108543 Result: Down-regulated in Transcription
  misc_feature: MA Experiment ID: 20000534 Result: Down-regulated in Transcription
  misc_feature: MA Experiment 20000534 PARAMETER Experiment Name: Zm_Hybrid_Pollen_P Parameter: Age (day) Value: 8
  misc_feature: MA Experiment 20000534 PARAMETER Experiment Name: Zm_Hybrid_Pollen_P Parameter: Organism Value: Zea mays
  misc_feature: MA Experiment 20000534 PARAMETER Experiment Name: Zm_Hybrid_Pollen_P Parameter: Plant Line Value: 35A19
  misc_feature: MA Experiment 20000534 PARAMETER Experiment Name: Zm_Hybrid_Pollen_P Parameter: Tissue Value: Pollen vs. Aerial
tctggtctttgcaacaaaaaccctgttcatcaagttgcgaacaaaattttgaatatgatttgccgaaaaatgaataaaggtgtggtatcgtcaagtactctttcatccacttctagttgtagtgtcagtggttcctctgtaagtgcatcagatgatccttgccaaaggcctgctgtttctggttgggaatttttagaagctgttccttttgttcttgaagctgttctgacagcatgtgctcatgggcagctttctagccgagacttgactacaagcttaagggatctcgtggactttttgcctgcttctcttgctgcaattgtgagctacttctcagcagaaattacacgaggaatctggaaacctgtcccaatgaatggaattgaatggcctagtcccggtgcttctcttcattccattgaagctgaagtaaaggaaattcttgcctctgctggtgttcagattaacagctgctatccacgtggtgtgccaccaatgcttcctttacctatggctgcacttgtcagcttgacgattacatttaagctagataggagtttggagtacattcaaggggtcattggacaggcgctagagaactgtgcaggggggagttcctggccaagcatgcccattattggggcattgtggacacagaaagtgcgaagatggcatgacttcatcgtcctctcttgtatgcgttctccattcggcagagacaaagatgcagttgcgcagctcatccaaagttgcttctcgtcctttctgcagtcttcatccagtggttctgatataattgcaaaccgtggagttggggctttactaggggactcaatcacgaatcaaggtcttaggctcccaatggcacctggtttcatctacttgagaacatgtcgaactttccatgacacttactttgttagtgaagtgatccttaagcaagtgattgagtgggctcacaaacttgcaaacggatggtgtttcaatggtcctccgcagttgaaatcagggcggacaccactatcttgtgcagcatccatggtgcagcaggtcgcgttgcttggtggaggtctcctatgcatagcaggtggaccacttgtggtccaggtgttgtatgaggaaacactgccaacactgctgctatcagccagagatcagagtttgaaaggccctgggccagtttctagcacactccaaggttacgccatggccaacatgctcttctactgtggtagcctgctttggggagcggataggacttctcctgtcatgaaattgtccttcctctcgaggcggccacgggtggtgagaacccacatggatttcatagctggtgtgttggacggacacattcttctgggctgtgacccgggtacgtggaaagcgtatgtgtcgcaatttatgttcctggtggtgaaatttgttccgtcatggttgcgggacataaagctggacacgctaaagaagatagcagctggacttcggagctggcacgaacacgaccttgctctgtctcttcttgaacgaggaggaccacaagcaatctctgttgtagtcgagacctttctgtaatccttccgtttggacattttgcccccacctgacatagcagccgccgttaagggtttgtagttggtgatctgaggtctagctgaagtaatccggatgacccttttgatccagaattacacttgtgctacccgggtaactgatgtttatctcatgtatggcgagctcatcggggttttcgtgaatccaatacggaagaacatgcaacctactagggtgtacttcagccctaacatgtataacatgtgggaagttcatgt

SEQ ID NO: 7823 - protein, 523 aa, Zea mays subsp. mays
  peptide (1)..(523): Ceres Seq. ID no. 12594669
  misc_feature (1)..(523): Homolog of NCBI NO: 33146668 NR Description: unknown protein [Oryza sativa (japonica
  misc_feature (1)..(523): Homolog of NCBI NO: 33146669 NR Description: unknown protein [Oryza sativa (japonica
  misc_feature (1)..(511): Homolog of NCBI NO: 15229478 NR Description: unknown protein; protein id: At3g23590.1 thaliana] >gi|9294515|dbj|BAB02777.1|
  misc_feature (1)..(511): Homolog of NCBI NO: 26449340 NR Description: unknown protein [Arabidopsis thaliana]
  misc_feature (1)..(521): Homolog of NCBI NO: 18407529 NR Description: unknown protein; protein id: At2g48110.1
  misc_feature (1)..(521): Homolog of NCBI NO: 25370851 NR Description: hypothetical protein At2g48110 [imported] -
  misc_feature (193)..(521): Homolog of NCBI NO: 1223579 NR Description: cDNA101 [Arabidopsis thaliana]
  misc_feature (210)..(523): Homolog of NCBI NO: 34394478 NR Description: unknown protein [Oryza sativa (japonica
  misc_feature (1)..(183): Homolog of NCBI NO: 20197556 NR Description: unknown protein [Arabidopsis thaliana]
SGLCNKNPVHQVANKILNMICRKMNKGVVSSSTLSSTSSCSVSGSSVSASDDPCQRPAVSGWEFLEAVPFVLEAVLTACAHGQLSSRDLTTSLRDLVDFLPASLAAIVSYFSAEITRGIWKPVPMNGIEWPSPGASLHSIEAEVKEILASAGVQINSCYPRGVPPMLPLPMAALVSLTITFKLDRSLEYIQGVIGQALENCAGGSSWPSMPIIGALWTQKVRRWHDFIVLSCMRSPFGRDKDAVAQLIQSCFSSFLQSSSSGSDIIANRGVGALLGDSITNQGLRLPMAPGFIYLRTCRTFHDTYFVSEVILKQVIEWAHKLANGWCFNGPPQLKSGRTPLSCAASMVQQVALLGGGLLCIAGGPLVVQVLYEETLPTLLLSARDQSLKGPGPVSSTLQGYAMANMLFYCGSLLWGADRTSPVMKLSFLSRRPRVVRTHMDFIAGVLDGHILLGCDPGTWKAYVSQFMFLVVKFVPSWLRDIKLDTLKKIAAGLRSWHEHDLALSLLERGGPQAISVVVETFL

SEQ ID NO: 7824 - protein, 505 aa, Zea mays subsp. mays
  peptide (1)..(505): Ceres Seq. ID no. 12594670
  misc_feature (1)..(505): Homolog of NCBI NO: 33146668 NR Description: unknown protein [Oryza sativa (japonica
  misc_feature (1)..(505): Homolog of NCBI NO: 33146669 NR Description: unknown protein [Oryza sativa (japonica
  misc_feature (1)..(493): Homolog of NCBI NO: 15229478 NR Description: unknown protein; protein id: At3g23590.1 thaliana] >gi|9294515|dbj|BAB02777.1|
  misc_feature (1)..(493): Homolog of NCBI NO: 26449340 NR Description: unknown protein [Arabidopsis thaliana]
  misc_feature (1)..(503): Homolog of NCBI NO: 18407529 NR Description: unknown protein; protein id: At2g48110.1
  misc_feature (1)..(503): Homolog of NCBI NO: 25370851 NR Description: hypothetical protein At2g48110 [imported] -
  misc_feature (175)..(503): Homolog of NCBI NO: 1223579 NR Description: cDNA101 [Arabidopsis thaliana]
  misc_feature (192)..(505): Homolog of NCBI NO: 34394478 NR Description: unknown protein [Oryza sativa (japonica
  misc_feature (1)..(165): Homolog of NCBI NO: 20197556 NR Description: unknown protein [Arabidopsis thaliana]
MICRKMNKGVVSSSTLSSTSSCSVSGSSVSASDDPCQRPAVSGWEFLEAVPFVLEAVLTACAHGQLSSRDLTTSLRDLVDFLPASLAAIVSYFSAEITRGIWKPVPMNGIEWPSPGASLHSIEAEVKEILASAGVQINSCYPRGVPPMLPLPMAALVSLTITFKLDRSLEYIQGVIGQALENCAGGSSWPSMPIIGALWTQKVRRWHDFIVLSCMRSPFGRDKDAVAQLIQSCFSSFLQSSSSGSDIIANRGVGALLGDSITNQGLRLPMAPGFIYLRTCRTFHDTYFVSEVILKQVIEWAHKLANGWCFNGPPQLKSGRTPLSCAASMVQQVALLGGGLLCIAGGPLVVQVLYEETLPTLLLSARDQSLKGPGPVSSTLQGYAMANMLFYCGSLLWGADRTSPVMKLSFLSRRPRVVRTHMDFIAGVLDGHILLGCDPGTWKAYVSQFMFLVVKFVPSWLRDIKLDTLKKIAAGLRSWHEHDLALSLLERGGPQAISVVVETFL

SEQ ID NO: 7825 - protein, 500 aa, Zea mays subsp. mays
  peptide (1)..(500): Ceres Seq. ID no. 12594671
  misc_feature (1)..(488): Homolog of NCBI NO: 15229478 NR Description: unknown protein; protein id: At3g23590.1 thaliana] >gi|9294515|dbj|BAB02777.1|
  misc_feature (1)..(488): Homolog of NCBI NO: 26449340 NR Description: unknown protein [Arabidopsis thaliana]
  misc_feature (1)..(498): Homolog of NCBI NO: 18407529 NR Description: unknown protein; protein id: At2g48110.1
  misc_feature (1)..(498): Homolog of NCBI NO: 25370851 NR Description: hypothetical protein At2g48110 [imported] -
  misc_feature (170)..(498): Homolog of NCBI NO: 1223579 NR Description: cDNA101 [Arabidopsis thaliana]
  misc_feature (187)..(500): Homolog of NCBI NO: 34394478 NR Description: unknown protein [Oryza sativa (japonica
  misc_feature (1)..(160): Homolog of NCBI NO: 20197556 NR Description: unknown protein [Arabidopsis thaliana]
  misc_feature (1)..(500): Homolog of NCBI NO: 33146668 NR Description: unknown protein [Oryza sativa (japonica
  misc_feature (1)..(500): Homolog of NCBI NO: 33146669 NR Description: unknown protein [Oryza sativa (japonica
MNKGVVSSSTLSSTSSCSVSGSSVSASDDPCQRPAVSGWEFLEAVPFVLEAVLTACAHGQLSSRDLTTSLRDLVDFLPASLAAIVSYFSAEITRGIWKPVPMNGIEWPSPGASLHSIEAEVKEILASAGVQINSCYPRGVPPMLPLPMAALVSLTITFKLDRSLEYIQGVIGQALENCAGGSSWPSMPIIGALWTQKVRRWHDFIVLSCMRSPFGRDKDAVAQLIQSCFSSFLQSSSSGSDIIANRGVGALLGDSITNQGLRLPMAPGFIYLRTCRTFHDTYFVSEVILKQVIEWAHKLANGWCFNGPPQLKSGRTPLSCAASMVQQVALLGGGLLCIAGGPLVVQVLYEETLPTLLLSARDQSLKGPGPVSSTLQGYAMANMLFYCGSLLWGADRTSPVMKLSFLSRRPRVVRTHMDFIAGVLDGHILLGCDPGTWKAYVSQFMFLVVKFVPSWLRDIKLDTLKKIAAGLRSWHEHDLALSLLERGGPQAISVVVETFL

SEQ ID NO: 7826 - DNA, 1668 bp, Zea mays subsp. mays
  misc_feature (1)..(1668): Ceres Seq. ID no. 12373504
  misc_feature: MA Experiment ID: 108530 Result: Up-regulated in Transcription
  misc_feature: MA Experiment 108530 PARAMETER Experiment Name: Zm_Imbibed_Seeds_P Parameter: Age (day) Value: 6 vs. 2
  misc_feature: MA Experiment 108530 PARAMETER Experiment Name: Zm_Imbibed_Seeds_P Parameter: Organism Value: Zea mays
  misc_feature: MA Experiment 108530 PARAMETER Experiment Name: Zm_Imbibed_Seeds_P Parameter: Plant Line Value: 35A19
  misc_feature: MA Experiment 108530 PARAMETER Experiment Name: Zm_Imbibed_Seeds_P Parameter: Tissue Value: Aerial vs. Embryo
  misc_feature: MA Experiment ID: 108545 Result: Up-regulated in Transcription
  misc_feature: MA Experiment 108545 PARAMETER Experiment Name: Zm_Imbibed_Seeds_P Parameter: Age (day) Value: 3 vs. 2
  misc_feature: MA Experiment 108545 PARAMETER Experiment Name: Zm_Imbibed_Seeds_P Parameter: Organism Value: Zea mays
  misc_feature: MA Experiment 108545 PARAMETER Experiment Name: Zm_Imbibed_Seeds_P Parameter: Plant Line Value: 35A19
  misc_feature: MA Experiment 108545 PARAMETER Experiment Name: Zm_Imbibed_Seeds_P Parameter: Tissue Value: Aerial vs. Embryo
  misc_feature: MA Experiment ID: 108547 Result: Up-regulated in Transcription
  misc_feature: MA Experiment 108547 PARAMETER Experiment Name: Zm_Imbibed_Seeds_P Parameter: Age (day) Value: 4 vs. 2
  misc_feature: MA Experiment 108547 PARAMETER Experiment Name: Zm_Imbibed_Seeds_P Parameter: Organism Value: Zea mays
  misc_feature: MA Experiment 108547 PARAMETER Experiment Name: Zm_Imbibed_Seeds_P Parameter: Plant Line Value: 35A19
  misc_feature: MA Experiment 108547 PARAMETER Experiment Name: Zm_Imbibed_Seeds_P Parameter: Tissue Value: Aerial vs. Embryo
  misc_feature: MA Experiment ID: 108556 Result: Down-regulated in Transcription
  misc_feature: MA Experiment 108556 PARAMETER Experiment Name: Zm_Drought_P Parameter: Age (day) Value: 9
  misc_feature: MA Experiment 108556 PARAMETER Experiment Name: Zm_Drought_P Parameter: Organism Value: Zea mays
  misc_feature: MA Experiment 108556 PARAMETER Experiment Name: Zm_Drought_P Parameter: Plant Line Value: 35A19
  misc_feature: MA Experiment 108556 PARAMETER Experiment Name: Zm_Drought_P Parameter: Timepoint (hr) Value: 24
  misc_feature: MA Experiment 108556 PARAMETER Experiment Name: Zm_Drought_P Parameter: Tissue Value: Aerial
  misc_feature: MA Experiment 108556 PARAMETER Experiment Name: Zm_Drought_P Parameter: Treatment Value: Drought vs. No Drought
  misc_feature: MA Experiment ID: 108687 Result: Down-regulated in Transcription
  misc_feature: MA Experiment 108687 PARAMETER Experiment Name: Zm_Embryos-Flowers__P Parameter: Tissue Value: Embryo vs. Aerial+
  misc_feature: MA Experiment ID: 20000477 Result: Down-regulated in Transcription
  misc_feature: MA Experiment 20000477 PARAMETER Experiment Name: Zm_5mM_SA_P Parameter: Age (day) Value: 10
  misc_feature: MA Experiment 20000477 PARAMETER Experiment Name: Zm_5mM_SA_P Parameter: Organism Value: Zea mays
  misc_feature: MA Experiment 20000477 PARAMETER Experiment Name: Zm_5mM_SA_P Parameter: Plant Line Value: 35A19
  misc_feature: MA Experiment 20000477 PARAMETER Experiment Name: Zm_5mM_SA_P Parameter: Timepoint (hr) Value: 48
  misc_feature: MA Experiment 20000477 PARAMETER Experiment Name: Zm_5mM_SA_P Parameter: Tissue Value: Aerial
  misc_feature: MA Experiment 20000477 PARAMETER Experiment Name: Zm_5mM_SA_P Parameter: Treatment Value: 5mM SA vs. No Treatment
  misc_feature: MA Experiment ID: 20000492 Result: Down-regulated in Transcription
  misc_feature: MA Experiment 20000492 PARAMETER Experiment Name: Zm_Hybrid_Seed_Dev_P Parameter: DAP Value: 12
  misc_feature: MA Experiment 20000492 PARAMETER Experiment Name: Zm_Hybrid_Seed_Dev_P Parameter: Organism Value: Zea mays
  misc_feature: MA Experiment 20000492 PARAMETER Experiment Name: Zm_Hybrid_Seed_Dev_P Parameter: Plant Line Value: 35A19
  misc_feature: MA Experiment 20000492 PARAMETER Experiment Name: Zm_Hybrid_Seed_Dev_P Parameter: Tissue Value: Fert Kernel vs. Unfert Floret
  misc_feature: MA Experiment ID: 20000534 Result: Down-regulated in Transcription
  misc_feature: MA Experiment 20000534 PARAMETER Experiment Name: Zm_Hybrid_Pollen_P Parameter: Age (day) Value: 8
  misc_feature: MA Experiment 20000534 PARAMETER Experiment Name: Zm_Hybrid_Pollen_P Parameter: Organism Value: Zea mays
  misc_feature: MA Experiment 20000534 PARAMETER Experiment Name: Zm_Hybrid_Pollen_P Parameter: Plant Line Value: 35A19
  misc_feature: MA Experiment 20000534 PARAMETER Experiment Name: Zm_Hybrid_Pollen_P Parameter: Tissue Value: Pollen vs. Aerial
gttgcctctccttttcacccgttcctcgtctccctcctgcggtcctgccccccctcccctgcagccgctccctccatggcgtccttcgtcgtgcaccaccacggttcgccgctggacagggagggcaaggtcaagatgtccgccctggccctgaggagtagcctcaggccgtgcgaggccgccgaggaggtcggggccgggcaggcgtggtgcagaggcgcggacatgggcgtcgccgcctttgtcgacgagttctccgtggaggacttgctggacctcgaggacctctgcgaggttgacaaggactgcgccgagctgggcgacacggtgccggcggcggagtctgtgcaggaaggggacaaggtgtccagtgactcccacgggtcgtcggtgctgtcctacgagctcatgacgctcccggttccgcacccgatgattgacctcccgttgccggcccatgacgccgaggagctggagtgggtgtcccgtatcatggacgactcgctcgccgagctcccgccgccaccgaagctacccgcggcgccgttgggagctgcgcggcggccgctggaaggcgcagtggcaggccctatgcggagcccgaccacgaccatatgcgcgctgtcgacggaggcgctagtgccggtgacgagggcgaagcgcagcaagcgctcgcgtggctccgtgtggtcgctgtccggcggagcgcccctgtcggagtcgacgtcgtcgtcttccacggccaccacgtcgtcctgctcctcgtccgcctctttctcgccgctgttactccttccggcggacccgtccctcgtcctatcctcgcacctcctcgacgagacgccgcggcccaagaagaagtccaagcacgggaagcatggcaagagcggcaagcccaagaagcgcggccgcaagccgaagcaccaccccaagccgccccagttctcgggcggcgccgcctacgcgccggcccagggcgaccggcgctgcagccattgcggcgtgcagaagacgccgcagtggcgcgcgggccccgagggcgccaagacgctgtgcaacgcgtgcggggtccgttacaagtccgggcggctgctcccggagtaccgtccggcttgcagccccaccttcgtgagcagcatacactccaactcccaccgcaaggtgctggagatgcgccgcaagaaggatggcgaccttggtcagctcccgctcccagtcccggccgcgcttctgcttgggccggccgtcgagtcgttctagccggcgctgtacattttttcgtccgcgggtggagctgtttaacctgctgtaccgtacttggttttttttttctttctcttccacttctatatttagtagttgtgctgtactatttagctagagctctgaattgtagaagctttattaggtcgagttaggtagtagagattaagatttccatggttgattaggattgttagggtatgtatggccatagtacttgtggtagtagttaagaacttggtgaggtgtttggcctgacctacgaggaatgatgttgtcatgtcgaggcgctgctggcaccagtgacaagaaagttaggcgtgccttggcgcggaacatggaactgtctgccttgttgtaatcgagagtgtcaggcgagtaagaaagtgattgtttgcattgccg

SEQ ID NO: 7827 - protein, 419 aa, Zea mays subsp. mays
  peptide (1)..(419): Ceres Seq. ID no. 12373505
  misc_feature (39)..(302): Homolog of NCBI NO: 38344977 NR Description: OSJNBa0011L07.7 [Oryza sativa (japonica
  misc_feature (323)..(419): Homolog of NCBI NO: 38344977 NR Description: OSJNBa0011L07.7 [Oryza sativa (japonica
  misc_feature (86)..(223): Homolog of NCBI NO: 15232355 NR Description: GATA zinc finger protein; protein id: supported by cDNA: gi_14190406, supported by cDNA: gi_14517394, by cDNA: gi_15215890 [Arabidopsis thaliana]
  misc_feature (310)..(396): Homolog of NCBI NO: 15232355 NR Description: GATA zinc finger protein; protein id: supported by cDNA: gi_14190406, supported by cDNA: gi_14517394, by cDNA: gi_15215890 [Arabidopsis thaliana]
  misc_feature (83)..(396): Homolog of NCBI NO: 34909448 NR Description: OSJNBa0014K08.18 [Oryza sativa (japonica
  misc_feature (281)..(396): Homolog of NCBI NO: 15225399 NR Description: GATA zinc finger protein; protein id: At2g45050.1
  misc_feature (86)..(176): Homolog of NCBI NO: 15225399 NR Description: GATA zinc finger protein; protein id: At2g45050.1
  misc_feature (213)..(394): Homolog of NCBI NO: 15451574 NR Description: Putative GATA-1 zinc finger protein [Oryza sativa]
  misc_feature (306)..(396): Homolog of NCBI NO: 15239343 NR Description: GATA zinc finger protein; protein id: At5g66320.1
  misc_feature (48)..(167): Homolog of NCBI NO: 15236172 NR Description: GATA transcription factor 3; protein id: supported by cDNA: gi_20466647 [Arabidopsis thaliana]
VASPFHPFLVSLLRSCPPSPAAAPSMASFVVHHHGSPLDREGKVKMSALALRSSLRPCEAAEEVGAGQAWCRGADMGVAAFVDEFSVEDLLDLEDLCEVDKDCAELGDTVPAAESVQEGDKVSSDSHGSSVLSYELMTLPVPHPMIDLPLPAHDAEELEWVSRIMDDSLAELPPPPKLPAAPLGAARRPLEGAVAGPMRSPTTTICALSTEALVPVTRAKRSKRSRGSVWSLSGGAPLSESTSSSSTATTSSCSSSASFSPLLLLPADPSLVLSSHLLDETPRPKKKSKHGKHGKSGKPKKRGRKPKHHPKPPQFSGGAAYAPAQGDRRCSHCGVQKTPQWRAGPEGAKTLCNACGVRYKSGRLLPEYRPACSPTFVSSIHSNSHRKVLEMRRKKDGDLGQLPLPVPAALLLGPAVESF

SEQ ID NO: 7828 - protein, 394 aa, Zea mays subsp. mays
  peptide (1)..(394): Ceres Seq. ID no. 12373506
  misc_feature (14)..(277): Homolog of NCBI NO: 38344977 NR Description: OSJNBa0011L07.7 [Oryza sativa (japonica
  misc_feature (298)..(394): Homolog of NCBI NO: 38344977 NR Description: OSJNBa0011L07.7 [Oryza sativa (japonica
  misc_feature (61)..(198): Homolog of NCBI NO: 15232355 NR Description: GATA zinc finger protein; protein id: supported by cDNA: gi_14190406, supported by cDNA: gi_14517394, by cDNA: gi_15215890 [Arabidopsis thaliana]
  misc_feature (285)..(371): Homolog of NCBI NO: 15232355 NR Description: GATA zinc finger protein; protein id: supported by cDNA: gi_14190406, supported by cDNA: gi_14517394, by cDNA: gi_15215890 [Arabidopsis thaliana]
  misc_feature (58)..(371): Homolog of NCBI NO: 34909448 NR Description: OSJNBa0014K08.18 [Oryza sativa (japonica
  misc_feature (256)..(371): Homolog of NCBI NO: 15225399 NR Description: GATA zinc finger protein; protein id: At2g45050.1
  misc_feature (61)..(151): Homolog of NCBI NO: 15225399 NR Description: GATA zinc finger protein; protein id: At2g45050.1
  misc_feature (188)..(369): Homolog of NCBI NO: 15451574 NR Description: Putative GATA-1 zinc finger protein [Oryza sativa]
  misc_feature (281)..(371): Homolog of NCBI NO: 15239343 NR Description: GATA zinc finger protein; protein id: At5g66320.1
  misc_feature (23)..(142): Homolog of NCBI NO: 15236172 NR Description: GATA transcription factor 3; protein id: supported by cDNA: gi_20466647 [Arabidopsis thaliana]
MASFVVHHHGSPLDREGKVKMSALALRSSLRPCEAAEEVGAGQAWCRGADMGVAAFVDEFSVEDLLDLEDLCEVDKDCAELGDTVPAAESVQEGDKVSSDSHGSSVLSYELMTLPVPHPMIDLPLPAHDAEELEWVSRIMDDSLAELPPPPKLPAAPLGAARRPLEGAVAGPMRSPTTTICALSTEALVPVTRAKRSKRSRGSVWSLSGGAPLSESTSSSSTATTSSCSSSASFSPLLLLPADPSLVLSSHLLDETPRPKKKSKHGKHGKSGKPKKRGRKPKHHPKPPQFSGGAAYAPAQGDRRCSHCGVQKTPQWRAGPEGAKTLCNACGVRYKSGRLLPEYRPACSPTFVSSIHSNSHRKVLEMRRKKDGDLGQLPLPVPAALLLGPAVESF

SEQ ID NO: 7829 - protein, 374 aa, Zea mays subsp. mays
  peptide (1)..(374): Ceres Seq. ID no. 12373507
  misc_feature (1)..(257): Homolog of NCBI NO: 38344977 NR Description: OSJNBa0011L07.7 [Oryza sativa (japonica
  misc_feature (278)..(374): Homolog of NCBI NO: 38344977 NR Description: OSJNBa0011L07.7 [Oryza sativa (japonica
  misc_feature (41)..(178): Homolog of NCBI NO: 15232355 NR Description: GATA zinc finger protein; protein id: supported by cDNA: gi_14190406, supported by cDNA: gi_14517394, by cDNA: gi_15215890 [Arabidopsis thaliana]
  misc_feature (265)..(351): Homolog of NCBI NO: 15232355 NR Description: GATA zinc finger protein; protein id: supported by cDNA: gi_14190406, supported by cDNA: gi_14517394, by cDNA: gi_15215890 [Arabidopsis thaliana]
  misc_feature (38)..(351): Homolog of NCBI NO: 34909448 NR Description: OSJNBa0014K08.18 [Oryza sativa (japonica
  misc_feature (236)..(351): Homolog of NCBI NO: 15225399 NR Description: GATA zinc finger protein; protein id: At2g45050.1
  misc_feature (41)..(131): Homolog of NCBI NO: 15225399 NR Description: GATA zinc finger protein; protein id: At2g45050.1
  misc_feature (168)..(349): Homolog of NCBI NO: 15451574 NR Description: Putative GATA-1 zinc finger protein [Oryza sativa]
  misc_feature (261)..(351): Homolog of NCBI NO: 15239343 NR Description: GATA zinc finger protein; protein id: At5g66320.1
  misc_feature (3)..(122): Homolog of NCBI NO: 15236172 NR Description: GATA transcription factor 3; protein id: supported by cDNA: gi_20466647 [Arabidopsis thaliana]
MSALALRSSLRPCEAAEEVGAGQAWCRGADMGVAAFVDEFSVEDLLDLEDLCEVDKDCAELGDTVPAAESVQEGDKVSSDSHGSSVLSYELMTLPVPHPMIDLPLPAHDAEELEWVSRIMDDSLAELPPPPKLPAAPLGAARRPLEGAVAGPMRSPTTTICALSTEALVPVTRAKRSKRSRGSVWSLSGGAPLSESTSSSSTATTSSCSSSASFSPLLLLPADPSLVLSSHLLDETPRPKKKSKHGKHGKSGKPKKRGRKPKHHPKPPQFSGGAAYAPAQGDRRCSHCGVQKTPQWRAGPEGAKTLCNACGVRYKSGRLLPEYRPACSPTFVSSIHSNSHRKVLEMRRKKDGDLGQLPLPVPAALLLGPAVESF

SEQ ID NO: 7830 - DNA, 1545 bp, Zea mays subsp. mays
  misc_feature (1)..(1545): Ceres Seq. ID no. 12352572
  misc_feature: MA Experiment ID: 108523 Result: Down-regulated in Transcription
  misc_feature: MA Experiment 108523 PARAMETER Experiment Name: Zm_42deg_Heat_P Parameter: Age (day) Value: 8
  misc_feature: MA Experiment 108523 PARAMETER Experiment Name: Zm_42deg_Heat_P Parameter: Organism Value: Zea mays
  misc_feature: MA Experiment 108523 PARAMETER Experiment Name: Zm_42deg_Heat_P Parameter: Plant Line Value: 35A19
  misc_feature: MA Experiment 108523 PARAMETER Experiment Name: Zm_42deg_Heat_P Parameter: Temperature (deg C) Value: 42 vs. 22
  misc_feature: MA Experiment 108523 PARAMETER Experiment Name: Zm_42deg_Heat_P Parameter: Timepoint (hr) Value: 6
  misc_feature: MA Experiment 108523 PARAMETER Experiment Name: Zm_42deg_Heat_P Parameter: Tissue Value: Aerial
  misc_feature: MA Experiment ID: 108556 Result: Down-regulated in Transcription
  misc_feature: MA Experiment 108556 PARAMETER Experiment Name: Zm_Drought_P Parameter: Age (day) Value: 9
  misc_feature: MA Experiment 108556 PARAMETER Experiment Name: Zm_Drought_P Parameter: Organism Value: Zea mays
  misc_feature: MA Experiment 108556 PARAMETER Experiment Name: Zm_Drought_P Parameter: Plant Line Value: 35A19
  misc_feature: MA Experiment 108556 PARAMETER Experiment Name: Zm_Drought_P Parameter: Timepoint (hr) Value: 24
  misc_feature: MA Experiment 108556 PARAMETER Experiment Name: Zm_Drought_P Parameter: Tissue Value: Aerial
  misc_feature: MA Experiment 108556 PARAMETER Experiment Name: Zm_Drought_P Parameter: Treatment Value: Drought vs. No Drought
  misc_feature: MA Experiment ID: 20000492 Result: Down-regulated in Transcription
  misc_feature: MA Experiment 20000492 PARAMETER Experiment Name: Zm_Hybrid_Seed_Dev_P Parameter: DAP Value: 12
  misc_feature: MA Experiment 20000492 PARAMETER Experiment Name: Zm_Hybrid_Seed_Dev_P Parameter: Organism Value: Zea mays
  misc_feature: MA Experiment 20000492 PARAMETER Experiment Name: Zm_Hybrid_Seed_Dev_P Parameter: Plant Line Value: 35A19
  misc_feature: MA Experiment 20000492 PARAMETER Experiment Name: Zm_Hybrid_Seed_Dev_P Parameter: Tissue Value: Fert Kernel vs. Unfert Floret
  misc_feature: MA Experiment ID: 20000535 Result: Down-regulated in Transcription
  misc_feature: MA Experiment 20000535 PARAMETER Experiment Name: Zm_Hybrid_Seed_Dev_P Parameter: DAP Value: 30 vs. 12
  misc_feature: MA Experiment 20000535 PARAMETER Experiment Name: Zm_Hybrid_Seed_Dev_P Parameter: Organism Value: Zea mays
  misc_feature: MA Experiment 20000535 PARAMETER Experiment Name: Zm_Hybrid_Seed_Dev_P Parameter: Plant Line Value: 35A19
  misc_feature: MA Experiment 20000535 PARAMETER Experiment Name: Zm_Hybrid_Seed_Dev_P Parameter: Tissue Value: Embryo vs. Unfert Floret
aaatcacctgttcccgcgacctcctccccggcgtacctccagtctccagagatccacacgaccacaccgacccaccaccatctgcatcggcaatggacgccgcgccacccaccataaccaagtccccgccgtccctggttccaccagcggggcccactcccggtggttccctcccgctctcctccatcgacaagaccgccgccgtccgtgtctccgtcgacttcatccaggtcttccccgcccctacgtcggggaaggaggactggagcccctcatctgcgatcgcggccatgcgcgagggctttgccagggcgctcgtgccgtactaccctatcgccggccgcatcgccgagcccgtgcctggtgagcctgagattgagtgcacgggggaaggggtgtggttcgtggaggctgaggcaagctgctccctcgaggaggcgcgtaacctcgagcgcccgctgtgcatcccgaaggaggagctgctcccgcgtccgccggccggtgtgcgcgtggaggacaccctgctgctcgcgcaggttacaaagttcacatgtggtgggttttctgtgggcatttgcttcagtcacttggtgttcgacgggcagggtgctgcgcaatttctgaaagcagttggtgagatggctaggggcctccctgagccatcgatcaagccaatctgggctcgtgatgccatccccaacccacctaagccacccctaggcccgccaccgtcattcaccgcattcaacttcgagaaatcagtcgtcgagatcgctctggacagcatcaagcgcgtgaaggatcaagttgcaagcgaaaccaaccagaagtgttccactttcgacgtggtcaccgccatgatcttcaaatgtcgcgccttggcagtcgacttcgcacctgacgctgaggttcgcctgggctttgcagccagcactcgccacctgctgagcaatgtgctgccctccgtcgatggctactacgggaactgtgtgtacccaggtggtctcaccaagaccagccaggaggtgaaggaagcttcactggtggagatcgtgaccgcgatcagggaggccaaggaggctctgtcgtcgaggttcctcgactggttgagcggcggcgccaaggagaaccactacaacgtgtcgctggactacggcaccctcgtcgtgaccgactggagccacgtgggtttcaacgacgttgactacgggttcggtgagccaagctacgtgttcaccctgaacgacgacgtgaacatcgttccctccgttgtgtacctgaagcctcccaagccgaagcagggcatcaggctggtgctgcagtgcgtggaagggcggcactctgccgtgttcagcgaggagctgcagaagcacgcatagagcgagtgtattccatcccacagtggagattgttgtattttgttgtgtcgaattgctgcccccggaatttgcttgcaataagatagggttggcacgtgtttatactctgtactgttatctcagcacgttacattatacatgtattgagtgagtattgacagtggtg

SEQ ID NO: 7831 - protein, 458 aa, Zea mays subsp. mays
  peptide (1)..(458): Ceres Seq. ID no. 12352573
  misc_feature (38)..(456): Pfam Name: Transferase family Pfam Description: Transferase family
  misc_feature (34)..(458): Homolog of NCBI NO: 34912654 NR Description: putative acetyl transferase [Oryza sativa
  misc_feature (28)..(458): Homolog of NCBI NO: 34912652 NR Description: putative acetyl transferase [Oryza sativa
  misc_feature (38)..(450): Homolog of NCBI NO: 34906304 NR Description: unnamed protein product [Oryza sativa (japonica group)] >gi|9558426|dbj|BAB03362.1| unnamed protein product
  misc_feature (33)..(454): Homolog of NCBI NO: 34906150 NR Description: putative 0-deacetylbaccatin III-10-O-acetyl
  misc_feature (37)..(452): Homolog of NCBI NO: 15228696 NR Description: putative protein; protein id: At3g62160.1
  misc_feature (186)..(458): Homolog of NCBI NO: 18558566 NR Description: putative 0-deacetylbaccatin III-10-O-acetyl
  misc_feature (38)..(454): Homolog of NCBI NO: 38347149 NR Description: OSJNBa0039G19.9 [Oryza sativa (japonica
  misc_feature (38)..(442): Homolog of NCBI NO: 28558088 NR Description: 3'-N-debenzoyl-2'-deoxytaxol N-benzoyltransferase
  misc_feature (38)..(455): Homolog of NCBI NO: 38346537 NR Description: OSJNBa0040D17.12 [Oryza sativa (japonica
  misc_feature (38)..(454): Homolog of NCBI NO: 37530684 NR Description: putative O-deacetylbaccatin
ITCSRDLLPGVPPVSRDPHDHTDPPPSASAMDAAPPTITKSPPSLVPPAGPTPGGSLPLSSIDKTAAVRVSVDFIQVFPAPTSGKEDWSPSSAIAAMREGFARALVPYYPIAGRIAEPVPGEPEIECTGEGVWFVEAEASCSLEEARNLERPLCIPKEELLPRPPAGVRVEDTLLLAQVTKFTCGGFSVGICFSHLVFDGQGAAQFLKAVGEMARGLPEPSIKPIWARDAIPNPPKPPLGPPPSFTAFNFEKSVVEIALDSIKRVKDQVASETNQKCSTFDVVTAMIFKCRALAVDFAPDAEVRLGFAASTRHLLSNVLPSVDGYYGNCVYPGGLTKTSQEVKEASLVEIVTAIREAKEALSSRFLDWLSGGAKENHYNVSLDYGTLVVTDWSHVGFNDVDYGFGEPSYVFTLNDDVNIVPSVVYLKPPKPKQGIRLVLQCVEGRHSAVFSEELQKHA

SEQ ID NO: 7832 - protein, 428 aa, Zea mays subsp. mays
  peptide (1)..(428): Ceres Seq. ID no. 12352574
  misc_feature (8)..(426): Pfam Name: Transferase family Pfam Description: Transferase family
  misc_feature (4)..(428): Homolog of NCBI NO: 34912654 NR Description: putative acetyl transferase [Oryza sativa
  misc_feature (1)..(428): Homolog of NCBI NO: 34912652 NR Description: putative acetyl transferase [Oryza sativa
  misc_feature (8)..(420): Homolog of NCBI NO: 34906304 NR Description: unnamed protein product [Oryza sativa (japonica group)] >gi|9558426|dbj|BAB03362.1| unnamed protein product
  misc_feature (3)..(424): Homolog of NCBI NO: 34906150 NR Description: putative 0-deacetylbaccatin III-10-O-acetyl
  misc_feature (7)..(422): Homolog of NCBI NO: 15228696 NR Description: putative protein; protein id: At3g62160.1
  misc_feature (156)..(428): Homolog of NCBI NO: 18558566 NR Description: putative 0-deacetylbaccatin III-10-O-acetyl
  misc_feature (8)..(424): Homolog of NCBI NO: 38347149 NR Description: OSJNBa0039G19.9 [Oryza sativa (japonica
  misc_feature (8)..(412): Homolog of NCBI NO: 28558088 NR Description: 3'-N-debenzoyl-2'-deoxytaxol N-benzoyltransferase
  misc_feature (8)..(425): Homolog of NCBI NO: 38346537 NR Description: OSJNBa0040D17.12 [Oryza sativa (japonica
  misc_feature (8)..(424): Homolog of NCBI NO: 37530684 NR Description: putative O-deacetylbaccatin
MDAAPPTITKSPPSLVPPAGPTPGGSLPLSSIDKTAAVRVSVDFIQVFPAPTSGKEDWSPSSAIAAMREGFARALVPYYPIAGRIAEPVPGEPEIECTGEGVWFVEAEASCSLEEARNLERPLCIPKEELLPRPPAGVRVEDTLLLAQVTKFTCGGFSVGICFSHLVFDGQGAAQFLKAVGEMARGLPEPSIKPIWARDAIPNPPKPPLGPPPSFTAFNFEKSVVEIALDSIKRVKDQVASETNQKCSTFDVVTAMIFKCRALAVDFAPDAEVRLGFAASTRHLLSNVLPSVDGYYGNCVYPGGLTKTSQEVKEASLVEIVTAIREAKEALSSRFLDWLSGGAKENHYNVSLDYGTLVVTDWSHVGFNDVDYGFGEPSYVFTLNDDVNIVPSVVYLKPPKPKQGIRLVLQCVEGRHSAVFSEELQKHA

SEQ ID NO: 7833 - protein, 362 aa, Zea mays subsp. mays
  peptide (1)..(362): Ceres Seq. ID no. 12352575
  misc_feature (1)..(360): Pfam Name: Transferase family Pfam Description: Transferase family
  misc_feature (1)..(362): Homolog of NCBI NO: 34912654 NR Description: putative acetyl transferase [Oryza sativa
  misc_feature (1)..(362): Homolog of NCBI NO: 34912652 NR Description: putative acetyl transferase [Oryza sativa
  misc_feature (1)..(354): Homolog of NCBI NO: 34906304 NR Description: unnamed protein product [Oryza sativa (japonica group)] >gi|9558426|dbj|BAB03362.1| unnamed protein product
  misc_feature (1)..(358): Homolog of NCBI NO: 34906150 NR Description: putative 0-deacetylbaccatin III-10-O-acetyl
  misc_feature (1)..(356): Homolog of NCBI NO: 15228696 NR Description: putative protein; protein id: At3g62160.1
  misc_feature (90)..(362): Homolog of NCBI NO: 18558566 NR Description: putative 0-deacetylbaccatin III-10-O-acetyl
  misc_feature (1)..(358): Homolog of NCBI NO: 38347149 NR Description: OSJNBa0039G19.9 [Oryza sativa (japonica
  misc_feature (1)..(346): Homolog of NCBI NO: 28558088 NR Description: 3'-N-debenzoyl-2'-deoxytaxol N-benzoyltransferase
  misc_feature (1)..(359): Homolog of NCBI NO: 38346537 NR Description: OSJNBa0040D17.12 [Oryza sativa (japonica
  misc_feature (1)..(358): Homolog of NCBI NO: 37530684 NR Description: putative O-deacetylbaccatin
MREGFARALVPYYPIAGRIAEPVPGEPEIECTGEGVWFVEAEASCSLEEARNLERPLCIPKEELLPRPPAGVRVEDTLLLAQVTKFTCGGFSVGICFSHLVFDGQGAAQFLKAVGEMARGLPEPSIKPIWARDAIPNPPKPPLGPPPSFTAFNFEKSVVEIALDSIKRVKDQVASETNQKCSTFDVVTAMIFKCRALAVDFAPDAEVRLGFAASTRHLLSNVLPSVDGYYGNCVYPGGLTKTSQEVKEASLVEIVTAIREAKEALSSRFLDWLSGGAKENHYNVSLDYGTLVVTDWSHVGFNDVDYGFGEPSYVFTLNDDVNIVPSVVYLKPPKPKQGIRLVLQCVEGRHSAVFSEELQKHA

SEQ ID NO: 7834 - DNA, 1228 bp, Zea mays subsp. mays
  misc_feature (1)..(1228): Ceres Seq. ID no. 12345382
  misc_feature: MA Experiment ID: 108530 Result: Down-regulated in Transcription
  misc_feature: MA Experiment 108530 PARAMETER Experiment Name: Zm_Imbibed_Seeds_P Parameter: Age (day) Value: 6 vs. 2
  misc_feature: MA Experiment 108530 PARAMETER Experiment Name: Zm_Imbibed_Seeds_P Parameter: Organism Value: Zea mays
  misc_feature: MA Experiment 108530 PARAMETER Experiment Name: Zm_Imbibed_Seeds_P Parameter: Plant Line Value: 35A19
  misc_feature: MA Experiment 108530 PARAMETER Experiment Name: Zm_Imbibed_Seeds_P Parameter: Tissue Value: Aerial vs. Embryo
  misc_feature: MA Experiment ID: 108535 Result: Up-regulated in Transcription
  misc_feature: MA Experiment 108535 PARAMETER Experiment Name: Zm_Meristem_P Parameter: Age (day) Value: 8
  misc_feature: MA Experiment 108535 PARAMETER Experiment Name: Zm_Meristem_P Parameter: Organism Value: Zea mays
  misc_feature: MA Experiment 108535 PARAMETER Experiment Name: Zm_Meristem_P Parameter: Plant Line Value: 35A19
  misc_feature: MA Experiment 108535 PARAMETER Experiment Name: Zm_Meristem_P Parameter: Tissue Value: Root Meristem vs. Above Root Meristem
  misc_feature: MA Experiment ID: 108544 Result: Down-regulated in Transcription
  misc_feature: MA Experiment ID: 20000478 Result: Down-regulated in Transcription
  misc_feature: MA Experiment 20000478 PARAMETER Experiment Name: Zm_5mM_SA_P Parameter: Age (day) Value: 11
  misc_feature: MA Experiment 20000478 PARAMETER Experiment Name: Zm_5mM_SA_P Parameter: Organism Value: Zea mays
  misc_feature: MA Experiment 20000478 PARAMETER Experiment Name: Zm_5mM_SA_P Parameter: Plant Line Value: 35A19
  misc_feature: MA Experiment 20000478 PARAMETER Experiment Name: Zm_5mM_SA_P Parameter: Timepoint (hr) Value: 72
  misc_feature: MA Experiment 20000478 PARAMETER Experiment Name: Zm_5mM_SA_P Parameter: Tissue Value: Aerial
  misc_feature: MA Experiment 20000478 PARAMETER Experiment Name: Zm_5mM_SA_P Parameter: Treatment Value: 5mM SA vs. No Treatment
  misc_feature: MA Experiment ID: 20000487 Result: Up-regulated in Transcription
  misc_feature: MA Experiment 20000487 PARAMETER Experiment Name: Zm_50mM_NH4NO3_L_to_H_P Parameter: Organism Value: Zea mays
  misc_feature: MA Experiment 20000487 PARAMETER Experiment Name: Zm_50mM_NH4NO3_L_to_H_P Parameter: Timepoint (hr) Value: 4
  misc_feature: MA Experiment 20000487 PARAMETER Experiment Name: Zm_50mM_NH4NO3_L_to_H_P Parameter: Tissue Value: Leaves
  misc_feature: MA Experiment 20000487 PARAMETER Experiment Name: Zm_50mM_NH4NO3_L_to_H_P Parameter: Treatment Value: 50mM NH4NO3 vs. 100mM Mannitol
  misc_feature: MA Experiment ID: 20000488 Result: Up-regulated in Transcription
  misc_feature: MA Experiment 20000488 PARAMETER Experiment Name: Zm_50mM_NH4NO3_L_to_H_P Parameter: Organism Value: Zea mays
  misc_feature: MA Experiment 20000488 PARAMETER Experiment Name: Zm_50mM_NH4NO3_L_to_H_P Parameter: Timepoint (hr) Value: 8
  misc_feature: MA Experiment 20000488 PARAMETER Experiment Name: Zm_50mM_NH4NO3_L_to_H_P Parameter: Tissue Value: Leaves
  misc_feature: MA Experiment 20000488 PARAMETER Experiment Name: Zm_50mM_NH4NO3_L_to_H_P Parameter: Treatment Value: 50mM NH4NO3 vs. 100mM Mannitol
  misc_feature: MA Experiment ID: 20000535 Result: Up-regulated in Transcription
  misc_feature: MA Experiment 20000535 PARAMETER Experiment Name: Zm_Hybrid_Seed_Dev_P Parameter: DAP Value: 30 vs. 12
  misc_feature: MA Experiment 20000535 PARAMETER Experiment Name: Zm_Hybrid_Seed_Dev_P Parameter: Organism Value: Zea mays
  misc_feature: MA Experiment 20000535 PARAMETER Experiment Name: Zm_Hybrid_Seed_Dev_P Parameter: Plant Line Value: 35A19
  misc_feature: MA Experiment 20000535 PARAMETER Experiment Name: Zm_Hybrid_Seed_Dev_P Parameter: Tissue Value: Embryo vs. Unfert Floret
  misc_feature: MA Experiment ID: 20000626 Result: Up-regulated in Transcription
  misc_feature: MA Experiment 20000626 PARAMETER Experiment Name: Zm_Herbicide-Treatments_P Parameter: Timepoint (hr) Value: 12
  misc_feature: MA Experiment 20000626 PARAMETER Experiment Name: Zm_Herbicide-Treatments_P Parameter: Tissue Value: Aerial
  misc_feature: MA Experiment 20000626 PARAMETER Experiment Name: Zm_Herbicide-Treatments_P Parameter: Treatment Value: Roundup vs. No Treatment
ctctctgtcgcatttcccgtcctgtccttcccttacccggcggcttaaaccctagttctcactcccatcgccgcttcagctccgccgcagcagatggagttctggggtctcgaggtcaagcctggttccactgttaagtgtgagcctggatatggctttgtgctgcacctttcccaggctgctcttggggaatcgaagaagagtgataatgccttgatgtatgtcaaaattgatgatcagaaacttgccattggaaccctctctgttgacaagaacccacacatacaatttgatctggttttcgataaagagtttgagctgtcgcacacatcaaaaactaccagcgtcttcttcactggctacaaggttgagcagccattcgaggaagatgagccttcttccacaatggatcttgattctgaagatgaagacgaggagcgggatgttccagtagtcaaggaaaatggcaaagctgatgggaagaaacagaaaagtcaagaaaaggcagttgctgcaccttcaaaatcaagtccggattccaagaagagcaaggatgacgatgattctgatgaggacgagactgatgattctgatgaggatgagacggacgattctgatgagggtttatcttctgaagaaggcgatgatgattcaagtgatgaagatgataccagtgacgatgaggaggaagacactccaactcctaagaagcctgaggtaggcaagaagagagctgctgaaagttccgtgctgaaaactcctctatctgataagaaagcaaaggttgccacaccgtcatctcagaagacaggtggcaagaagggcgccgccgtccatgtggcaactccacacccagcaaaaggcaagaccattgtaaacaatgacaaatcggtcaagtctccaaaatctgcgccaaaatctggtgtcccttgcaaatcgtgcagcaagtcattcatcagtcagacggcacttcaggctcactcgaaggcgaagcatgggggcaagtgagtcgcaggtccaatagagtcaacaacaaatgcgaaacatgggagaggagggtaagcgagagtctcgaaagagtgtcggtggaagtaggcctaaccttattttgtttagagacgggctatgcgttcgatgtagcaaaacaaggctgtggtttgtgtacttcaatatttgggttgtgtgtttcgaatttttttttgaacgtgtctcggattgttgtggtgcc

SEQ ID NO: 7835 - protein, 304 aa, Zea mays subsp. mays
  peptide (1)..(304): Ceres Seq. ID no. 12345383
  misc_feature (19)..(200): Pfam Name: Nucleoplasmin Pfam Description: Nucleoplasmin
  misc_feature (1)..(304): Homolog of NCBI NO: 7716950 NR Description: histone deacetylase 2 isoform c [Zea mays]
  misc_feature (1)..(302): Homolog of NCBI NO: 7489751 NR Description: histone deacetylase (EC 3.5.1.-) HD2-p39,
  misc_feature (1)..(304): Homolog of NCBI NO: 7716948 NR Description: histone deacetylase 2 isoform b [Zea mays]
  misc_feature (1)..(304): Homolog of NCBI NO: 7804960 NR Description: putative histone deacetylase HD2 [Oryza sativa]
MEFWGLEVKPGSTVKCEPGYGFVLHLSQAALGESKKSDNALMYVKIDDQKLAIGTLSVDKNPHIQFDLVFDKEFELSHTSKTTSVFFTGYKVEQPFEEDEPSSTMDLDSEDEDEERDVPVVKENGKADGKKQKSQEKAVAAPSKSSPDSKKSKDDDDSDEDETDDSDEDETDDSDEGLSSEEGDDDSSDEDDTSDDEEEDTPTPKKPEVGKKRAAESSVLKTPLSDKKAKVATPSSQKTGGKKGAAVHVATPHPAKGKTIVNNDKSVKSPKSAPKSGVPCKSCSKSFISQTALQAHSKAKHGGK

SEQ ID NO: 7836 - protein, 263 aa, Zea mays subsp. mays
  peptide (1)..(263): Ceres Seq. ID no. 12345384
  misc_feature (1)..(159): Pfam Name: Nucleoplasmin Pfam Description: Nucleoplasmin
  misc_feature (1)..(263): Homolog of NCBI NO: 7716950 NR Description: histone deacetylase 2 isoform c [Zea mays]
  misc_feature (1)..(261): Homolog of NCBI NO: 7489751 NR Description: histone deacetylase (EC 3.5.1.-) HD2-p39,
  misc_feature (1)..(263): Homolog of NCBI NO: 7716948 NR Description: histone deacetylase 2 isoform b [Zea mays]
  misc_feature (1)..(263): Homolog of NCBI NO: 7804960 NR Description: putative histone deacetylase HD2 [Oryza sativa]
MYVKIDDQKLAIGTLSVDKNPHIQFDLVFDKEFELSHTSKTTSVFFTGYKVEQPFEEDEPSSTMDLDSEDEDEERDVPVVKENGKADGKKQKSQEKAVAAPSKSSPDSKKSKDDDDSDEDETDDSDEDETDDSDEGLSSEEGDDDSSDEDDTSDDEEEDTPTPKKPEVGKKRAAESSVLKTPLSDKKAKVATPSSQKTGGKKGAAVHVATPHPAKGKTIVNNDKSVKSPKSAPKSGVPCKSCSKSFISQTALQAHSKAKHGGK

SEQ ID NO: 7837 - protein, 200 aa, Zea mays subsp. mays
  peptide (1)..(200): Ceres Seq. ID no. 12345385
  misc_feature (1)..(96): Pfam Name: Nucleoplasmin Pfam Description: Nucleoplasmin
  misc_feature (1)..(200): Homolog of NCBI NO: 7716950 NR Description: histone deacetylase 2 isoform c [Zea mays]
  misc_feature (1)..(198): Homolog of NCBI NO: 7489751 NR Description: histone deacetylase (EC 3.5.1.-) HD2-p39,
  misc_feature (1)..(200): Homolog of NCBI NO: 7716948 NR Description: histone deacetylase 2 isoform b [Zea mays]
  misc_feature (1)..(200): Homolog of NCBI NO: 7804960 NR Description: putative histone deacetylase HD2 [Oryza sativa]
MDLDSEDEDEERDVPVVKENGKADGKKQKSQEKAVAAPSKSSPDSKKSKDDDDSDEDETDDSDEDETDDSDEGLSSEEGDDDSSDEDDTSDDEEEDTPTPKKPEVGKKRAAESSVLKTPLSDKKAKVATPSSQKTGGKKGAAVHVATPHPAKGKTIVNNDKSVKSPKSAPKSGVPCKSCSKSFISQTALQAHSKAKHGGK

SEQ ID NO: 7838 - DNA, 954 bp, Zea mays subsp. mays
  misc_feature (1)..(954): Ceres Seq. ID no. 12343259
  misc_feature: MA Experiment ID: 108544 Result: Down-regulated in Transcription
gccatgttcttgttttagttttccatgctctacatattgtatcaaattgttgcatggatgaggtttccatgctctctagattgatgtaaagatgaaagttaccttacctggagtacatgatgcctctggatttttctagctacttatcagtagcacattgtataccgagatgtgtttgtgatgttattttagtagtgtgataagtgttgtctgttatgctcttaaatggaggcatttgaccatccaatttagcttttctatgtgaagtcaatgaagcagaacctcttttttttgtgtgtgcacaaccacggcaatcctacgagccataaaccagagctagtactgaacaatttcactacacgccttggtcatcgtgttggaaggatgatccagtctctcttccctcaagatcccaatttccgcgggcgccgtgttgtgaccttccacaaccagcgagactacatatttttccgccatcacaggtacatcttcgagacaaaagaaaagaaggttgcttcgaaggaaaagacatctggaagcaaaagcggatctgagaagcagcaagtgatttgtcggcttcaggaatgtgggcctcgcttcaccctcaagctgctcaccttgcagcatgggaccttcgacacgaggagcggggagtacgagtgggttcacaagccggatatggatacgagcaggcggagattcttcttgtgatgccccaactccatcctgcggaacttcttttcttaaaaaaaagactttgacccctgttttgctgaagcagttttgtggaaccatcagtgagcagcaagtgatacggacttttatttttattttttattgttctggtttcggcgccagtgcgttggacaccaaaaccaaaagtgccggatgctccgatcctaaggcctgaacagtctatgcctccgtgatcagattaactcagatgattatccg

SEQ ID NO: 7839 - protein, 146 aa, Zea mays subsp. mays
  peptide (1)..(146): Ceres Seq. ID no. 12343260
  misc_feature (10)..(146): Homolog of NCBI NO: 18411672 NR Description: expressed protein; protein id: At4g01560.1, by cDNA: 25253., supported by cDNA: gi_15215625 [Arabidopsis >gi|25347959|pir||C85020 hypothetical protein AT4g01560
  misc_feature (10)..(140): Homolog of NCBI NO: 7485389 NR Description: hypothetical protein F11O4.6 - Arabidopsis >gi|3695379|gb|AAC62782.1| contains similarity to a C. elegans protein F44G4.1 (GB:Z49910) and several yeast hypothetical
  misc_feature (16)..(85): Homolog of NCBI NO: 27371215 NR Description: Similar to RNA processing factor 1 [Xenopus
  misc_feature (103)..(146): Homolog of NCBI NO: 27371215 NR Description: Similar to RNA processing factor 1 [Xenopus
  misc_feature (15)..(85): Homolog of NCBI NO: 33440502 NR Description: Unknown (protein for IMAGE:5694049) [Mus musculus]
  misc_feature (103)..(146): Homolog of NCBI NO: 33440502 NR Description: Unknown (protein for IMAGE:5694049) [Mus musculus]
  misc_feature (15)..(85): Homolog of NCBI NO: 11360239 NR Description: hypothetical protein DKFZp761G0415.1 - human
  misc_feature (15)..(85): Homolog of NCBI NO: 17225079 NR Description: RNA processing factor 1 [Homo sapiens]
  misc_feature (15)..(85): Homolog of NCBI NO: 13376605 NR Description: RNA processing factor 1 [Homo sapiens] unnamed protein product [Homo sapiens]
  misc_feature (103)..(146): Homolog of NCBI NO: 11360239 NR Description: hypothetical protein DKFZp761G0415.1 - human
MKQNLFFLCVHNHGNPTSHKPELVLNNFTTRLGHRVGRMIQSLFPQDPNFRGRRVVTFHNQRDYIFFRHHRYIFETKEKKVASKEKTSGSKSGSEKQQVICRLQECGPRFTLKLLTLQHGTFDTRSGEYEWVHKPDMDTSRRRFFL

SEQ ID NO: 7840 - protein, 108 aa, Zea mays subsp. mays
  peptide (1)..(108): Ceres Seq. ID no. 12343261
  misc_feature (1)..(108): Homolog of NCBI NO: 18411672 NR Description: expressed protein; protein id: At4g01560.1, by cDNA: 25253., supported by cDNA: gi_15215625 [Arabidopsis >gi|25347959|pir||C85020 hypothetical protein AT4g01560
  misc_feature (1)..(102): Homolog of NCBI NO: 7485389 NR Description: hypothetical protein F11O4.6 - Arabidopsis >gi|3695379|gb|AAC62782.1| contains similarity to a C. elegans protein F44G4.1 (GB:Z49910) and several yeast hypothetical
  misc_feature (1)..(47): Homolog of NCBI NO: 27371215 NR Description: Similar to RNA processing factor 1 [Xenopus
  misc_feature (65)..(108): Homolog of NCBI NO: 27371215 NR Description: Similar to RNA processing factor 1 [Xenopus
  misc_feature (1)..(47): Homolog of NCBI NO: 33440502 NR Description: Unknown (protein for IMAGE:5694049) [Mus musculus]
  misc_feature (65)..(108): Homolog of NCBI NO: 33440502 NR Description: Unknown (protein for IMAGE:5694049) [Mus musculus]
  misc_feature (1)..(47): Homolog of NCBI NO: 11360239 NR Description: hypothetical protein DKFZp761G0415.1 - human
  misc_feature (1)..(47): Homolog of NCBI NO: 17225079 NR Description: RNA processing factor 1 [Homo sapiens]
  misc_feature (1)..(47): Homolog of NCBI NO: 13376605 NR Description: RNA processing factor 1 [Homo sapiens] unnamed protein product [Homo sapiens]
  misc_feature (65)..(108): Homolog of NCBI NO: 11360239 NR Description: hypothetical protein DKFZp761G0415.1 - human
MIQSLFPQDPNFRGRRVVTFHNQRDYIFFRHHRYIFETKEKKVASKEKTSGSKSGSEKQQVICRLQECGPRFTLKLLTLQHGTFDTRSGEYEWVHKPDMDTSRRRFFL

SEQ ID NO: 7841 - protein, 94 aa, Zea mays subsp. mays
  peptide (1)..(94): Ceres Seq. ID no. 12343262
MGPSTRGAGSTSGFTSRIWIRAGGDSSCDAPTPSCGTSFLKKKTLTPVLLKQFCGTISEQQVIRTFIFIFYCSGFGASALDTKTKSAGCSDPKA

SEQ ID NO: 7842 - DNA, 1079 bp, Zea mays subsp. mays
  misc_feature (1)..(1079): Ceres Seq. ID no. 12402905
  misc_feature: MA Experiment ID: 108523 Result: Down-regulated in Transcription
  misc_feature: MA Experiment 108523 PARAMETER Experiment Name: Zm_42deg_Heat_P Parameter: Age (day) Value: 8
  misc_feature: MA Experiment 108523 PARAMETER Experiment Name: Zm_42deg_Heat_P Parameter: Organism Value: Zea mays
  misc_feature: MA Experiment 108523 PARAMETER Experiment Name: Zm_42deg_Heat_P Parameter: Plant Line Value: 35A19
  misc_feature: MA Experiment 108523 PARAMETER Experiment Name: Zm_42deg_Heat_P Parameter: Temperature (deg C) Value: 42 vs. 22
  misc_feature: MA Experiment 108523 PARAMETER Experiment Name: Zm_42deg_Heat_P Parameter: Timepoint (hr) Value: 6
  misc_feature: MA Experiment 108523 PARAMETER Experiment Name: Zm_42deg_Heat_P Parameter: Tissue Value: Aerial
  misc_feature: MA Experiment ID: 108527 Result: Down-regulated in Transcription
  misc_feature: MA Experiment 108527 PARAMETER Experiment Name: Zm_5mM_NO_P Parameter: Age (day) Value: 8
  misc_feature: MA Experiment 108527 PARAMETER Experiment Name: Zm_5mM_NO_P Parameter: Organism Value: Zea mays
  misc_feature: MA Experiment 108527 PARAMETER Experiment Name: Zm_5mM_NO_P Parameter: Plant Line Value: 35A19
  misc_feature: MA Experiment 108527 PARAMETER Experiment Name: Zm_5mM_NO_P Parameter: Timepoint (hr) Value: 6
  misc_feature: MA Experiment 108527 PARAMETER Experiment Name: Zm_5mM_NO_P Parameter: Tissue Value: Aerial
  misc_feature: MA Experiment 108527 PARAMETER Experiment Name: Zm_5mM_NO_P Parameter: Treatment Value: 5mM NO vs. No Treatment
  misc_feature: MA Experiment ID: 108530 Result: Up-regulated in Transcription
  misc_feature: MA Experiment 108530 PARAMETER Experiment Name: Zm_Imbibed_Seeds_P Parameter: Age (day) Value: 6 vs. 2
  misc_feature: MA Experiment 108530 PARAMETER Experiment Name: Zm_Imbibed_Seeds_P Parameter: Organism Value: Zea mays
  misc_feature: MA Experiment 108530 PARAMETER Experiment Name: Zm_Imbibed_Seeds_P Parameter: Plant Line Value: 35A19
  misc_feature: MA Experiment 108530 PARAMETER Experiment Name: Zm_Imbibed_Seeds_P Parameter: Tissue Value: Aerial vs. Embryo
  misc_feature: MA Experiment ID: 108534 Result: Down-regulated in Transcription
  misc_feature: MA Experiment 108534 PARAMETER Experiment Name: Zm_4deg_Cold_P Parameter: Age (hr) Value: 8
  misc_feature: MA Experiment 108534 PARAMETER Experiment Name: Zm_4deg_Cold_P Parameter: Organism Value: Zea mays
  misc_feature: MA Experiment 108534 PARAMETER Experiment Name: Zm_4deg_Cold_P Parameter: Plant Line Value: 35A19
  misc_feature: MA Experiment 108534 PARAMETER Experiment Name: Zm_4deg_Cold_P Parameter: Temperature (deg C) Value: 4 vs. 22
  misc_feature: MA Experiment 108534 PARAMETER Experiment Name: Zm_4deg_Cold_P Parameter: Timepoint (hr) Value: 6
  misc_feature: MA Experiment 108534 PARAMETER Experiment Name: Zm_4deg_Cold_P Parameter: Tissue Value: Aerial
  misc_feature: MA Experiment ID: 108543 Result: Down-regulated in Transcription
  misc_feature: MA Experiment ID: 108687 Result: Up-regulated in Transcription
  misc_feature: MA Experiment 108687 PARAMETER Experiment Name: Zm_Embryos-Flowers__P Parameter: Tissue Value: Embryo vs. Aerial+
  misc_feature: MA Experiment ID: 108688 Result: Down-regulated in Transcription
  misc_feature: MA Experiment 108688 PARAMETER Experiment Name: Zm_Embryos-Flowers__P Parameter: Tissue Value: Immature Flowers vs. Aerial+
  misc_feature: MA Experiment ID: 20000535 Result: Up-regulated in Transcription
  misc_feature: MA Experiment 20000535 PARAMETER Experiment Name: Zm_Hybrid_Seed_Dev_P Parameter: DAP Value: 30 vs. 12
  misc_feature: MA Experiment 20000535 PARAMETER Experiment Name: Zm_Hybrid_Seed_Dev_P Parameter: Organism Value: Zea mays
  misc_feature: MA Experiment 20000535 PARAMETER Experiment Name: Zm_Hybrid_Seed_Dev_P Parameter: Plant Line Value: 35A19
  misc_feature: MA Experiment 20000535 PARAMETER Experiment Name: Zm_Hybrid_Seed_Dev_P Parameter: Tissue Value: Embryo vs. Unfert Floret
aagctcttgaggagatgctgcaatgaaacatggctcctctgtctcctagactggtagtgcccgtagacgtgaagaagctgccgcgggagcaaaaggtccctctccacaaccgctggcacccggatatccctcctgtcgctgatgtaaccgaaggggaattgttccgcgttgagatggtcgattggagtggagggcgggttagggatgataactctgcagatgatctgaaattcatggatttcacaattgctcattatcttagtgggcccctaagaatagttgattctgaaggggttccagcttcaccaggtgatcttctcgcggtagaaatctgcaaccttggcccacttcctggcgacgagtggggttacaccgcaatacttgaaagggagaatggaggtggattcttaactgaccacttccctagcgcaagaaaagccatctggtatttcgaaggaatctacgcatgctccccgcagataccaggtgttcgttttccaggattgactcatcctggtgttgtgggaactgcaccgtcacttgagctcctaaatatatggaatgaaagagagaaaagtttgtctgagacaagcccggagactattaaactgtgtgaagttctacaccagaggccccttgctcatttaccgacccctgaaaattgcttacttgggaaggtccaagaagggactgctgaatggcacataattgcaaacgaagcggccagaactattgctggaagggaaaatggcgggaattgcgacataaagaacctaagcagaggctccagaatttatctaccagtgtttgtcgaaggagcaaacctcagcactggtgacatgcacttctcccagggggacggcgagatttcgctgtgtggagcaattgaaatgagcgggttccttgagctcaagtaattctgttcttatttacacttcagcactacatgatagtatgacatctcgcattcatcgagcagacctaagtgcttggttcgaggaatgagctagtccatcatcttatcacatctcacttttttgtttcgtttgtggagtgaaatgagatcataaccttatttc

SEQ ID NO: 7843 - protein, 295 aa, Zea mays subsp. mays
  peptide (1)..(295): Ceres Seq. ID no. 12402906
  misc_feature (8)..(295): Pfam Name: Acetamidase/Formamidase family Pfam Description: Acetamidase/Formamidase family
  misc_feature (8)..(295): Pfam Name: Acetamidase/Formamidase family Pfam Description: Acetamidase/Formamidase family
  misc_feature (1)..(294): Homolog of NCBI NO: 32421387 NR Description: hypothetical protein [Neurospora crassa]
  misc_feature (1)..(295): Homolog of NCBI NO: 34909818 NR Description: putative formamidase [Oryza sativa (japonica group)] >gi|15289900|dbj|BAB63595.1| putative formamidase [Oryza
  misc_feature (1)..(295): Homolog of NCBI NO: 18420071 NR Description: formamidase - like protein; protein id: supported by cDNA: gi_14334653 [Arabidopsis thaliana]
  misc_feature (1)..(295): Homolog of NCBI NO: 21592429 NR Description: formamidase-like protein [Arabidopsis thaliana]
  misc_feature (210)..(295): Homolog of NCBI NO: 7488106 NR Description: probable formamidase (EC 3.5.1.49) F19F18.40 -
  misc_feature (1)..(295): Homolog of NCBI NO: 14334654 NR Description: putative formamidase [Arabidopsis thaliana]
  misc_feature (1)..(295): Homolog of NCBI NO: 18420069 NR Description: formamidase - like protein; protein id:
  misc_feature (7)..(295): Homolog of NCBI NO: 3913682 NR Description: Formamidase (Formamide amidohydrolase)
  misc_feature (1)..(294): Homolog of NCBI NO: 32421387 NR Description: hypothetical protein [Neurospora crassa]
  misc_feature (4)..(295): Homolog of NCBI NO: 19115927 NR Description: formamidase-like protein [Schizosaccharomyces
  misc_feature (210)..(295): Homolog of NCBI NO: 7488106 NR Description: probable formamidase (EC 3.5.1.49) F19F18.40 -
  misc_feature (1)..(202): Homolog of NCBI NO: 7488106 NR Description: probable formamidase (EC 3.5.1.49) F19F18.40 -
  misc_feature (1)..(295): Homolog of NCBI NO: 21592429 NR Description: formamidase-like protein [Arabidopsis thaliana]
  misc_feature (1)..(295): Homolog of NCBI NO: 18420071 NR Description: formamidase - like protein; protein id: supported by cDNA: gi_14334653 [Arabidopsis thaliana]
  misc_feature (1)..(295): Homolog of NCBI NO: 34909818 NR Description: putative formamidase [Oryza sativa (japonica group)] >gi|15289900|dbj|BAB63595.1| putative formamidase [Oryza
  misc_feature (4)..(295): Homolog of NCBI NO: 19115927 NR Description: formamidase-like protein [Schizosaccharomyces
  misc_feature (1)..(202): Homolog of NCBI NO: 7488106 NR Description: probable formamidase (EC 3.5.1.49) F19F18.40 -
  misc_feature (1)..(295): Homolog of NCBI NO: 18420069 NR Description: formamidase - like protein; protein id:
  misc_feature (1)..(295): Homolog of NCBI NO: 14334654 NR Description: putative formamidase [Arabidopsis thaliana]
  misc_feature (7)..(295): Homolog of NCBI NO: 3913682 NR Description: Formamidase (Formamide amidohydrolase)
MAPLSPRLVVPVDVKKLPREQKVPLHNRWHPDIPPVADVTEGELFRVEMVDWSGGRVRDDNSADDLKFMDFTIAHYLSGPLRIVDSEGVPASPGDLLAVEICNLGPLPGDEWGYTAILERENGGGFLTDHFPSARKAIWYFEGIYACSPQIPGVRFPGLTHPGVVGTAPSLELLNIWNEREKSLSETSPETIKLCEVLHQRPLAHLPTPENCLLGKVQEGTAEWHIIANEAARTIAGRENGGNCDIKNLSRGSRIYLPVFVEGANLSTGDMHFSQGDGEISLCGAIEMSGFLELK

SEQ ID NO: 7844 - protein, 247 aa, Zea mays subsp. mays
  peptide (1)..(247): Ceres Seq. ID no. 12402907
  misc_feature (1)..(247): Pfam Name: Acetamidase/Formamidase family Pfam Description: Acetamidase/Formamidase family
  misc_feature (1)..(247): Pfam Name: Acetamidase/Formamidase family Pfam Description: Acetamidase/Formamidase family
  misc_feature (1)..(247): Homolog of NCBI NO: 34909818 NR Description: putative formamidase [Oryza sativa (japonica group)] >gi|15289900|dbj|BAB63595.1| putative formamidase [Oryza
  misc_feature (1)..(247): Homolog of NCBI NO: 14334654 NR Description: putative formamidase [Arabidopsis thaliana]
  misc_feature (1)..(247): Homolog of NCBI NO: 18420071 NR Description: formamidase - like protein; protein id: supported by cDNA: gi_14334653 [Arabidopsis thaliana]
  misc_feature (1)..(247): Homolog of NCBI NO: 18420069 NR Description: formamidase - like protein; protein id:
  misc_feature (1)..(247): Homolog of NCBI NO: 21592429 NR Description: formamidase-like protein [Arabidopsis thaliana]
  misc_feature (1)..(247): Homolog of NCBI NO: 14334654 NR Description: putative formamidase [Arabidopsis thaliana]
  misc_feature (1)..(247): Homolog of NCBI NO: 18420069 NR Description: formamidase - like protein; protein id:
  misc_feature (1)..(247): Homolog of NCBI NO: 3913682 NR Description: Formamidase (Formamide amidohydrolase)
  misc_feature (1)..(246): Homolog of NCBI NO: 32421387 NR Description: hypothetical protein [Neurospora crassa]
  misc_feature (1)..(247): Homolog of NCBI NO: 19115927 NR Description: formamidase-like protein [Schizosaccharomyces
  misc_feature (162)..(247): Homolog of NCBI NO: 7488106 NR Description: probable formamidase (EC 3.5.1.49) F19F18.40 -
  misc_feature (1)..(154): Homolog of NCBI NO: 7488106 NR Description: probable formamidase (EC 3.5.1.49) F19F18.40 -
  misc_feature (1)..(247): Homolog of NCBI NO: 21592429 NR Description: formamidase-like protein [Arabidopsis thaliana]
  misc_feature (1)..(247): Homolog of NCBI NO: 18420071 NR Description: formamidase - like protein; protein id: supported by cDNA: gi_14334653 [Arabidopsis thaliana]
  misc_feature (1)..(247): Homolog of NCBI NO: 34909818 NR Description: putative formamidase [Oryza sativa (japonica group)] >gi|15289900|dbj|BAB63595.1| putative formamidase [Oryza
  misc_feature (1)..(154): Homolog of NCBI NO: 7488106 NR Description: probable formamidase (EC 3.5.1.49) F19F18.40 -
  misc_feature (162)..(247): Homolog of NCBI NO: 7488106 NR Description: probable formamidase (EC 3.5.1.49) F19F18.40 -
  misc_feature (1)..(247): Homolog of NCBI NO: 19115927 NR Description: formamidase-like protein [Schizosaccharomyces
  misc_feature (1)..(246): Homolog of NCBI NO: 32421387 NR Description: hypothetical protein [Neurospora crassa]
  misc_feature (1)..(247): Homolog of NCBI NO: 3913682 NR Description: Formamidase (Formamide amidohydrolase)
MVDWSGGRVRDDNSADDLKFMDFTIAHYLSGPLRIVDSEGVPASPGDLLAVEICNLGPLPGDEWGYTAILERENGGGFLTDHFPSARKAIWYFEGIYACSPQIPGVRFPGLTHPGVVGTAPSLELLNIWNEREKSLSETSPETIKLCEVLHQRPLAHLPTPENCLLGKVQEGTAEWHIIANEAARTIAGRENGGNCDIKNLSRGSRIYLPVFVEGANLSTGDMHFSQGDGEISLCGAIEMSGFLELK

SEQ ID NO: 7845 - protein, 227 aa, Zea mays subsp. mays
  peptide (1)..(227): Ceres Seq. ID no. 12402908
  misc_feature (1)..(227): Pfam Name: Acetamidase/Formamidase family Pfam Description: Acetamidase/Formamidase family
  misc_feature (1)..(227): Pfam Name: Acetamidase/Formamidase family Pfam Description: Acetamidase/Formamidase family
  misc_feature (1)..(227): Homolog of NCBI NO: 34909818 NR Description: putative formamidase [Oryza sativa (japonica group)] >gi|15289900|dbj|BAB63595.1| putative formamidase [Oryza
  misc_feature (1)..(227): Homolog of NCBI NO: 14334654 NR Description: putative formamidase [Arabidopsis thaliana]
  misc_feature (1)..(227): Homolog of NCBI NO: 18420071 NR Description: formamidase - like protein; protein id: supported by cDNA: gi_14334653 [Arabidopsis thaliana]
  misc_feature (1)..(227): Homolog of NCBI NO: 18420069 NR Description: formamidase - like protein; protein id:
  misc_feature (1)..(227): Homolog of NCBI NO: 21592429 NR Description: formamidase-like protein [Arabidopsis thaliana]
  misc_feature (1)..(227): Homolog of NCBI NO: 14334654 NR Description: putative formamidase [Arabidopsis thaliana]
  misc_feature (1)..(227): Homolog of NCBI NO: 18420069 NR Description: formamidase - like protein; protein id:
  misc_feature (1)..(227): Homolog of NCBI NO: 3913682 NR Description: Formamidase (Formamide amidohydrolase)
  misc_feature (1)..(226): Homolog of NCBI NO: 32421387 NR Description: hypothetical protein [Neurospora crassa]
  misc_feature (1)..(227): Homolog of NCBI NO: 19115927 NR Description: formamidase-like protein [Schizosaccharomyces
  misc_feature (142)..(227): Homolog of NCBI NO: 7488106 NR Description: probable formamidase (EC 3.5.1.49) F19F18.40 -
  misc_feature (1)..(134): Homolog of NCBI NO: 7488106 NR Description: probable formamidase (EC 3.5.1.49) F19F18.40 -
  misc_feature (1)..(227): Homolog of NCBI NO: 21592429 NR Description: formamidase-like protein [Arabidopsis thaliana]
  misc_feature (1)..(227): Homolog of NCBI NO: 18420071 NR Description: formamidase - like protein; protein id: supported by cDNA: gi_14334653 [Arabidopsis thaliana]
  misc_feature (1)..(227): Homolog of NCBI NO: 34909818 NR Description: putative formamidase [Oryza sativa (japonica group)] >gi|15289900|dbj|BAB63595.1| putative formamidase [Oryza
  misc_feature (1)..(134): Homolog of NCBI NO: 7488106 NR Description: probable formamidase (EC 3.5.1.49) F19F18.40 -
  misc_feature (142)..(227): Homolog of NCBI NO: 7488106 NR Description: probable formamidase (EC 3.5.1.49) F19F18.40 -
  misc_feature (1)..(227): Homolog of NCBI NO: 19115927 NR Description: formamidase-like protein [Schizosaccharomyces
  misc_feature (1)..(226): Homolog of NCBI NO: 32421387 NR Description: hypothetical protein [Neurospora crassa]
  misc_feature (1)..(227): Homolog of NCBI NO: 3913682 NR Description: Formamidase (Formamide amidohydrolase)
MDFTIAHYLSGPLRIVDSEGVPASPGDLLAVEICNLGPLPGDEWGYTAILERENGGGFLTDHFPSARKAIWYFEGIYACSPQIPGVRFPGLTHPGVVGTAPSLELLNIWNEREKSLSETSPETIKLCEVLHQRPLAHLPTPENCLLGKVQEGTAEWHIIANEAARTIAGRENGGNCDIKNLSRGSRIYLPVFVEGANLSTGDMHFSQGDGEISLCGAIEMSGFLELK

SEQ ID NO: 7846 - DNA, 972 bp, Zea mays subsp. mays
  misc_feature (1)..(972): Ceres Seq. ID no. 12365773
  misc_feature: MA Experiment ID: 108504 Result: Down-regulated in Transcription
  misc_feature: MA Experiment 108504 PARAMETER Experiment Name: Zm_Drought_P Parameter: Age (day) Value: 8
  misc_feature: MA Experiment 108504 PARAMETER Experiment Name: Zm_Drought_P Parameter: Organism Value: Zea mays
  misc_feature: MA Experiment 108504 PARAMETER Experiment Name: Zm_Drought_P Parameter: Plant Line Value: 35A19
  misc_feature: MA Experiment 108504 PARAMETER Experiment Name: Zm_Drought_P Parameter: Timepoint (hr) Value: 12
  misc_feature: MA Experiment 108504 PARAMETER Experiment Name: Zm_Drought_P Parameter: Tissue Value: Aerial
  misc_feature: MA Experiment 108504 PARAMETER Experiment Name: Zm_Drought_P Parameter: Treatment Value: Drought vs. No Drought
  misc_feature: MA Experiment ID: 108535 Result: Up-regulated in Transcription
  misc_feature: MA Experiment 108535 PARAMETER Experiment Name: Zm_Meristem_P Parameter: Age (day) Value: 8
  misc_feature: MA Experiment 108535 PARAMETER Experiment Name: Zm_Meristem_P Parameter: Organism Value: Zea mays
  misc_feature: MA Experiment 108535 PARAMETER Experiment Name: Zm_Meristem_P Parameter: Plant Line Value: 35A19
  misc_feature: MA Experiment 108535 PARAMETER Experiment Name: Zm_Meristem_P Parameter: Tissue Value: Root Meristem vs. Above Root Meristem
  misc_feature: MA Experiment ID: 108540 Result: Down-regulated in Transcription
  misc_feature: MA Experiment 108540 PARAMETER Experiment Name: Zm_20percent_PEG_P Parameter: Age (day) Value: 8
  misc_feature: MA Experiment 108540 PARAMETER Experiment Name: Zm_20percent_PEG_P Parameter: Organism Value: Zea mays
  misc_feature: MA Experiment 108540 PARAMETER Experiment Name: Zm_20percent_PEG_P Parameter: Plant Line Value: 35A19
  misc_feature: MA Experiment 108540 PARAMETER Experiment Name: Zm_20percent_PEG_P Parameter: Timepoint (hr) Value: 6
  misc_feature: MA Experiment 108540 PARAMETER Experiment Name: Zm_20percent_PEG_P Parameter: Tissue Value: Aerial
  misc_feature: MA Experiment 108540 PARAMETER Experiment Name: Zm_20percent_PEG_P Parameter: Treatment Value: 20percent PEG vs. No Treatment
  misc_feature: MA Experiment ID: 108544 Result: Down-regulated in Transcription
  misc_feature: MA Experiment ID: 108556 Result: Down-regulated in Transcription
  misc_feature: MA Experiment 108556 PARAMETER Experiment Name: Zm_Drought_P Parameter: Age (day) Value: 9
  misc_feature: MA Experiment 108556 PARAMETER Experiment Name: Zm_Drought_P Parameter: Organism Value: Zea mays
  misc_feature: MA Experiment 108556 PARAMETER Experiment Name: Zm_Drought_P Parameter: Plant Line Value: 35A19
  misc_feature: MA Experiment 108556 PARAMETER Experiment Name: Zm_Drought_P Parameter: Timepoint (hr) Value: 24
  misc_feature: MA Experiment 108556 PARAMETER Experiment Name: Zm_Drought_P Parameter: Tissue Value: Aerial
  misc_feature: MA Experiment 108556 PARAMETER Experiment Name: Zm_Drought_P Parameter: Treatment Value: Drought vs. No Drought
  misc_feature: MA Experiment ID: 108597 Result: Down-regulated in Transcription
  misc_feature: MA Experiment 108597 PARAMETER Experiment Name: Zm_100uM_ABA_P Parameter: Age (day) Value: 9
  misc_feature: MA Experiment 108597 PARAMETER Experiment Name: Zm_100uM_ABA_P Parameter: Organism Value: Zea mays
  misc_feature: MA Experiment 108597 PARAMETER Experiment Name: Zm_100uM_ABA_P Parameter: Plant Line Value: 35A19
  misc_feature: MA Experiment 108597 PARAMETER Experiment Name: Zm_100uM_ABA_P Parameter: Timepoint (hr) Value: 24
  misc_feature: MA Experiment 108597 PARAMETER Experiment Name: Zm_100uM_ABA_P Parameter: Tissue Value: Aerial
  misc_feature: MA Experiment 108597 PARAMETER Experiment Name: Zm_100uM_ABA_P Parameter: Treatment Value: 100uM ABA vs. No Treatment
  misc_feature: MA Experiment ID: 108689 Result: Down-regulated in Transcription
  misc_feature: MA Experiment 108689 PARAMETER Experiment Name: Zm_Drought_Roots_P Parameter: Age (day) Value: 9
  misc_feature: MA Experiment 108689 PARAMETER Experiment Name: Zm_Drought_Roots_P Parameter: Organism Value: Zea mays
  misc_feature: MA Experiment 108689 PARAMETER Experiment Name: Zm_Drought_Roots_P Parameter: Plant Line Value: 35A19
  misc_feature: MA Experiment 108689 PARAMETER Experiment Name: Zm_Drought_Roots_P Parameter: Timepoint (hr) Value: 24
  misc_feature: MA Experiment 108689 PARAMETER Experiment Name: Zm_Drought_Roots_P Parameter: Tissue Value: Roots
  misc_feature: MA Experiment 108689 PARAMETER Experiment Name: Zm_Drought_Roots_P Parameter: Treatment Value: Drought vs. No Drought
  misc_feature: MA Experiment ID: 20000108 Result: Up-regulated in Transcription
  misc_feature: MA Experiment 20000108 PARAMETER Experiment Name: Zm_Root-Tips_P Parameter: Age (day) Value: 12
  misc_feature: MA Experiment 20000108 PARAMETER Experiment Name: Zm_Root-Tips_P Parameter: Organism Value: Zea mays
  misc_feature: MA Experiment 20000108 PARAMETER Experiment Name: Zm_Root-Tips_P Parameter: Tissue Value: Root tips vs. Root mid region    35
  misc_feature: MA Experiment 20000108 PARAMETER Experiment Name: Zm_Root-Tips_P Parameter: Tissue Value: Root tips vs. Root mid region   Sequence Listing-Misc Features (4)
  misc_feature: MA Experiment ID: 20000477 Result: Down-regulated in Transcription
  misc_feature: MA Experiment 20000477 PARAMETER Experiment Name: Zm_5mM_SA_P Parameter: Age (day) Value: 10
  misc_feature: MA Experiment 20000477 PARAMETER Experiment Name: Zm_5mM_SA_P Parameter: Organism Value: Zea mays
  misc_feature: MA Experiment 20000477 PARAMETER Experiment Name: Zm_5mM_SA_P Parameter: Plant Line Value: 35A19
  misc_feature: MA Experiment 20000477 PARAMETER Experiment Name: Zm_5mM_SA_P Parameter: Timepoint (hr) Value: 48
  misc_feature: MA Experiment 20000477 PARAMETER Experiment Name: Zm_5mM_SA_P Parameter: Tissue Value: Aerial
  misc_feature: MA Experiment 20000477 PARAMETER Experiment Name: Zm_5mM_SA_P Parameter: Treatment Value: 5mM SA vs. No Treatment
  misc_feature: MA Experiment ID: 20000478 Result: Down-regulated in Transcription
  misc_feature: MA Experiment 20000478 PARAMETER Experiment Name: Zm_5mM_SA_P Parameter: Age (day) Value: 11
  misc_feature: MA Experiment 20000478 PARAMETER Experiment Name: Zm_5mM_SA_P Parameter: Organism Value: Zea mays
  misc_feature: MA Experiment 20000478 PARAMETER Experiment Name: Zm_5mM_SA_P Parameter: Plant Line Value: 35A19
  misc_feature: MA Experiment 20000478 PARAMETER Experiment Name: Zm_5mM_SA_P Parameter: Timepoint (hr) Value: 72
  misc_feature: MA Experiment 20000478 PARAMETER Experiment Name: Zm_5mM_SA_P Parameter: Tissue Value: Aerial
  misc_feature: MA Experiment 20000478 PARAMETER Experiment Name: Zm_5mM_SA_P Parameter: Treatment Value: 5mM SA vs. No Treatment
  misc_feature: MA Experiment ID: 20000479 Result: Down-regulated in Transcription
  misc_feature: MA Experiment 20000479 PARAMETER Experiment Name: Zm_Drought_P Parameter: Age (day) Value: 10
  misc_feature: MA Experiment 20000479 PARAMETER Experiment Name: Zm_Drought_P Parameter: Organism Value: Zea mays
  misc_feature: MA Experiment 20000479 PARAMETER Experiment Name: Zm_Drought_P Parameter: Plant Line Value: 35A19
  misc_feature: MA Experiment 20000479 PARAMETER Experiment Name: Zm_Drought_P Parameter: Timepoint (hr) Value: 48
  misc_feature: MA Experiment 20000479 PARAMETER Experiment Name: Zm_Drought_P Parameter: Tissue Value: Aerial
  misc_feature: MA Experiment 20000479 PARAMETER Experiment Name: Zm_Drought_P Parameter: Treatment Value: Drought vs. No Drought
  misc_feature: MA Experiment ID: 20000480 Result: Down-regulated in Transcription
  misc_feature: MA Experiment 20000480 PARAMETER Experiment Name: Zm_Drought_P Parameter: Age (day) Value: 11
  misc_feature: MA Experiment 20000480 PARAMETER Experiment Name: Zm_Drought_P Parameter: Organism Value: Zea mays
  misc_feature: MA Experiment 20000480 PARAMETER Experiment Name: Zm_Drought_P Parameter: Plant Line Value: 35A19
  misc_feature: MA Experiment 20000480 PARAMETER Experiment Name: Zm_Drought_P Parameter: Timepoint (hr) Value: 72
  misc_feature: MA Experiment 20000480 PARAMETER Experiment Name: Zm_Drought_P Parameter: Tissue Value: Aerial
  misc_feature: MA Experiment 20000480 PARAMETER Experiment Name: Zm_Drought_P Parameter: Treatment Value: Drought vs. No Drought
  misc_feature: MA Experiment ID: 20000492 Result: Up-regulated in Transcription
  misc_feature: MA Experiment 20000492 PARAMETER Experiment Name: Zm_Hybrid_Seed_Dev_P Parameter: DAP Value: 12
  misc_feature: MA Experiment 20000492 PARAMETER Experiment Name: Zm_Hybrid_Seed_Dev_P Parameter: Organism Value: Zea mays
  misc_feature: MA Experiment 20000492 PARAMETER Experiment Name: Zm_Hybrid_Seed_Dev_P Parameter: Plant Line Value: 35A19
  misc_feature: MA Experiment 20000492 PARAMETER Experiment Name: Zm_Hybrid_Seed_Dev_P Parameter: Tissue Value: Fert Kernel vs. Unfert Floret
  misc_feature: MA Experiment ID: 20000626 Result: Down-regulated in Transcription
  misc_feature: MA Experiment 20000626 PARAMETER Experiment Name: Zm_Herbicide-Treatments_P Parameter: Timepoint (hr) Value: 12
  misc_feature: MA Experiment 20000626 PARAMETER Experiment Name: Zm_Herbicide-Treatments_P Parameter: Tissue Value: Aerial
  misc_feature: MA Experiment 20000626 PARAMETER Experiment Name: Zm_Herbicide-Treatments_P Parameter: Treatment Value: Roundup vs. No Treatment
  misc_feature: MA Experiment ID: 20000632 Result: Down-regulated in Transcription
  misc_feature: MA Experiment 20000632 PARAMETER Experiment Name: Zm_Herbicide-Treatments_P Parameter: Timepoint (hr) Value: 4
  misc_feature: MA Experiment 20000632 PARAMETER Experiment Name: Zm_Herbicide-Treatments_P Parameter: Tissue Value: Aerial
  misc_feature: MA Experiment 20000632 PARAMETER Experiment Name: Zm_Herbicide-Treatments_P Parameter: Treatment Value: Glean vs. No Treatment
agatcactggcagtcgcaagtagcaacccgcatcacgagttcacccacgctccccgcacaggcacagctcactagcgaccagggagttcaaacaagaggcaacaagaacgaacccacgcgaacgccaaagttcgctttgcttggttcgggccgctgcaccgccattgttgatctgttctccttctccttggaggagaaagaagagggggagaggaatgatggggcggacgagcgtggcggcggcggcggccctgctggtgctggcggcgtgcgcggctctgccggcgaggacggcggcgaacaagatcagcatcaactggaagcccaacgtgaactacaccgactggctgaagcagcacagccccttctacaaggacgactggctggtgttctactacacggcgggggcaggcggacgtggtgcaggtggacgaggtgggctacaacaagtgcgactccaccaacgccatctacaactacagcaaggggcgcagcttcgccttccagctcaacgagaccaagacctactacttcatctgcagctacggctactgcttcggcgggatgcgcctcgccatcaaggccgagaagctgccgccgccgtccccgccgccgtccgccagcgaccgctccgccgccgccatcgccgccttcgccaggtcccacgcgcccgtcatttacgccgccgtcgccgtgctcgccgcgctcctcaggatggtctagctgggaagaatctacccgccggccccttcgttggttcgaattgggactccttttttttgttcgttcatcctctccatctttttccgtagtgtgcttgggctctcaagaggagcagtagctggtggcggtgctggagtgctgcgttgggttcattaattaattagcggtgtggatttgccgaagcgattgattgagctgagattgatttttcaagtgtgaagaactctagctgccttgctgaattaaagt

SEQ ID NO: 7847 - protein, 279 aa, Zea mays subsp. mays
  peptide (1)..(279): Ceres Seq. ID no. 12365774
  misc_feature (144)..(241): Pfam Name: Glycoprotein GG/GX Pfam Description: Glycoprotein GG/GX
  misc_feature (150)..(234): Homolog of NCBI NO: 13265426 NR Description: At2g14890 [Arabidopsis thaliana]
  misc_feature (150)..(234): Homolog of NCBI NO: 15226024 NR Description: arabinogalactan-protein (AGP9); protein id: supported by cDNA: gi_10880494, supported by cDNA: gi_11908041, by cDNA: gi_12642859, supported by cDNA: gi_13265425, supported
  misc_feature (148)..(234): Homolog of NCBI NO: 25404769 NR Description: hypothetical protein F14K14.17 [imported] - thaliana >gi|5734705|gb|AAD49970.1|AC008075_3 F24J5.4
  misc_feature (140)..(241): Homolog of NCBI NO: 8886076 NR Description: chitinase [Ajellomyces capsulatus]
  misc_feature (148)..(234): Homolog of NCBI NO: 22330504 NR Description: arabinogalactan-protein, putative (AGP19); This structure is inaccurate, likely due to discrepancies within bac sequences. This will be resolved asap. In the meantime, an
  misc_feature (151)..(249): Homolog of NCBI NO: 38345019 NR Description: OSJNBa0029H02.3 [Oryza sativa (japonica
  misc_feature (148)..(237): Homolog of NCBI NO: 81286 NR Description: extensin - Volvox carteri (fragment)
DHWQSQVATRITSSPTLPAQAQLTSDQGVQTRGNKNEPTRTPKFALLGSGRCTAIVDLFSFSLEEKEEGERNDGADERGGGGGPAGAGGVRGSAGEDGGEQDQHQLEAQRELHRLAEAAQPLLQGRLAGVLLHGGGRRTWCRWTRWATTSATPPTPSTTTARGAASPSSSTRPRPTTSSAATATASAGCASPSRPRSCRRRPRRRPPATAPPPPSPPSPGPTRPSFTPPSPCSPRSSGWSSWEESTRRPLRWFELGLLFFVRSSSPSFSVVCLGSQEEQ

SEQ ID NO: 7848 - protein, 198 aa, Zea mays subsp. mays
  peptide (1)..(198): Ceres Seq. ID no. 12365775
  misc_feature (11)..(64): Homolog of NCBI NO: 13236660 NR Description: putative blue copper-binding protein [Oryza
  misc_feature (14)..(64): Homolog of NCBI NO: 38175738 NR Description: blue copper-binding protein-like [Oryza sativa
  misc_feature (14)..(64): Homolog of NCBI NO: 34915266 NR Description: contains EST AU197337(E30403)~similar to blue
MMGRTSVAAAAALLVLAACAALPARTAANKISINWKPNVNYTDWLKQHSPFYKDDWLVFYYTAGAGGRGAGGRGGLQQVRLHQRHLQLQQGAQLRLPAQRDQDLLLHLQLRLLLRRDAPRHQGREAAAAVPAAVRQRPLRRRHRRLRQVPRARHLRRRRRARRAPQDGLAGKNLPAGPFVGSNWDSFFLFVHPLHLFP

SEQ ID NO: 7849 - protein, 197 aa, Zea mays subsp. mays
  peptide (1)..(197): Ceres Seq. ID no. 12365776
  misc_feature (10)..(63): Homolog of NCBI NO: 13236660 NR Description: putative blue copper-binding protein [Oryza
  misc_feature (13)..(63): Homolog of NCBI NO: 38175738 NR Description: blue copper-binding protein-like [Oryza sativa
  misc_feature (13)..(63): Homolog of NCBI NO: 34915266 NR Description: contains EST AU197337(E30403)~similar to blue
MGRTSVAAAAALLVLAACAALPARTAANKISINWKPNVNYTDWLKQHSPFYKDDWLVFYYTAGAGGRGAGGRGGLQQVRLHQRHLQLQQGAQLRLPAQRDQDLLLHLQLRLLLRRDAPRHQGREAAAAVPAAVRQRPLRRRHRRLRQVPRARHLRRRRRARRAPQDGLAGKNLPAGPFVGSNWDSFFLFVHPLHLFP

SEQ ID NO: 7850 - DNA, 1024 bp, Zea mays subsp. mays
  misc_feature (1)..(1024): Ceres Seq. ID no. 13498207
  misc_feature: MA Experiment ID: 108504 Result: Up-regulated in Transcription
  misc_feature: MA Experiment 108504 PARAMETER Experiment Name: Zm_Drought_P Parameter: Age (day) Value: 8
  misc_feature: MA Experiment 108504 PARAMETER Experiment Name: Zm_Drought_P Parameter: Organism Value: Zea mays
  misc_feature: MA Experiment 108504 PARAMETER Experiment Name: Zm_Drought_P Parameter: Plant Line Value: 35A19
  misc_feature: MA Experiment 108504 PARAMETER Experiment Name: Zm_Drought_P Parameter: Timepoint (hr) Value: 12
  misc_feature: MA Experiment 108504 PARAMETER Experiment Name: Zm_Drought_P Parameter: Tissue Value: Aerial
  misc_feature: MA Experiment 108504 PARAMETER Experiment Name: Zm_Drought_P Parameter: Treatment Value: Drought vs. No Drought
  misc_feature: MA Experiment ID: 108515 Result: Up-regulated in Transcription
  misc_feature: MA Experiment 108515 PARAMETER Experiment Name: Zm_2mM_SA_P Parameter: Age (day) Value: 8
  misc_feature: MA Experiment 108515 PARAMETER Experiment Name: Zm_2mM_SA_P Parameter: Organism Value: Zea mays
  misc_feature: MA Experiment 108515 PARAMETER Experiment Name: Zm_2mM_SA_P Parameter: Plant Line Value: 35A19
  misc_feature: MA Experiment 108515 PARAMETER Experiment Name: Zm_2mM_SA_P Parameter: Timepoint (hr) Value: 12
  misc_feature: MA Experiment 108515 PARAMETER Experiment Name: Zm_2mM_SA_P Parameter: Tissue Value: Aerial
  misc_feature: MA Experiment 108515 PARAMETER Experiment Name: Zm_2mM_SA_P Parameter: Treatment Value: 2mM SA vs. No Treatment
  misc_feature: MA Experiment ID: 108522 Result: Up-regulated in Transcription
  misc_feature: MA Experiment 108522 PARAMETER Experiment Name: Zm_42deg_Heat_P Parameter: Age (day) Value: 8
  misc_feature: MA Experiment 108522 PARAMETER Experiment Name: Zm_42deg_Heat_P Parameter: Organism Value: Zea mays
  misc_feature: MA Experiment 108522 PARAMETER Experiment Name: Zm_42deg_Heat_P Parameter: Plant Line Value: 35A19
  misc_feature: MA Experiment 108522 PARAMETER Experiment Name: Zm_42deg_Heat_P Parameter: Temperature (deg C) Value: 42 vs. 22
  misc_feature: MA Experiment 108522 PARAMETER Experiment Name: Zm_42deg_Heat_P Parameter: Timepoint (hr) Value: 1
  misc_feature: MA Experiment 108522 PARAMETER Experiment Name: Zm_42deg_Heat_P Parameter: Tissue Value: Aerial
  misc_feature: MA Experiment ID: 108523 Result: Up-regulated in Transcription
  misc_feature: MA Experiment 108523 PARAMETER Experiment Name: Zm_42deg_Heat_P Parameter: Age (day) Value: 8
  misc_feature: MA Experiment 108523 PARAMETER Experiment Name: Zm_42deg_Heat_P Parameter: Organism Value: Zea mays
  misc_feature: MA Experiment 108523 PARAMETER Experiment Name: Zm_42deg_Heat_P Parameter: Plant Line Value: 35A19
  misc_feature: MA Experiment 108523 PARAMETER Experiment Name: Zm_42deg_Heat_P Parameter: Temperature (deg C) Value: 42 vs. 22
  misc_feature: MA Experiment 108523 PARAMETER Experiment Name: Zm_42deg_Heat_P Parameter: Timepoint (hr) Value: 6
  misc_feature: MA Experiment 108523 PARAMETER Experiment Name: Zm_42deg_Heat_P Parameter: Tissue Value: Aerial
  misc_feature: MA Experiment ID: 108527 Result: Up-regulated in Transcription
  misc_feature: MA Experiment 108527 PARAMETER Experiment Name: Zm_5mM_NO_P Parameter: Age (day) Value: 8
  misc_feature: MA Experiment 108527 PARAMETER Experiment Name: Zm_5mM_NO_P Parameter: Organism Value: Zea mays
  misc_feature: MA Experiment 108527 PARAMETER Experiment Name: Zm_5mM_NO_P Parameter: Plant Line Value: 35A19
  misc_feature: MA Experiment 108527 PARAMETER Experiment Name: Zm_5mM_NO_P Parameter: Timepoint (hr) Value: 6
  misc_feature: MA Experiment 108527 PARAMETER Experiment Name: Zm_5mM_NO_P Parameter: Tissue Value: Aerial
  misc_feature: MA Experiment 108527 PARAMETER Experiment Name: Zm_5mM_NO_P Parameter: Treatment Value: 5mM NO vs. No Treatment
  misc_feature: MA Experiment ID: 108528 Result: Down-regulated in Transcription
  misc_feature: MA Experiment 108528 PARAMETER Experiment Name: Zm_Imbibed_Seeds_P Parameter: Age (day) Value: 5 vs. 2
  misc_feature: MA Experiment 108528 PARAMETER Experiment Name: Zm_Imbibed_Seeds_P Parameter: Organism Value: Zea mays
  misc_feature: MA Experiment 108528 PARAMETER Experiment Name: Zm_Imbibed_Seeds_P Parameter: Plant Line Value: 35A19
  misc_feature: MA Experiment 108528 PARAMETER Experiment Name: Zm_Imbibed_Seeds_P Parameter: Tissue Value: Aerial vs. Embryo
  misc_feature: MA Experiment ID: 108535 Result: Down-regulated in Transcription
  misc_feature: MA Experiment 108535 PARAMETER Experiment Name: Zm_Meristem_P Parameter: Age (day) Value: 8
  misc_feature: MA Experiment 108535 PARAMETER Experiment Name: Zm_Meristem_P Parameter: Organism Value: Zea mays
  misc_feature: MA Experiment 108535 PARAMETER Experiment Name: Zm_Meristem_P Parameter: Plant Line Value: 35A19
  misc_feature: MA Experiment 108535 PARAMETER Experiment Name: Zm_Meristem_P Parameter: Tissue Value: Root Meristem vs. Above Root Meristem
  misc_feature: MA Experiment ID: 108540 Result: Up-regulated in Transcription
  misc_feature: MA Experiment 108540 PARAMETER Experiment Name: Zm_20percent_PEG_P Parameter: Age (day) Value: 8
  misc_feature: MA Experiment 108540 PARAMETER Experiment Name: Zm_20percent_PEG_P Parameter: Organism Value: Zea mays
  misc_feature: MA Experiment 108540 PARAMETER Experiment Name: Zm_20percent_PEG_P Parameter: Plant Line Value: 35A19
  misc_feature: MA Experiment 108540 PARAMETER Experiment Name: Zm_20percent_PEG_P Parameter: Timepoint (hr) Value: 6
  misc_feature: MA Experiment 108540 PARAMETER Experiment Name: Zm_20percent_PEG_P Parameter: Tissue Value: Aerial
  misc_feature: MA Experiment 108540 PARAMETER Experiment Name: Zm_20percent_PEG_P Parameter: Treatment Value: 20percent PEG vs. No Treatment
  misc_feature: MA Experiment ID: 108543 Result: Down-regulated in Transcription
  misc_feature: MA Experiment ID: 108545 Result: Down-regulated in Transcription
  misc_feature: MA Experiment 108545 PARAMETER Experiment Name: Zm_Imbibed_Seeds_P Parameter: Age (day) Value: 3 vs. 2
  misc_feature: MA Experiment 108545 PARAMETER Experiment Name: Zm_Imbibed_Seeds_P Parameter: Organism Value: Zea mays
  misc_feature: MA Experiment 108545 PARAMETER Experiment Name: Zm_Imbibed_Seeds_P Parameter: Plant Line Value: 35A19
  misc_feature: MA Experiment 108545 PARAMETER Experiment Name: Zm_Imbibed_Seeds_P Parameter: Tissue Value: Aerial vs. Embryo
  misc_feature: MA Experiment ID: 108546 Result: Down-regulated in Transcription
  misc_feature: MA Experiment 108546 PARAMETER Experiment Name: Zm_Imbibed_Seeds_P Parameter: Age (day) Value: 3 vs. 2
  misc_feature: MA Experiment 108546 PARAMETER Experiment Name: Zm_Imbibed_Seeds_P Parameter: Organism Value: Zea mays
  misc_feature: MA Experiment 108546 PARAMETER Experiment Name: Zm_Imbibed_Seeds_P Parameter: Plant Line Value: 35A19
  misc_feature: MA Experiment 108546 PARAMETER Experiment Name: Zm_Imbibed_Seeds_P Parameter: Tissue Value: Roots vs. Embryo
  misc_feature: MA Experiment ID: 108547 Result: Down-regulated in Transcription
  misc_feature: MA Experiment 108547 PARAMETER Experiment Name: Zm_Imbibed_Seeds_P Parameter: Age (day) Value: 4 vs. 2
  misc_feature: MA Experiment 108547 PARAMETER Experiment Name: Zm_Imbibed_Seeds_P Parameter: Organism Value: Zea mays
  misc_feature: MA Experiment 108547 PARAMETER Experiment Name: Zm_Imbibed_Seeds_P Parameter: Plant Line Value: 35A19
  misc_feature: MA Experiment 108547 PARAMETER Experiment Name: Zm_Imbibed_Seeds_P Parameter: Tissue Value: Aerial vs. Embryo
  misc_feature: MA Experiment ID: 108556 Result: Up-regulated in Transcription
  misc_feature: MA Experiment 108556 PARAMETER Experiment Name: Zm_Drought_P Parameter: Age (day) Value: 9
  misc_feature: MA Experiment 108556 PARAMETER Experiment Name: Zm_Drought_P Parameter: Organism Value: Zea mays
  misc_feature: MA Experiment 108556 PARAMETER Experiment Name: Zm_Drought_P Parameter: Plant Line Value: 35A19
  misc_feature: MA Experiment 108556 PARAMETER Experiment Name: Zm_Drought_P Parameter: Timepoint (hr) Value: 24
  misc_feature: MA Experiment 108556 PARAMETER Experiment Name: Zm_Drought_P Parameter: Tissue Value: Aerial
  misc_feature: MA Experiment 108556 PARAMETER Experiment Name: Zm_Drought_P Parameter: Treatment Value: Drought vs. No Drought
  misc_feature: MA Experiment ID: 108559 Result: Up-regulated in Transcription
  misc_feature: MA Experiment 108559 PARAMETER Experiment Name: Zm_5mM_NO_P Parameter: Age (day) Value: 8
  misc_feature: MA Experiment 108559 PARAMETER Experiment Name: Zm_5mM_NO_P Parameter: Organism Value: Zea mays
  misc_feature: MA Experiment 108559 PARAMETER Experiment Name: Zm_5mM_NO_P Parameter: Plant Line Value: 35A19
  misc_feature: MA Experiment 108559 PARAMETER Experiment Name: Zm_5mM_NO_P Parameter: Timepoint (hr) Value: 12
  misc_feature: MA Experiment 108559 PARAMETER Experiment Name: Zm_5mM_NO_P Parameter: Tissue Value: Aerial
  misc_feature: MA Experiment 108559 PARAMETER Experiment Name: Zm_5mM_NO_P Parameter: Treatment Value: 5mM NO vs. No Treatment
  misc_feature: MA Experiment ID: 108599 Result: Up-regulated in Transcription
  misc_feature: MA Experiment 108599 PARAMETER Experiment Name: Zm_RT1_P Parameter: Age (day) Value: 11
  misc_feature: MA Experiment 108599 PARAMETER Experiment Name: Zm_RT1_P Parameter: Organism Value: Zea mays
  misc_feature: MA Experiment 108599 PARAMETER Experiment Name: Zm_RT1_P Parameter: Plant Line Value: rt1 mut vs. rt1 wt
  misc_feature: MA Experiment 108599 PARAMETER Experiment Name: Zm_RT1_P Parameter: Tissue Value: Roots
  misc_feature: MA Experiment ID: 108688 Result: Down-regulated in Transcription
  misc_feature: MA Experiment 108688 PARAMETER Experiment Name: Zm_Embryos-Flowers__P Parameter: Tissue Value: Immature Flowers vs. Aerial+
  misc_feature: MA Experiment ID: 20000477 Result: Up-regulated in Transcription
  misc_feature: MA Experiment 20000477 PARAMETER Experiment Name: Zm_5mM_SA_P Parameter: Age (day) Value: 10
  misc_feature: MA Experiment 20000477 PARAMETER Experiment Name: Zm_5mM_SA_P Parameter: Organism Value: Zea mays
  misc_feature: MA Experiment 20000477 PARAMETER Experiment Name: Zm_5mM_SA_P Parameter: Plant Line Value: 35A19
  misc_feature: MA Experiment 20000477 PARAMETER Experiment Name: Zm_5mM_SA_P Parameter: Timepoint (hr) Value: 48
  misc_feature: MA Experiment 20000477 PARAMETER Experiment Name: Zm_5mM_SA_P Parameter: Tissue Value: Aerial
  misc_feature: MA Experiment 20000477 PARAMETER Experiment Name: Zm_5mM_SA_P Parameter: Treatment Value: 5mM SA vs. No Treatment
  misc_feature: MA Experiment ID: 20000478 Result: Up-regulated in Transcription
  misc_feature: MA Experiment 20000478 PARAMETER Experiment Name: Zm_5mM_SA_P Parameter: Age (day) Value: 11
  misc_feature: MA Experiment 20000478 PARAMETER Experiment Name: Zm_5mM_SA_P Parameter: Organism Value: Zea mays
  misc_feature: MA Experiment 20000478 PARAMETER Experiment Name: Zm_5mM_SA_P Parameter: Plant Line Value: 35A19
  misc_feature: MA Experiment 20000478 PARAMETER Experiment Name: Zm_5mM_SA_P Parameter: Timepoint (hr) Value: 72
  misc_feature: MA Experiment 20000478 PARAMETER Experiment Name: Zm_5mM_SA_P Parameter: Tissue Value: Aerial
  misc_feature: MA Experiment 20000478 PARAMETER Experiment Name: Zm_5mM_SA_P Parameter: Treatment Value: 5mM SA vs. No Treatment
  misc_feature: MA Experiment ID: 20000479 Result: Up-regulated in Transcription
  misc_feature: MA Experiment 20000479 PARAMETER Experiment Name: Zm_Drought_P Parameter: Age (day) Value: 10
  misc_feature: MA Experiment 20000479 PARAMETER Experiment Name: Zm_Drought_P Parameter: Organism Value: Zea mays
  misc_feature: MA Experiment 20000479 PARAMETER Experiment Name: Zm_Drought_P Parameter: Plant Line Value: 35A19
  misc_feature: MA Experiment 20000479 PARAMETER Experiment Name: Zm_Drought_P Parameter: Timepoint (hr) Value: 48
  misc_feature: MA Experiment 20000479 PARAMETER Experiment Name: Zm_Drought_P Parameter: Tissue Value: Aerial
  misc_feature: MA Experiment 20000479 PARAMETER Experiment Name: Zm_Drought_P Parameter: Treatment Value: Drought vs. No Drought
  misc_feature: MA Experiment ID: 20000480 Result: Up-regulated in Transcription
  misc_feature: MA Experiment 20000480 PARAMETER Experiment Name: Zm_Drought_P Parameter: Age (day) Value: 11
  misc_feature: MA Experiment 20000480 PARAMETER Experiment Name: Zm_Drought_P Parameter: Organism Value: Zea mays
  misc_feature: MA Experiment 20000480 PARAMETER Experiment Name: Zm_Drought_P Parameter: Plant Line Value: 35A19
  misc_feature: MA Experiment 20000480 PARAMETER Experiment Name: Zm_Drought_P Parameter: Timepoint (hr) Value: 72
  misc_feature: MA Experiment 20000480 PARAMETER Experiment Name: Zm_Drought_P Parameter: Tissue Value: Aerial
  misc_feature: MA Experiment 20000480 PARAMETER Experiment Name: Zm_Drought_P Parameter: Treatment Value: Drought vs. No Drought
  misc_feature: MA Experiment ID: 20000487 Result: Down-regulated in Transcription
  misc_feature: MA Experiment 20000487 PARAMETER Experiment Name: Zm_50mM_NH4NO3_L_to_H_P Parameter: Organism Value: Zea mays
  misc_feature: MA Experiment 20000487 PARAMETER Experiment Name: Zm_50mM_NH4NO3_L_to_H_P Parameter: Timepoint (hr) Value: 4
  misc_feature: MA Experiment 20000487 PARAMETER Experiment Name: Zm_50mM_NH4NO3_L_to_H_P Parameter: Tissue Value: Leaves
  misc_feature: MA Experiment 20000487 PARAMETER Experiment Name: Zm_50mM_NH4NO3_L_to_H_P Parameter: Treatment Value: 50mM NH4NO3 vs. 100mM Mannitol
  misc_feature: MA Experiment ID: 20000492 Result: Down-regulated in Transcription
  misc_feature: MA Experiment 20000492 PARAMETER Experiment Name: Zm_Hybrid_Seed_Dev_P Parameter: DAP Value: 12
  misc_feature: MA Experiment 20000492 PARAMETER Experiment Name: Zm_Hybrid_Seed_Dev_P Parameter: Organism Value: Zea mays
  misc_feature: MA Experiment 20000492 PARAMETER Experiment Name: Zm_Hybrid_Seed_Dev_P Parameter: Plant Line Value: 35A19
  misc_feature: MA Experiment 20000492 PARAMETER Experiment Name: Zm_Hybrid_Seed_Dev_P Parameter: Tissue Value: Fert Kernel vs. Unfert Floret
  misc_feature: MA Experiment ID: 20000533 Result: Up-regulated in Transcription
  misc_feature: MA Experiment 20000533 PARAMETER Experiment Name: Zm_0.001percent_MeJA_P Parameter: Age (day) Value: 11
  misc_feature: MA Experiment 20000533 PARAMETER Experiment Name: Zm_0.001percent_MeJA_P Parameter: Organism Value: Zea mays
  misc_feature: MA Experiment 20000533 PARAMETER Experiment Name: Zm_0.001percent_MeJA_P Parameter: Plant Line Value: 35A19
  misc_feature: MA Experiment 20000533 PARAMETER Experiment Name: Zm_0.001percent_MeJA_P Parameter: Timepoint (hr) Value: 72
  misc_feature: MA Experiment 20000533 PARAMETER Experiment Name: Zm_0.001percent_MeJA_P Parameter: Tissue Value: Aerial
  misc_feature: MA Experiment 20000533 PARAMETER Experiment Name: Zm_0.001percent_MeJA_P Parameter: Treatment Value: 0.001percent MeJA vs. No Treatment
  misc_feature: MA Experiment ID: 20000535 Result: Up-regulated in Transcription
  misc_feature: MA Experiment 20000535 PARAMETER Experiment Name: Zm_Hybrid_Seed_Dev_P Parameter: DAP Value: 30 vs. 12
  misc_feature: MA Experiment 20000535 PARAMETER Experiment Name: Zm_Hybrid_Seed_Dev_P Parameter: Organism Value: Zea mays
  misc_feature: MA Experiment 20000535 PARAMETER Experiment Name: Zm_Hybrid_Seed_Dev_P Parameter: Plant Line Value: 35A19
  misc_feature: MA Experiment 20000535 PARAMETER Experiment Name: Zm_Hybrid_Seed_Dev_P Parameter: Tissue Value: Embryo vs. Unfert Floret
  misc_feature: MA Experiment ID: 20000626 Result: Up-regulated in Transcription
  misc_feature: MA Experiment 20000626 PARAMETER Experiment Name: Zm_Herbicide-Treatments_P Parameter: Timepoint (hr) Value: 12
  misc_feature: MA Experiment 20000626 PARAMETER Experiment Name: Zm_Herbicide-Treatments_P Parameter: Tissue Value: Aerial
  misc_feature: MA Experiment 20000626 PARAMETER Experiment Name: Zm_Herbicide-Treatments_P Parameter: Treatment Value: Roundup vs. No Treatment
  misc_feature: MA Experiment ID: 20000630 Result: Up-regulated in Transcription
  misc_feature: MA Experiment 20000630 PARAMETER Experiment Name: Zm_Herbicide-Treatments_P Parameter: Timepoint (hr) Value: 4
  misc_feature: MA Experiment 20000630 PARAMETER Experiment Name: Zm_Herbicide-Treatments_P Parameter: Tissue Value: Aerial
  misc_feature: MA Experiment 20000630 PARAMETER Experiment Name: Zm_Herbicide-Treatments_P Parameter: Treatment Value: Roundup vs. No Treatment
atcagtagctagctgttcgaagctttcagccgagcaccatcgtcacagtcagtagtagctaagcatatttctttctccgagtgatttgcgctgagcgatcagttcatccagagcgagcggantgaagctgagctgagcgagcttgcgtcgttgcttgagagaccctgccatggcttcccaccaggacaaggctagctaccaggccggcgaaaccaaggcccgcaccgaggagaagaccgggcaggcggtgggggcgaccaaggacacggcgcaacgccaaggaccgggcggcggacgcggcggggcacgcggcgggcaagggccaggacgccaaggaggccaccaagcagaaggcgtccgacaccggcagctacctgggcaagaagaccgacgaggccaagcacaaggccggcgagacnacggaggcgaccaancagaaggccggcgagacgacggaggcgaccaagcagaaggccggcgagacgacggaggccgccaggcagaaggcagccgacgccatggaggcagccaagcagaaggccgccgaggccgggcagtacgccaaggacaccgccgtctccggcaaggacaagtccggtggcgtcatccagcaggccactgagcaggtgaagagcgcggcggcgggcgccaaggacgcggtgatgagcacgctggggatgggcggggacgacaagcagggcgacgccaacaccaacaccaacactaacaccaacaccaacaccaacaaggacacctntaccatcaccagggatcactagacgcatgtatgcacacgcacttggtccgatcctgtcgtccgtgaccctgtttgcttgtttcgcgagtccagtatgggttttgtgcatgttcccagtgtcatggtttccttttctacgaatttggtgttgtaattttgatttgcaggtacgttgctgtgttttttctgcgtcatcaagtgtctgtaaacgagtcgggcgggtttgagtgtcctttgttgtgataataaagttggtaaatcgtaatt

SEQ ID NO: 7851 - protein, 150 aa, Zea mays subsp. mays
  peptide (1)..(150): Ceres Seq. ID no. 13498208
  misc_feature (38)..(150): Pfam Name: S-antigen protein Pfam Description: S-antigen protein
  misc_feature (1)..(35): Homolog of NCBI NO: 20126724 NR Description: late embryogenesis-abundant protein [Brassica
  misc_feature (1)..(129): Homolog of NCBI NO: 7387829 NR Description: Late embryogenesis abundant protein, group 3 (LEA)
  misc_feature (11)..(150): Homolog of NCBI NO: 23480318 NR Description: Drosophila melanogaster CG8797 gene
  misc_feature (1)..(150): Homolog of NCBI NO: 23480318 NR Description: Drosophila melanogaster CG8797 gene
  misc_feature (13)..(150): Homolog of NCBI NO: 30793991 NR Description: unknown protein [Arabidopsis thaliana]
  misc_feature (5)..(150): Homolog of NCBI NO: 23480318 NR Description: Drosophila melanogaster CG8797 gene
  misc_feature (13)..(150): Homolog of NCBI NO: 15224564 NR Description: glycine-rich protein [Arabidopsis thaliana]
  misc_feature (24)..(150): Homolog of NCBI NO: 10954052 NR Description: ovarian fibroin-like substance-3 [Cyprinus carpio]
  misc_feature (1)..(123): Homolog of NCBI NO: 7489493 NR Description: LEA protein - rice >gi|1486503|gb|AAC03364.1|
  misc_feature (38)..(150): Homolog of NCBI NO: 10954052 NR Description: ovarian fibroin-like substance-3 [Cyprinus carpio]
  misc_feature (84)..(84): Xaa is any aa, unknown or other
  misc_feature (89)..(89): Xaa is any aa, unknown or other
MASHQDKASYQAGETKARTEEKTGQAVGATKDTAQRQGPGGGRGGARGGQGPGRQGGHQAEGVRHRQLPGQEDRRGQAQGRRDXGGDQXEGRRDDGGDQAEGRRDDGGRQAEGSRRHGGSQAEGRRGRAVRQGHRRLRQGQVRWRHPAGH

SEQ ID NO: 7852 - protein, 86 aa, Zea mays subsp. mays
  peptide (1)..(86): Ceres Seq. ID no. 13498209
  misc_feature (1)..(86): Homolog of NCBI NO: 7387829 NR Description: Late embryogenesis abundant protein, group 3 (LEA)
  misc_feature (1)..(86): Homolog of NCBI NO: 7489493 NR Description: LEA protein - rice >gi|1486503|gb|AAC03364.1|
  misc_feature (1)..(86): Homolog of NCBI NO: 4105441 NR Description: group 3 LEA protein [Oryza sativa]
  misc_feature (1)..(86): Homolog of NCBI NO: 7489569 NR Description: protein LEA type 1 - rice
  misc_feature (1)..(86): Homolog of NCBI NO: 25989705 NR Description: LEA1 protein [Triticum aestivum]
  misc_feature (1)..(86): Homolog of NCBI NO: 7387828 NR Description: Late embryogenesis abundant protein, group 3
  misc_feature (1)..(52): Homolog of NCBI NO: 1808678 NR Description: hypothetical protein [Sporobolus stapfianus]
  misc_feature (1)..(84): Homolog of NCBI NO: 20126724 NR Description: late embryogenesis-abundant protein [Brassica
  misc_feature (1)..(86): Homolog of NCBI NO: 126081 NR Description: ABA-inducible protein PHV A1
  misc_feature (1)..(86): Homolog of NCBI NO: 25989707 NR Description: LEA3 protein [Triticum aestivum]
  misc_feature (80)..(80): Xaa is any aa, unknown or other
MEAAKQKAAEAGQYAKDTAVSGKDKSGGVIQQATEQVKSAAAGAKDAVMSTLGMGGDDKQGDANTNTNTNTNTNTNKDTXTITRDH

SEQ ID NO: 7853 - DNA, 1045 bp, Zea mays subsp. mays
  misc_feature (1)..(1045): Ceres Seq. ID no. 12402172
  misc_feature: MA Experiment ID: 108544 Result: Up-regulated in Transcription
gaagggtcgaactaggcccgtcagagaatcagagctctgaggctgctcacatcaggccaccaccaacccctcacgtcggcggtggcgtcgtcggcgaaggcagagatggcgtccgtggccgcggcggaggtcgcggcggcggcgctccggtcggtgctgtcgcgcgcgcagcaggcggcggcgcgggcggggcgcgcgccggggtccgtgcgcgtggtggcggtgagcaagaccaagccggtgcctgtcatccggggcgtntacgacgcgggccaccgctgcttcggcgagaactacgtccaggagctcatcgacaaggcgcctcagcttcctgaggatattgagtggcacttcattgggaatctgcaaagcaacaaagccagagccctacttgctggcgtgccaaaccttgatatggttgagagtgtcgatgatgagaagattgctaaccgtcttgatcgagtggtagctgacttggggagaaaacctcttaaggttttggtccaagtcaacactagtggagaagaatcgaaatttggagtagatccctcaggatgcatggaactagcaaagcatgtcaaactgaactgcccgaaccttgtgttctctggtctgatgacaattgggatgcttgattactcctcaacccctgagaatttcaaggcgctggctaactgccgggaagaggtgtgcaaggagcttggaatacccgaagagcagtgcgaattgtctatgggcatgtcggctgattttgaacaagcgattgaaatgggaagcacaaatgtaagagttgggtcaaccatatttggtgcaagagaatacccaaagaagaactagggtgtttaactatatttggtgcccaaagaactagggtgcttatgcattcctgtcatgatggtagtggcacagaatctgcaacagatccaaatctgatgatgcatcatatatgtgcagttgtgtgcccattctactcagcttaaaacattttgacacccttttttggcccaaagtatcaataaggaaagttaataaaaagcattagacc

SEQ ID NO: 7854 - protein, 243 aa, Zea mays subsp. mays
  peptide (1)..(243): Ceres Seq. ID no. 12402173
  misc_feature (20)..(239): Pfam Name: Alanine racemase, N-terminal domain Pfam Description: Alanine racemase, N-terminal domain
  misc_feature (1)..(242): Homolog of NCBI NO: 30682530 NR Description: Proline synthetase associated protein -related
  misc_feature (1)..(242): Homolog of NCBI NO: 18391333 NR Description: putative Proline synthetase associated protein; id: At1g11930.1, supported by cDNA: gi_16226281 [Arabidopsis >gi|16226282|gb|AAL16123.1|AF428291_1 At1g11930/F12F1_20
  misc_feature (1)..(242): Homolog of NCBI NO: 14030629 NR Description: AT4g26860/F10M23_200 [Arabidopsis thaliana] AT4g26860/F10M23_200 [Arabidopsis thaliana] putative proline synthetase associated protein [Arabidopsis
  misc_feature (1)..(242): Homolog of NCBI NO: 18416879 NR Description: putative Proline synthetase associated protein; id: At4g26860.1, supported by cDNA: 11679., supported by cDNA:
  misc_feature (1)..(186): Homolog of NCBI NO: 7445224 NR Description: hypothetical protein F10M23.200 - Arabidopsis >gi|4455209|emb|CAB36532.1| putative Proline synthetase protein [Arabidopsis thaliana] >gi|7269539|emb|CAB79541.1|
  misc_feature (173)..(242): Homolog of NCBI NO: 7445224 NR Description: hypothetical protein F10M23.200 - Arabidopsis >gi|4455209|emb|CAB36532.1| putative Proline synthetase protein [Arabidopsis thaliana] >gi|7269539|emb|CAB79541.1|
  misc_feature (3)..(242): Homolog of NCBI NO: 6005842 NR Description: proline synthetase co-transcribed homolog; proline
  misc_feature (7)..(242): Homolog of NCBI NO: 16930823 NR Description: proline synthetase co-transcribed [Mus musculus]
  misc_feature (1)..(242): Homolog of NCBI NO: 11359716 NR Description: conserved hypothetical protein [imported] - major >gi|6066445|emb|CAB58387.1| possible proline synthetase
  misc_feature (1)..(242): Homolog of NCBI NO: 34879017 NR Description: similar to Proline synthetase associated [Rattus
  misc_feature (52)..(52): Xaa is any aa, unknown or other
MASVAAAEVAAAALRSVLSRAQQAAARAGRAPGSVRVVAVSKTKPVPVIRGXYDAGHRCFGENYVQELIDKAPQLPEDIEWHFIGNLQSNKARALLAGVPNLDMVESVDDEKIANRLDRVVADLGRKPLKVLVQVNTSGEESKFGVDPSGCMELAKHVKLNCPNLVFSGLMTIGMLDYSSTPENFKALANCREEVCKELGIPEEQCELSMGMSADFEQAIEMGSTNVRVGSTIFGAREYPKKN

SEQ ID NO: 7855 - protein, 140 aa, Zea mays subsp. mays
  peptide (1)..(140): Ceres Seq. ID no. 12402174
  misc_feature (1)..(136): Pfam Name: Alanine racemase, N-terminal domain Pfam Description: Alanine racemase, N-terminal domain
  misc_feature (1)..(139): Homolog of NCBI NO: 30682530 NR Description: Proline synthetase associated protein -related
  misc_feature (1)..(139): Homolog of NCBI NO: 18391333 NR Description: putative Proline synthetase associated protein; id: At1g11930.1, supported by cDNA: gi_16226281 [Arabidopsis >gi|16226282|gb|AAL16123.1|AF428291_1 At1g11930/F12F1_20
  misc_feature (1)..(139): Homolog of NCBI NO: 14030629 NR Description: AT4g26860/F10M23_200 [Arabidopsis thaliana] AT4g26860/F10M23_200 [Arabidopsis thaliana] putative proline synthetase associated protein [Arabidopsis
  misc_feature (1)..(139): Homolog of NCBI NO: 18416879 NR Description: putative Proline synthetase associated protein; id: At4g26860.1, supported by cDNA: 11679., supported by cDNA:
  misc_feature (1)..(83): Homolog of NCBI NO: 7445224 NR Description: hypothetical protein F10M23.200 - Arabidopsis >gi|4455209|emb|CAB36532.1| putative Proline synthetase protein [Arabidopsis thaliana] >gi|7269539|emb|CAB79541.1|
  misc_feature (70)..(139): Homolog of NCBI NO: 7445224 NR Description: hypothetical protein F10M23.200 - Arabidopsis >gi|4455209|emb|CAB36532.1| putative Proline synthetase protein [Arabidopsis thaliana] >gi|7269539|emb|CAB79541.1|
  misc_feature (1)..(139): Homolog of NCBI NO: 6005842 NR Description: proline synthetase co-transcribed homolog; proline
  misc_feature (1)..(139): Homolog of NCBI NO: 16930823 NR Description: proline synthetase co-transcribed [Mus musculus]
  misc_feature (1)..(139): Homolog of NCBI NO: 11359716 NR Description: conserved hypothetical protein [imported] - major >gi|6066445|emb|CAB58387.1| possible proline synthetase
  misc_feature (1)..(139): Homolog of NCBI NO: 34879017 NR Description: similar to Proline synthetase associated [Rattus
MVESVDDEKIANRLDRVVADLGRKPLKVLVQVNTSGEESKFGVDPSGCMELAKHVKLNCPNLVFSGLMTIGMLDYSSTPENFKALANCREEVCKELGIPEEQCELSMGMSADFEQAIEMGSTNVRVGSTIFGAREYPKKN

SEQ ID NO: 7856 - DNA, 1115 bp, Zea mays subsp. mays
  misc_feature (1)..(1115): Ceres Seq. ID no. 12353939
  misc_feature: MA Experiment ID: 108523 Result: Down-regulated in Transcription
  misc_feature: MA Experiment 108523 PARAMETER Experiment Name: Zm_42deg_Heat_P Parameter: Age (day) Value: 8
  misc_feature: MA Experiment 108523 PARAMETER Experiment Name: Zm_42deg_Heat_P Parameter: Organism Value: Zea mays
  misc_feature: MA Experiment 108523 PARAMETER Experiment Name: Zm_42deg_Heat_P Parameter: Plant Line Value: 35A19
  misc_feature: MA Experiment 108523 PARAMETER Experiment Name: Zm_42deg_Heat_P Parameter: Temperature (deg C) Value: 42 vs. 22
  misc_feature: MA Experiment 108523 PARAMETER Experiment Name: Zm_42deg_Heat_P Parameter: Timepoint (hr) Value: 6
  misc_feature: MA Experiment 108523 PARAMETER Experiment Name: Zm_42deg_Heat_P Parameter: Tissue Value: Aerial
  misc_feature: MA Experiment ID: 108527 Result: Down-regulated in Transcription
  misc_feature: MA Experiment 108527 PARAMETER Experiment Name: Zm_5mM_NO_P Parameter: Age (day) Value: 8
  misc_feature: MA Experiment 108527 PARAMETER Experiment Name: Zm_5mM_NO_P Parameter: Organism Value: Zea mays
  misc_feature: MA Experiment 108527 PARAMETER Experiment Name: Zm_5mM_NO_P Parameter: Plant Line Value: 35A19
  misc_feature: MA Experiment 108527 PARAMETER Experiment Name: Zm_5mM_NO_P Parameter: Timepoint (hr) Value: 6
  misc_feature: MA Experiment 108527 PARAMETER Experiment Name: Zm_5mM_NO_P Parameter: Tissue Value: Aerial
  misc_feature: MA Experiment 108527 PARAMETER Experiment Name: Zm_5mM_NO_P Parameter: Treatment Value: 5mM NO vs. No Treatment
  misc_feature: MA Experiment ID: 108528 Result: Up-regulated in Transcription
  misc_feature: MA Experiment 108528 PARAMETER Experiment Name: Zm_Imbibed_Seeds_P Parameter: Age (day) Value: 5 vs. 2
  misc_feature: MA Experiment 108528 PARAMETER Experiment Name: Zm_Imbibed_Seeds_P Parameter: Organism Value: Zea mays
  misc_feature: MA Experiment 108528 PARAMETER Experiment Name: Zm_Imbibed_Seeds_P Parameter: Plant Line Value: 35A19
  misc_feature: MA Experiment 108528 PARAMETER Experiment Name: Zm_Imbibed_Seeds_P Parameter: Tissue Value: Aerial vs. Embryo
  misc_feature: MA Experiment ID: 108530 Result: Up-regulated in Transcription
  misc_feature: MA Experiment 108530 PARAMETER Experiment Name: Zm_Imbibed_Seeds_P Parameter: Age (day) Value: 6 vs. 2
  misc_feature: MA Experiment 108530 PARAMETER Experiment Name: Zm_Imbibed_Seeds_P Parameter: Organism Value: Zea mays
  misc_feature: MA Experiment 108530 PARAMETER Experiment Name: Zm_Imbibed_Seeds_P Parameter: Plant Line Value: 35A19
  misc_feature: MA Experiment 108530 PARAMETER Experiment Name: Zm_Imbibed_Seeds_P Parameter: Tissue Value: Aerial vs. Embryo
  misc_feature: MA Experiment ID: 108536 Result: Down-regulated in Transcription
  misc_feature: MA Experiment 108536 PARAMETER Experiment Name: Zm_Meristem_P Parameter: Age (day) Value: 8
  misc_feature: MA Experiment 108536 PARAMETER Experiment Name: Zm_Meristem_P Parameter: Organism Value: Zea mays
  misc_feature: MA Experiment 108536 PARAMETER Experiment Name: Zm_Meristem_P Parameter: Plant Line Value: 35A19
  misc_feature: MA Experiment 108536 PARAMETER Experiment Name: Zm_Meristem_P Parameter: Tissue Value: Shoot Meristem vs. Above Shoot Meristem
  misc_feature: MA Experiment ID: 108545 Result: Up-regulated in Transcription
  misc_feature: MA Experiment 108545 PARAMETER Experiment Name: Zm_Imbibed_Seeds_P Parameter: Age (day) Value: 3 vs. 2
  misc_feature: MA Experiment 108545 PARAMETER Experiment Name: Zm_Imbibed_Seeds_P Parameter: Organism Value: Zea mays
  misc_feature: MA Experiment 108545 PARAMETER Experiment Name: Zm_Imbibed_Seeds_P Parameter: Plant Line Value: 35A19
  misc_feature: MA Experiment 108545 PARAMETER Experiment Name: Zm_Imbibed_Seeds_P Parameter: Tissue Value: Aerial vs. Embryo
  misc_feature: MA Experiment ID: 108546 Result: Down-regulated in Transcription
  misc_feature: MA Experiment 108546 PARAMETER Experiment Name: Zm_Imbibed_Seeds_P Parameter: Age (day) Value: 3 vs. 2
  misc_feature: MA Experiment 108546 PARAMETER Experiment Name: Zm_Imbibed_Seeds_P Parameter: Organism Value: Zea mays
  misc_feature: MA Experiment 108546 PARAMETER Experiment Name: Zm_Imbibed_Seeds_P Parameter: Plant Line Value: 35A19
  misc_feature: MA Experiment 108546 PARAMETER Experiment Name: Zm_Imbibed_Seeds_P Parameter: Tissue Value: Roots vs. Embryo
  misc_feature: MA Experiment ID: 108547 Result: Up-regulated in Transcription
  misc_feature: MA Experiment 108547 PARAMETER Experiment Name: Zm_Imbibed_Seeds_P Parameter: Age (day) Value: 4 vs. 2
  misc_feature: MA Experiment 108547 PARAMETER Experiment Name: Zm_Imbibed_Seeds_P Parameter: Organism Value: Zea mays
  misc_feature: MA Experiment 108547 PARAMETER Experiment Name: Zm_Imbibed_Seeds_P Parameter: Plant Line Value: 35A19
  misc_feature: MA Experiment 108547 PARAMETER Experiment Name: Zm_Imbibed_Seeds_P Parameter: Tissue Value: Aerial vs. Embryo
  misc_feature: MA Experiment ID: 108559 Result: Down-regulated in Transcription
  misc_feature: MA Experiment 108559 PARAMETER Experiment Name: Zm_5mM_NO_P Parameter: Age (day) Value: 8
  misc_feature: MA Experiment 108559 PARAMETER Experiment Name: Zm_5mM_NO_P Parameter: Organism Value: Zea mays
  misc_feature: MA Experiment 108559 PARAMETER Experiment Name: Zm_5mM_NO_P Parameter: Plant Line Value: 35A19
  misc_feature: MA Experiment 108559 PARAMETER Experiment Name: Zm_5mM_NO_P Parameter: Timepoint (hr) Value: 12
  misc_feature: MA Experiment 108559 PARAMETER Experiment Name: Zm_5mM_NO_P Parameter: Tissue Value: Aerial
  misc_feature: MA Experiment 108559 PARAMETER Experiment Name: Zm_5mM_NO_P Parameter: Treatment Value: 5mM NO vs. No Treatment
  misc_feature: MA Experiment ID: 108687 Result: Down-regulated in Transcription
  misc_feature: MA Experiment 108687 PARAMETER Experiment Name: Zm_Embryos-Flowers__P Parameter: Tissue Value: Embryo vs. Aerial+
  misc_feature: MA Experiment ID: 108688 Result: Down-regulated in Transcription
  misc_feature: MA Experiment 108688 PARAMETER Experiment Name: Zm_Embryos-Flowers__P Parameter: Tissue Value: Immature Flowers vs. Aerial+
  misc_feature: MA Experiment ID: 20000477 Result: Down-regulated in Transcription
  misc_feature: MA Experiment 20000477 PARAMETER Experiment Name: Zm_5mM_SA_P Parameter: Age (day) Value: 10
  misc_feature: MA Experiment 20000477 PARAMETER Experiment Name: Zm_5mM_SA_P Parameter: Organism Value: Zea mays
  misc_feature: MA Experiment 20000477 PARAMETER Experiment Name: Zm_5mM_SA_P Parameter: Plant Line Value: 35A19
  misc_feature: MA Experiment 20000477 PARAMETER Experiment Name: Zm_5mM_SA_P Parameter: Timepoint (hr) Value: 48
  misc_feature: MA Experiment 20000477 PARAMETER Experiment Name: Zm_5mM_SA_P Parameter: Tissue Value: Aerial
  misc_feature: MA Experiment 20000477 PARAMETER Experiment Name: Zm_5mM_SA_P Parameter: Treatment Value: 5mM SA vs. No Treatment
  misc_feature: MA Experiment ID: 20000488 Result: Up-regulated in Transcription
  misc_feature: MA Experiment 20000488 PARAMETER Experiment Name: Zm_50mM_NH4NO3_L_to_H_P Parameter: Organism Value: Zea mays
  misc_feature: MA Experiment 20000488 PARAMETER Experiment Name: Zm_50mM_NH4NO3_L_to_H_P Parameter: Timepoint (hr) Value: 8
  misc_feature: MA Experiment 20000488 PARAMETER Experiment Name: Zm_50mM_NH4NO3_L_to_H_P Parameter: Tissue Value: Leaves
  misc_feature: MA Experiment 20000488 PARAMETER Experiment Name: Zm_50mM_NH4NO3_L_to_H_P Parameter: Treatment Value: 50mM NH4NO3 vs. 100mM Mannitol
  misc_feature: MA Experiment ID: 20000535 Result: Down-regulated in Transcription
  misc_feature: MA Experiment 20000535 PARAMETER Experiment Name: Zm_Hybrid_Seed_Dev_P Parameter: DAP Value: 30 vs. 12
  misc_feature: MA Experiment 20000535 PARAMETER Experiment Name: Zm_Hybrid_Seed_Dev_P Parameter: Organism Value: Zea mays
  misc_feature: MA Experiment 20000535 PARAMETER Experiment Name: Zm_Hybrid_Seed_Dev_P Parameter: Plant Line Value: 35A19
  misc_feature: MA Experiment 20000535 PARAMETER Experiment Name: Zm_Hybrid_Seed_Dev_P Parameter: Tissue Value: Embryo vs. Unfert Floret
agtcccgattcccgaacaagagcgaggccgcactcccccacgagtccactctccgaccgcacgctccgcgacgcgatggccgcgctccgcctcgcctccttcaccctccgccccgccgccgccgccgccgcctcttccggcgcgactccatcggctccccggtccgcctctttctccagcgtggcgcgggggctcccctccctccgcctggccccgccccgccgccgccgcggggacctcgccaggccccgcgccgcggccgaggccgcggcggagagctacgcgtccgcgctgtcggaggtggccgtcgagaacggcaccctcgagcagacggtctccgacctcgagaagctggagaagatcttctccgacgaggccgtcgccgagttcttcgacaaccccaccgtcccgcgcgaggagaaggccgagctcatcggcgagatcgccaagtcgtccgagcttcagccgcacgtcgtcaacttcctcaacgtcgtcgtcgacaacttccgcgcgtccatcgtgccgcagatcgtcgtcgagttcgagaacgtctacaactcgctcacgggcaccgaggtcgccaccgtcacctccgtcgtgcagctcgagtcgcaggacctcgcgcagatcgcgcagcacgtccagaagatgaccggcgccaagaacgtccgcctcaagacgcagctcgacccggcgctcatcgccggcttcaccgtgcagtacggccgcgacggctccaacttgatcgacatgagcgtccggaagcagatcgaggagatcgcgtccgagttcgagttgcccgccgtcccgctcgaagtctgaggccggcttgaggcgtccatcctcgccctcgaagctatagctgcggctactgtctcaaggaaccaagcgggaatgttggcactgtccccttcagtcagacctgcggatcaacggcggtggctccaaatctccaatactactacatatgaacggacactatttttgtgcgtttctgttgacgggaacctgtgtagttctttctcctttttttccctgtggttgacagacacagacactgtaatatgtttattaaaaacactcatctatatagctgagtgtgcacctcttctctc

SEQ ID NO: 7857 - protein, 276 aa, Zea mays subsp. mays
  peptide (1)..(276): Ceres Seq. ID no. 12353940
  misc_feature (80)..(276): Pfam Name: HlyD family secretion protein Pfam Description: HlyD family secretion protein
  misc_feature (9)..(259): Homolog of NCBI NO: 79833 NR Description: hypothetical 119.5K protein (uvrA region) -
SRFPNKSEAALPHESTLRPHAPRRDGRAPPRLLHPPPRRRRRRLFRRDSIGSPVRLFLQRGAGAPLPPPGPAPPPPRGPRQAPRRGRGRGGELRVRAVGGGRRERHPRADGLRPREAGEDLLRRGRRRVLRQPHRPARGEGRAHRRDRQVVRASAARRQLPQRRRRQLPRVHRAADRRRVRERLQLAHGHRGRHRHLRRAARVAGPRADRAARPEDDRRQERPPQDAARPGAHRRLHRAVRPRRLQLDRHERPEADRGDRVRVRVARRPARSLRPA

SEQ ID NO: 7858 - protein, 273 aa, Zea mays subsp. mays
  peptide (1)..(273): Ceres Seq. ID no. 12353941
  misc_feature (90)..(264): Pfam Name: ATP synthase delta (OSCP) subunit Pfam Description: ATP synthase delta (OSCP) subunit
  misc_feature (26)..(273): Homolog of NCBI NO: 1168587 NR Description: ATP synthase delta chain, chloroplast precursor
  misc_feature (89)..(273): Homolog of NCBI NO: 1084479 NR Description: H+-transporting two-sector ATPase (EC 3.6.3.14)
  misc_feature (26)..(273): Homolog of NCBI NO: 416681 NR Description: ATP synthase delta chain, chloroplast precursor
  misc_feature (26)..(273): Homolog of NCBI NO: 170098 NR Description: ATP synthase delta subunit precursor
  misc_feature (26)..(273): Homolog of NCBI NO: 114584 NR Description: ATP synthase delta chain, chloroplast precursor
  misc_feature (56)..(271): Homolog of NCBI NO: 15233985 NR Description: H+-transporting ATP synthase-like protein; id: At4g09650.1, supported by cDNA: 39471., supported by cDNA:
  misc_feature (56)..(271): Homolog of NCBI NO: 18491181 NR Description: putative H+-transporting ATP synthase
  misc_feature (55)..(273): Homolog of NCBI NO: 399082 NR Description: ATP synthase delta chain, chloroplast precursor
  misc_feature (140)..(271): Homolog of NCBI NO: 1480014 NR Description: putative delta subunit of ATP synthase [Brassica
  misc_feature (69)..(263): Homolog of NCBI NO: 5902612 NR Description: ATP synthase-delta chain [Volvox carteri f.
SPDSRTRARPHSPTSPLSDRTLRDAMAALRLASFTLRPAAAAAASSGATPSAPRSASFSSVARGLPSLRLAPPRRRRGDLARPRAAAEAAAESYASALSEVAVENGTLEQTVSDLEKLEKIFSDEAVAEFFDNPTVPREEKAELIGEIAKSSELQPHVVNFLNVVVDNFRASIVPQIVVEFENVYNSLTGTEVATVTSVVQLESQDLAQIAQHVQKMTGAKNVRLKTQLDPALIAGFTVQYGRDGSNLIDMSVRKQIEEIASEFELPAVPLEV

SEQ ID NO: 7859 - protein, 248 aa, Zea mays subsp. mays
  peptide (1)..(248): Ceres Seq. ID no. 12353942
  misc_feature (65)..(239): Pfam Name: ATP synthase delta (OSCP) subunit Pfam Description: ATP synthase delta (OSCP) subunit
  misc_feature (1)..(248): Homolog of NCBI NO: 1168587 NR Description: ATP synthase delta chain, chloroplast precursor
  misc_feature (64)..(248): Homolog of NCBI NO: 1084479 NR Description: H+-transporting two-sector ATPase (EC 3.6.3.14)
  misc_feature (1)..(248): Homolog of NCBI NO: 416681 NR Description: ATP synthase delta chain, chloroplast precursor
  misc_feature (1)..(248): Homolog of NCBI NO: 170098 NR Description: ATP synthase delta subunit precursor
  misc_feature (1)..(248): Homolog of NCBI NO: 114584 NR Description: ATP synthase delta chain, chloroplast precursor
  misc_feature (31)..(246): Homolog of NCBI NO: 15233985 NR Description: H+-transporting ATP synthase-like protein; id: At4g09650.1, supported by cDNA: 39471., supported by cDNA:
  misc_feature (31)..(246): Homolog of NCBI NO: 18491181 NR Description: putative H+-transporting ATP synthase
  misc_feature (30)..(248): Homolog of NCBI NO: 399082 NR Description: ATP synthase delta chain, chloroplast precursor
  misc_feature (115)..(246): Homolog of NCBI NO: 1480014 NR Description: putative delta subunit of ATP synthase [Brassica
  misc_feature (44)..(238): Homolog of NCBI NO: 5902612 NR Description: ATP synthase-delta chain [Volvox carteri f.
MAALRLASFTLRPAAAAAASSGATPSAPRSASFSSVARGLPSLRLAPPRRRRGDLARPRAAAEAAAESYASALSEVAVENGTLEQTVSDLEKLEKIFSDEAVAEFFDNPTVPREEKAELIGEIAKSSELQPHVVNFLNVVVDNFRASIVPQIVVEFENVYNSLTGTEVATVTSVVQLESQDLAQIAQHVQKMTGAKNVRLKTQLDPALIAGFTVQYGRDGSNLIDMSVRKQIEEIASEFELPAVPLEV

SEQ ID NO: 7860 - DNA, 721 bp, Zea mays subsp. mays
  misc_feature (1)..(721): Ceres Seq. ID no. 12403367
  misc_feature: MA Experiment ID: 108523 Result: Up-regulated in Transcription
  misc_feature: MA Experiment 108523 PARAMETER Experiment Name: Zm_42deg_Heat_P Parameter: Age (day) Value: 8
  misc_feature: MA Experiment 108523 PARAMETER Experiment Name: Zm_42deg_Heat_P Parameter: Organism Value: Zea mays
  misc_feature: MA Experiment 108523 PARAMETER Experiment Name: Zm_42deg_Heat_P Parameter: Plant Line Value: 35A19
  misc_feature: MA Experiment 108523 PARAMETER Experiment Name: Zm_42deg_Heat_P Parameter: Temperature (deg C) Value: 42 vs. 22
  misc_feature: MA Experiment 108523 PARAMETER Experiment Name: Zm_42deg_Heat_P Parameter: Timepoint (hr) Value: 6
  misc_feature: MA Experiment 108523 PARAMETER Experiment Name: Zm_42deg_Heat_P Parameter: Tissue Value: Aerial
  misc_feature: MA Experiment ID: 108544 Result: Up-regulated in Transcription
acggagtcaccacgaacctatcgactttttatctccagatccagattagctaccacggcaccgccagcccggacggctataaagacgaggcccacctcgaaatcgacggcgatgaagaagaccagttcccctctcctgatcgtcctgttcctcacagcagcagccatggcggccgagccggagaagcaggcggcccccgcggcacaggagacggccgtgcacatcgtgtacgttgaccgccccgaggacgccgaccctgaggagttccacatccgcaccctcacccccgtcctcggcagcgaacagaaggccagggacgcagtgctctaccactacaagaacgccgccagcggcttctccgcgaagctcaccccccagcaggtcaaggatctcaaggagcaaccaggtgttctccaggttgtgccgagccagacttaccagctacatggtcctgggtctggcactcaccagggcacgacacacaccttgggccttatgtgaaggcgtatgagaatcaagaagactgtgtttagtatggctgtatggcacaggtctgacgaatgtgtatagtacagtactatgtaagaataagggacgtatcgtctatatactgctttgcgcatgttcagccctgttctaaagcttgtaatgcaccaatgcgtatgtttcaatacaatgacaagtatgctatcttgtttggtgcttgttcgatccgtgtttc

SEQ ID NO: 7861 - protein, 166 aa, Zea mays subsp. mays
  peptide (1)..(166): Ceres Seq. ID no. 12403368
  misc_feature (73)..(149): Pfam Name: Subtilisin N-terminal Region Pfam Description: Subtilisin N-terminal Region
  misc_feature (50)..(154): Homolog of NCBI NO: 18409953 NR Description: expressed protein; protein id: At1g71950.1, by cDNA: 37751. [Arabidopsis thaliana] >gi|25406130|pir||D96742
  misc_feature (50)..(154): Homolog of NCBI NO: 21593285 NR Description: unknown [Arabidopsis thaliana]
  misc_feature (46)..(151): Homolog of NCBI NO: 3204125 NR Description: putative Pi starvation-induced protein [Cicer
  misc_feature (70)..(149): Homolog of NCBI NO: 7489176 NR Description: pit2 protein (clone pAL141), Pi starvation - common tobacco >gi|676884|dbj|BAA06151.1| The expression is
  misc_feature (41)..(146): Homolog of NCBI NO: 34394844 NR Description: unknown protein [Oryza sativa (japonica
  misc_feature (48)..(148): Homolog of NCBI NO: 28376696 NR Description: putative Pi starvation induced protein [Oryza
  misc_feature (67)..(162): Homolog of NCBI NO: 18416719 NR Description: subtilisin-like serine protease; protein id:
  misc_feature (65)..(148): Homolog of NCBI NO: 4115920 NR Description: similar to the subtilase family of serine
  misc_feature (65)..(148): Homolog of NCBI NO: 18413353 NR Description: subtilisin-like serine protease; protein id: [Arabidopsis thaliana] >gi|22136594|gb|AAM91616.1| putative
  misc_feature (65)..(148): Homolog of NCBI NO: 7435680 NR Description: subtilisin-like proteinase homolog T4F9.10 -
TESPRTYRLFISRSRLATTAPPARTAIKTRPTSKSTAMKKTSSPLLIVLFLTAAAMAAEPEKQAAPAAQETAVHIVYVDRPEDADPEEFHIRTLTPVLGSEQKARDAVLYHYKNAASGFSAKLTPQQVKDLKEQPGVLQVVPSQTYQLHGPGSGTHQGTTHTLGLM

SEQ ID NO: 7862 - protein, 129 aa, Zea mays subsp. mays
  peptide (1)..(129): Ceres Seq. ID no. 12403369
  misc_feature (36)..(112): Pfam Name: Subtilisin N-terminal Region Pfam Description: Subtilisin N-terminal Region
  misc_feature (13)..(117): Homolog of NCBI NO: 18409953 NR Description: expressed protein; protein id: At1g71950.1, by cDNA: 37751. [Arabidopsis thaliana] >gi|25406130|pir||D96742
  misc_feature (13)..(117): Homolog of NCBI NO: 21593285 NR Description: unknown [Arabidopsis thaliana]
  misc_feature (9)..(114): Homolog of NCBI NO: 3204125 NR Description: putative Pi starvation-induced protein [Cicer
  misc_feature (33)..(112): Homolog of NCBI NO: 7489176 NR Description: pit2 protein (clone pAL141), Pi starvation - common tobacco >gi|676884|dbj|BAA06151.1| The expression is
  misc_feature (4)..(109): Homolog of NCBI NO: 34394844 NR Description: unknown protein [Oryza sativa (japonica
  misc_feature (11)..(111): Homolog of NCBI NO: 28376696 NR Description: putative Pi starvation induced protein [Oryza
  misc_feature (30)..(125): Homolog of NCBI NO: 18416719 NR Description: subtilisin-like serine protease; protein id:
  misc_feature (28)..(111): Homolog of NCBI NO: 4115920 NR Description: similar to the subtilase family of serine
  misc_feature (28)..(111): Homolog of NCBI NO: 18413353 NR Description: subtilisin-like serine protease; protein id: [Arabidopsis thaliana] >gi|22136594|gb|AAM91616.1| putative
  misc_feature (28)..(111): Homolog of NCBI NO: 7435680 NR Description: subtilisin-like proteinase homolog T4F9.10 -
MKKTSSPLLIVLFLTAAAMAAEPEKQAAPAAQETAVHIVYVDRPEDADPEEFHIRTLTPVLGSEQKARDAVLYHYKNAASGFSAKLTPQQVKDLKEQPGVLQVVPSQTYQLHGPGSGTHQGTTHTLGLM

SEQ ID NO: 7863 - protein, 111 aa, Zea mays subsp. mays
  peptide (1)..(111): Ceres Seq. ID no. 12403370
  misc_feature (18)..(94): Pfam Name: Subtilisin N-terminal Region Pfam Description: Subtilisin N-terminal Region
  misc_feature (10)..(93): Homolog of NCBI NO: 18413353 NR Description: subtilisin-like serine protease; protein id: [Arabidopsis thaliana] >gi|22136594|gb|AAM91616.1| putative
  misc_feature (1)..(99): Homolog of NCBI NO: 18409953 NR Description: expressed protein; protein id: At1g71950.1, by cDNA: 37751. [Arabidopsis thaliana] >gi|25406130|pir||D96742
  misc_feature (1)..(96): Homolog of NCBI NO: 3204125 NR Description: putative Pi starvation-induced protein [Cicer
  misc_feature (1)..(91): Homolog of NCBI NO: 34394844 NR Description: unknown protein [Oryza sativa (japonica
  misc_feature (12)..(107): Homolog of NCBI NO: 18416719 NR Description: subtilisin-like serine protease; protein id:
  misc_feature (10)..(93): Homolog of NCBI NO: 4115920 NR Description: similar to the subtilase family of serine
  misc_feature (1)..(93): Homolog of NCBI NO: 28376696 NR Description: putative Pi starvation induced protein [Oryza
  misc_feature (15)..(94): Homolog of NCBI NO: 7489176 NR Description: pit2 protein (clone pAL141), Pi starvation - common tobacco >gi|676884|dbj|BAA06151.1| The expression is
  misc_feature (1)..(99): Homolog of NCBI NO: 21593285 NR Description: unknown [Arabidopsis thaliana]
  misc_feature (10)..(93): Homolog of NCBI NO: 7435680 NR Description: subtilisin-like proteinase homolog T4F9.10 -
MAAEPEKQAAPAAQETAVHIVYVDRPEDADPEEFHIRTLTPVLGSEQKARDAVLYHYKNAASGFSAKLTPQQVKDLKEQPGVLQVVPSQTYQLHGPGSGTHQGTTHTLGLM

SEQ ID NO: 7864 - DNA, 825 bp, Zea mays subsp. mays
  misc_feature (1)..(825): Ceres Seq. ID no. 12404319
  misc_feature: MA Experiment ID: 20000492 Result: Up-regulated in Transcription
  misc_feature: MA Experiment 20000492 PARAMETER Experiment Name: Zm_Hybrid_Seed_Dev_P Parameter: DAP Value: 12
  misc_feature: MA Experiment 20000492 PARAMETER Experiment Name: Zm_Hybrid_Seed_Dev_P Parameter: Organism Value: Zea mays
  misc_feature: MA Experiment 20000492 PARAMETER Experiment Name: Zm_Hybrid_Seed_Dev_P Parameter: Plant Line Value: 35A19
  misc_feature: MA Experiment 20000492 PARAMETER Experiment Name: Zm_Hybrid_Seed_Dev_P Parameter: Tissue Value: Fert Kernel vs. Unfert Floret
actctattcccattccaagcccccgctctcggattcccgacgacgagctcagagctcctcctctcctcccctgctcggtgttcgacgcaacagctgccgccatgtctgccgccaaccagctcgccgccctcgtcagcaacatgtacgccacgggtttgcttgacgatcagttccagcagctccagatgctccagaacgccagtactcctgacttcgtctccgaggtcgtcacgctcttctgccaggacggcgagcggatcatcggagagctggccaaactgttggagaaacccaacgtggattttgacagggttgacgcctttgtgcatcagctcaaaggaagcagtgcaagtattggtgctcagaaggttaagaacacttgcattcagttccgcgaatcctgtcagcagaagagcaaagatgggtgcctcaagacactggagacagtgaagattaacttctatgacctgcgtgacaagtttcagaccatgcttcagctgcagcgtcaggtcaatggctgtccccccagcaagtgaacaagatggtggagtggagcttcatgttgggatgatgcgtgcatctttcaagttccagaacattctgaataagctcctcaattggcttctaggaagtctgtaatagcttagcagcaagattagcgttgacaccaccgtagcagaagtcaatgtcgtcgtttttgtgtcaccgtcttagtcgtaagtgtccgtgctgggtgatggatctcctgcaagcagttgcaagtggtccatttactatgtagtagtggctctgaataatctatatcttagcaatgaatttggcaac

SEQ ID NO: 7865 - protein, 177 aa, Zea mays subsp. mays
  peptide (1)..(177): Ceres Seq. ID no. 12404320
  misc_feature (34)..(177): Homolog of NCBI NO: 22036126 NR Description: his-containing phosphotransfer protein [Zea mays]
  misc_feature (34)..(177): Homolog of NCBI NO: 6009622 NR Description: histidine-containing phosphotransfer protein [Zea
  misc_feature (32)..(175): Homolog of NCBI NO: 33637786 NR Description: two-component phosphorelay mediator HP2 [Oryza
  misc_feature (32)..(177): Homolog of NCBI NO: 33637784 NR Description: two-component phosphorelay mediator HP1 [Oryza
  misc_feature (32)..(170): Homolog of NCBI NO: 5689238 NR Description: histidine-containing phosphotransfer protein [Zea
  misc_feature (46)..(170): Homolog of NCBI NO: 15233079 NR Description: two-component phosphorelay mediator, putative; id: At3g21510.1, supported by cDNA: 9813., supported by cDNA: supported by cDNA: gi_17104734, supported by cDNA:
  misc_feature (30)..(170): Homolog of NCBI NO: 18379097 NR Description: putative AHP2; protein id: At1g03430.1, supported cDNA: 452., supported by cDNA: gi_7630188 [Arabidopsis thaliana]
  misc_feature (46)..(170): Homolog of NCBI NO: 13774348 NR Description: histidine-containing phosphotransfer protein
  misc_feature (30)..(170): Homolog of NCBI NO: 21593802 NR Description: putative AHP2 [Arabidopsis thaliana]
  misc_feature (28)..(170): Homolog of NCBI NO: 15228686 NR Description: ATHP2, putative; protein id: At3g29350.1, by cDNA: 24559., supported by cDNA: gi_17381271, supported by gi_20453360, supported by cDNA: gi_4107100, supported by cDNA:
SIPIPSPRSRIPDDELRAPPLLPCSVFDATAAAMSAANQLAALVSNMYATGLLDDQFQQLQMLQNASTPDFVSEVVTLFCQDGERIIGELAKLLEKPNVDFDRVDAFVHQLKGSSASIGAQKVKNTCIQFRESCQQKSKDGCLKTLETVKINFYDLRDKFQTMLQLQRQVNGCPPSK

SEQ ID NO: 7866 - protein, 149 aa, Zea mays subsp. mays
  peptide (1)..(149): Ceres Seq. ID no. 12404321
TLFPFQAPALGFPTTSSELLLSSPARCSTQQLPPCLPPTSSPPSSATCTPRVCLTISSSSSRCSRTPVLLTSSPRSSRSSARTASGSSESWPNCWRNPTWILTGLTPLCISSKEAVQVLVLRRLRTLAFSSANPVSRRAKMGASRHWRQ

SEQ ID NO: 7867 - protein, 144 aa, Zea mays subsp. mays
  peptide (1)..(144): Ceres Seq. ID no. 12404322
  misc_feature (1)..(144): Homolog of NCBI NO: 22036126 NR Description: his-containing phosphotransfer protein [Zea mays]
  misc_feature (1)..(144): Homolog of NCBI NO: 6009622 NR Description: histidine-containing phosphotransfer protein [Zea
  misc_feature (1)..(142): Homolog of NCBI NO: 33637786 NR Description: two-component phosphorelay mediator HP2 [Oryza
  misc_feature (1)..(144): Homolog of NCBI NO: 33637784 NR Description: two-component phosphorelay mediator HP1 [Oryza
  misc_feature (1)..(137): Homolog of NCBI NO: 5689238 NR Description: histidine-containing phosphotransfer protein [Zea
  misc_feature (13)..(137): Homolog of NCBI NO: 15233079 NR Description: two-component phosphorelay mediator, putative; id: At3g21510.1, supported by cDNA: 9813., supported by cDNA: supported by cDNA: gi_17104734, supported by cDNA:
  misc_feature (1)..(137): Homolog of NCBI NO: 18379097 NR Description: putative AHP2; protein id: At1g03430.1, supported cDNA: 452., supported by cDNA: gi_7630188 [Arabidopsis thaliana]
  misc_feature (13)..(137): Homolog of NCBI NO: 13774348 NR Description: histidine-containing phosphotransfer protein
  misc_feature (1)..(137): Homolog of NCBI NO: 21593802 NR Description: putative AHP2 [Arabidopsis thaliana]
  misc_feature (1)..(137): Homolog of NCBI NO: 15228686 NR Description: ATHP2, putative; protein id: At3g29350.1, by cDNA: 24559., supported by cDNA: gi_17381271, supported by gi_20453360, supported by cDNA: gi_4107100, supported by cDNA:
MSAANQLAALVSNMYATGLLDDQFQQLQMLQNASTPDFVSEVVTLFCQDGERIIGELAKLLEKPNVDFDRVDAFVHQLKGSSASIGAQKVKNTCIQFRESCQQKSKDGCLKTLETVKINFYDLRDKFQTMLQLQRQVNGCPPSK

SEQ ID NO: 7868 - DNA, 1116 bp, Zea mays subsp. mays
  misc_feature (1)..(1116): Ceres Seq. ID no. 13498100
  misc_feature: MA Experiment ID: 108504 Result: Down-regulated in Transcription
  misc_feature: MA Experiment 108504 PARAMETER Experiment Name: Zm_Drought_P Parameter: Age (day) Value: 8
  misc_feature: MA Experiment 108504 PARAMETER Experiment Name: Zm_Drought_P Parameter: Organism Value: Zea mays
  misc_feature: MA Experiment 108504 PARAMETER Experiment Name: Zm_Drought_P Parameter: Plant Line Value: 35A19
  misc_feature: MA Experiment 108504 PARAMETER Experiment Name: Zm_Drought_P Parameter: Timepoint (hr) Value: 12
  misc_feature: MA Experiment 108504 PARAMETER Experiment Name: Zm_Drought_P Parameter: Tissue Value: Aerial
  misc_feature: MA Experiment 108504 PARAMETER Experiment Name: Zm_Drought_P Parameter: Treatment Value: Drought vs. No Drought
  misc_feature: MA Experiment ID: 108522 Result: Down-regulated in Transcription
  misc_feature: MA Experiment 108522 PARAMETER Experiment Name: Zm_42deg_Heat_P Parameter: Age (day) Value: 8
  misc_feature: MA Experiment 108522 PARAMETER Experiment Name: Zm_42deg_Heat_P Parameter: Organism Value: Zea mays
  misc_feature: MA Experiment 108522 PARAMETER Experiment Name: Zm_42deg_Heat_P Parameter: Plant Line Value: 35A19
  misc_feature: MA Experiment 108522 PARAMETER Experiment Name: Zm_42deg_Heat_P Parameter: Temperature (deg C) Value: 42 vs. 22
  misc_feature: MA Experiment 108522 PARAMETER Experiment Name: Zm_42deg_Heat_P Parameter: Timepoint (hr) Value: 1
  misc_feature: MA Experiment 108522 PARAMETER Experiment Name: Zm_42deg_Heat_P Parameter: Tissue Value: Aerial
  misc_feature: MA Experiment ID: 108529 Result: Up-regulated in Transcription
  misc_feature: MA Experiment 108529 PARAMETER Experiment Name: Zm_Imbibed_Seeds_P Parameter: Age (day) Value: 5 vs. 2
  misc_feature: MA Experiment 108529 PARAMETER Experiment Name: Zm_Imbibed_Seeds_P Parameter: Organism Value: Zea mays
  misc_feature: MA Experiment 108529 PARAMETER Experiment Name: Zm_Imbibed_Seeds_P Parameter: Plant Line Value: 35A19
  misc_feature: MA Experiment 108529 PARAMETER Experiment Name: Zm_Imbibed_Seeds_P Parameter: Tissue Value: Roots vs. Embryo
  misc_feature: MA Experiment ID: 108535 Result: Down-regulated in Transcription
  misc_feature: MA Experiment 108535 PARAMETER Experiment Name: Zm_Meristem_P Parameter: Age (day) Value: 8
  misc_feature: MA Experiment 108535 PARAMETER Experiment Name: Zm_Meristem_P Parameter: Organism Value: Zea mays
  misc_feature: MA Experiment 108535 PARAMETER Experiment Name: Zm_Meristem_P Parameter: Plant Line Value: 35A19
  misc_feature: MA Experiment 108535 PARAMETER Experiment Name: Zm_Meristem_P Parameter: Tissue Value: Root Meristem vs. Above Root Meristem
  misc_feature: MA Experiment ID: 108544 Result: Down-regulated in Transcription
  misc_feature: MA Experiment ID: 108556 Result: Down-regulated in Transcription
  misc_feature: MA Experiment 108556 PARAMETER Experiment Name: Zm_Drought_P Parameter: Age (day) Value: 9
  misc_feature: MA Experiment 108556 PARAMETER Experiment Name: Zm_Drought_P Parameter: Organism Value: Zea mays
  misc_feature: MA Experiment 108556 PARAMETER Experiment Name: Zm_Drought_P Parameter: Plant Line Value: 35A19
  misc_feature: MA Experiment 108556 PARAMETER Experiment Name: Zm_Drought_P Parameter: Timepoint (hr) Value: 24
  misc_feature: MA Experiment 108556 PARAMETER Experiment Name: Zm_Drought_P Parameter: Tissue Value: Aerial
  misc_feature: MA Experiment 108556 PARAMETER Experiment Name: Zm_Drought_P Parameter: Treatment Value: Drought vs. No Drought
  misc_feature: MA Experiment ID: 108597 Result: Down-regulated in Transcription
  misc_feature: MA Experiment 108597 PARAMETER Experiment Name: Zm_100uM_ABA_P Parameter: Age (day) Value: 9
  misc_feature: MA Experiment 108597 PARAMETER Experiment Name: Zm_100uM_ABA_P Parameter: Organism Value: Zea mays
  misc_feature: MA Experiment 108597 PARAMETER Experiment Name: Zm_100uM_ABA_P Parameter: Plant Line Value: 35A19
  misc_feature: MA Experiment 108597 PARAMETER Experiment Name: Zm_100uM_ABA_P Parameter: Timepoint (hr) Value: 24
  misc_feature: MA Experiment 108597 PARAMETER Experiment Name: Zm_100uM_ABA_P Parameter: Tissue Value: Aerial
  misc_feature: MA Experiment 108597 PARAMETER Experiment Name: Zm_100uM_ABA_P Parameter: Treatment Value: 100uM ABA vs. No Treatment
  misc_feature: MA Experiment ID: 108687 Result: Down-regulated in Transcription
  misc_feature: MA Experiment 108687 PARAMETER Experiment Name: Zm_Embryos-Flowers__P Parameter: Tissue Value: Embryo vs. Aerial+
  misc_feature: MA Experiment ID: 108688 Result: Down-regulated in Transcription
  misc_feature: MA Experiment 108688 PARAMETER Experiment Name: Zm_Embryos-Flowers__P Parameter: Tissue Value: Immature Flowers vs. Aerial+
  misc_feature: MA Experiment ID: 20000478 Result: Down-regulated in Transcription
  misc_feature: MA Experiment 20000478 PARAMETER Experiment Name: Zm_5mM_SA_P Parameter: Age (day) Value: 11
  misc_feature: MA Experiment 20000478 PARAMETER Experiment Name: Zm_5mM_SA_P Parameter: Organism Value: Zea mays
  misc_feature: MA Experiment 20000478 PARAMETER Experiment Name: Zm_5mM_SA_P Parameter: Plant Line Value: 35A19
  misc_feature: MA Experiment 20000478 PARAMETER Experiment Name: Zm_5mM_SA_P Parameter: Timepoint (hr) Value: 72
  misc_feature: MA Experiment 20000478 PARAMETER Experiment Name: Zm_5mM_SA_P Parameter: Tissue Value: Aerial
  misc_feature: MA Experiment 20000478 PARAMETER Experiment Name: Zm_5mM_SA_P Parameter: Treatment Value: 5mM SA vs. No Treatment
  misc_feature: MA Experiment ID: 20000479 Result: Down-regulated in Transcription
  misc_feature: MA Experiment 20000479 PARAMETER Experiment Name: Zm_Drought_P Parameter: Age (day) Value: 10
  misc_feature: MA Experiment 20000479 PARAMETER Experiment Name: Zm_Drought_P Parameter: Organism Value: Zea mays
  misc_feature: MA Experiment 20000479 PARAMETER Experiment Name: Zm_Drought_P Parameter: Plant Line Value: 35A19
  misc_feature: MA Experiment 20000479 PARAMETER Experiment Name: Zm_Drought_P Parameter: Timepoint (hr) Value: 48
  misc_feature: MA Experiment 20000479 PARAMETER Experiment Name: Zm_Drought_P Parameter: Tissue Value: Aerial
  misc_feature: MA Experiment 20000479 PARAMETER Experiment Name: Zm_Drought_P Parameter: Treatment Value: Drought vs. No Drought
  misc_feature: MA Experiment ID: 20000480 Result: Down-regulated in Transcription
  misc_feature: MA Experiment 20000480 PARAMETER Experiment Name: Zm_Drought_P Parameter: Age (day) Value: 11
  misc_feature: MA Experiment 20000480 PARAMETER Experiment Name: Zm_Drought_P Parameter: Organism Value: Zea mays
  misc_feature: MA Experiment 20000480 PARAMETER Experiment Name: Zm_Drought_P Parameter: Plant Line Value: 35A19
  misc_feature: MA Experiment 20000480 PARAMETER Experiment Name: Zm_Drought_P Parameter: Timepoint (hr) Value: 72
  misc_feature: MA Experiment 20000480 PARAMETER Experiment Name: Zm_Drought_P Parameter: Tissue Value: Aerial
  misc_feature: MA Experiment 20000480 PARAMETER Experiment Name: Zm_Drought_P Parameter: Treatment Value: Drought vs. No Drought
  misc_feature: MA Experiment ID: 20000492 Result: Down-regulated in Transcription
  misc_feature: MA Experiment 20000492 PARAMETER Experiment Name: Zm_Hybrid_Seed_Dev_P Parameter: DAP Value: 12
  misc_feature: MA Experiment 20000492 PARAMETER Experiment Name: Zm_Hybrid_Seed_Dev_P Parameter: Organism Value: Zea mays
  misc_feature: MA Experiment 20000492 PARAMETER Experiment Name: Zm_Hybrid_Seed_Dev_P Parameter: Plant Line Value: 35A19
  misc_feature: MA Experiment 20000492 PARAMETER Experiment Name: Zm_Hybrid_Seed_Dev_P Parameter: Tissue Value: Fert Kernel vs. Unfert Floret
  misc_feature: MA Experiment ID: 20000535 Result: Down-regulated in Transcription
  misc_feature: MA Experiment 20000535 PARAMETER Experiment Name: Zm_Hybrid_Seed_Dev_P Parameter: DAP Value: 30 vs. 12
  misc_feature: MA Experiment 20000535 PARAMETER Experiment Name: Zm_Hybrid_Seed_Dev_P Parameter: Organism Value: Zea mays
  misc_feature: MA Experiment 20000535 PARAMETER Experiment Name: Zm_Hybrid_Seed_Dev_P Parameter: Plant Line Value: 35A19
  misc_feature: MA Experiment 20000535 PARAMETER Experiment Name: Zm_Hybrid_Seed_Dev_P Parameter: Tissue Value: Embryo vs. Unfert Floret
gaatgagaccagttgccctctgccccaggcaaagctgcagctgcagctgccacagcggtgaccacgcacgctgcaccgcaccgcaccgacgggtgagacctgctgtgtccaccaaccgtgagcccagcaggcgaccgacgacgctagcttagactaggaaccaacaatggccacgcgccacctgctcctcctcctgctcgccgcgctgctcccggcggcggccacggcggacccggacgcggtgcaggactactgcgtgccggacacgggcggcgggcgcgggcgcgggcgggccgtggatctagcgctgctcccgtcctacccgtgcaggagccccgccaacctgacggcggcggacttcgccttcgcgggcgtgcgcgccgcgggcaacttctccgcggacacggggttcgcgggggtgtcggtgacccccgcgcagttcccggcgctgcacaccctcggcgtgtccttcgcgcgcgccgacctgtccgcggcgggcggggtcaacccgccgcactaccacccgcgcgccaccgagacggcgctggtcctggccggccgcgtctacgcgggattcgtcgactcgggcggccgcgtcttcgccaaggtgctcgagaaaggggaggtcatggtgttcccgcgcgccatggtgcacttccagatgaacgtcggcgacgagccggccacggtgtacggcaccttcaacagcgagaaccccggcatcgtgcgcatcccggcgaccgtgttcgggtccgggatcaaggacgccgtcctcgagagggcgttcggcctcgagccggaggagctccgccggctccagaagaggttcgggcctcctcccaagaccaagacggcggagatggacgattgatcggaagatcaggcactcgcgatcaagggggacatgattaattgattagttatattaagagcagcagactttgtgatctctggaatatatctccttccatttgttaatgtctgtatgaattatttggcggtggacggtggttatcatggaccgataatgccggtacgtacagatgggatgggcatgtggggttaggtgtcacattcaattgtctacgagatgtttatgggtttatatatattgtt

SEQ ID NO: 7869 - protein, 234 aa, Zea mays subsp. mays
  peptide (1)..(234): Ceres Seq. ID no. 13498101
  misc_feature (68)..(214): Pfam Name: Cupin Pfam Description: Cupin
  misc_feature (8)..(223): Homolog of NCBI NO: 15232830 NR Description: germin-like protein family [Arabidopsis thaliana]
  misc_feature (8)..(221): Homolog of NCBI NO: 27529869 NR Description: germin-like protein [Barbula unguiculata]
  misc_feature (8)..(222): Homolog of NCBI NO: 4996622 NR Description: germin-like protein [Atriplex lentiformis]
  misc_feature (6)..(223): Homolog of NCBI NO: 34904670 NR Description: putative germin protein [Oryza sativa (japonica group)] >gi|5042461|gb|AAD38298.1| putative oxalate oxidase
  misc_feature (1)..(221): Homolog of NCBI NO: 7447330 NR Description: probable oxalate oxidase (EC 1.2.3.4) - rice
  misc_feature (6)..(222): Homolog of NCBI NO: 15241589 NR Description: germin-like protein, putative [Arabidopsis
  misc_feature (6)..(222): Homolog of NCBI NO: 18202909 NR Description: Putative germin-like protein subfamily 1 member
  misc_feature (1)..(226): Homolog of NCBI NO: 15230582 NR Description: germin-like protein (GLP8) [Arabidopsis thaliana]
  misc_feature (6)..(223): Homolog of NCBI NO: 18203442 NR Description: Rhicadhesin receptor precursor (Germin-like
  misc_feature (6)..(226): Homolog of NCBI NO: 21592538 NR Description: germin-like protein [Arabidopsis thaliana]
MATRHLLLLLLAALLPAAATADPDAVQDYCVPDTGGGRGRGRAVDLALLPSYPCRSPANLTAADFAFAGVRAAGNFSADTGFAGVSVTPAQFPALHTLGVSFARADLSAAGGVNPPHYHPRATETALVLAGRVYAGFVDSGGRVFAKVLEKGEVMVFPRAMVHFQMNVGDEPATVYGTFNSENPGIVRIPATVFGSGIKDAVLERAFGLEPEELRRLQKRFGPPPKTKTAEMDD

SEQ ID NO: 7870 - DNA, 849 bp, Zea mays subsp. mays
  misc_feature (1)..(849): Ceres Seq. ID no. 13498110
  misc_feature: MA Experiment ID: 108543 Result: Up-regulated in Transcription
  misc_feature: MA Experiment ID: 108545 Result: Up-regulated in Transcription
  misc_feature: MA Experiment 108545 PARAMETER Experiment Name: Zm_Imbibed_Seeds_P Parameter: Age (day) Value: 3 vs. 2
  misc_feature: MA Experiment 108545 PARAMETER Experiment Name: Zm_Imbibed_Seeds_P Parameter: Organism Value: Zea mays
  misc_feature: MA Experiment 108545 PARAMETER Experiment Name: Zm_Imbibed_Seeds_P Parameter: Plant Line Value: 35A19
  misc_feature: MA Experiment 108545 PARAMETER Experiment Name: Zm_Imbibed_Seeds_P Parameter: Tissue Value: Aerial vs. Embryo
  misc_feature: MA Experiment ID: 20000535 Result: Down-regulated in Transcription
  misc_feature: MA Experiment 20000535 PARAMETER Experiment Name: Zm_Hybrid_Seed_Dev_P Parameter: DAP Value: 30 vs. 12
  misc_feature: MA Experiment 20000535 PARAMETER Experiment Name: Zm_Hybrid_Seed_Dev_P Parameter: Organism Value: Zea mays
  misc_feature: MA Experiment 20000535 PARAMETER Experiment Name: Zm_Hybrid_Seed_Dev_P Parameter: Plant Line Value: 35A19
  misc_feature: MA Experiment 20000535 PARAMETER Experiment Name: Zm_Hybrid_Seed_Dev_P Parameter: Tissue Value: Embryo vs. Unfert Floret
acgatctctatttcccatttccgggcggctcccgttctccacctcaattattgcccacccatccccgctccctcctctcctctcctcccgtcccacccatctcctcgcaccagcgccgggggaatggcggccgcgctgtggacgctggtggtggcggtggccctgtcggcggcgctggcctcgaaccgccccgtggngcgggcggcgacggcggcggcggaggcggcgaacgaggtgctccgcgcgcaccagctgccggggggcctgctgccggcggggatcacggcgttccggcacgacgccgccacgggagcgttcgaggcccggctggacgcgccctgcacggcgcgcttcgaggtcggcctccgctacaacgccaccgtctccggggtcatcagccccggccagatcgcccgacatctccggcgtcgccgcgcaggacctcttcatgtggttccccgtccacgacatcaaggtcgacatcccctcctccggcgtcatctacttcaacgtcggcgtcgtcaagaagcacctcccgctcgccgtcttcgacgcgccgccggcttgcacgcccgacccgctcctgcagcggctggaggacgtgggcgagggcggattggccgtggtgggcgccgcggcgtcccggcgatgatgggtggaggagacggaggagggttcgacggcgccggcgagccaggatcacgagcgcagttttgagaggagaacgggcgatcgccggccttcttcgatgcacatagatagcgtgggcatttccatctgttttctttttctgcttcctactagtggctacactagtaaccaacctcgtctatcattgttcgtttcgcc

SEQ ID NO: 7871 - protein, 251 aa, Zea mays subsp. mays
  peptide (1)..(251): Ceres Seq. ID no. 13498111
  misc_feature (32)..(97): Pfam Name: Bindin Pfam Description: Bindin
  misc_feature (39)..(196): Homolog of NCBI NO: 24643731 NR Description: CG10918-PA [Drosophila melanogaster]
  misc_feature (40)..(177): Homolog of NCBI NO: 9453857 NR Description: EBNA-1 [Cynomolgus Epstein-Barr Virus TsB-B6]
  misc_feature (7)..(119): Homolog of NCBI NO: 9625624 NR Description: nuclear antigen EBNA1 [Human herpesvirus 4]
  misc_feature (40)..(110): Homolog of NCBI NO: 7106228 NR Description: flagelliform silk protein [Nephila
  misc_feature (40)..(180): Homolog of NCBI NO: 9453859 NR Description: EBNA-1 [Cynomolgus Epstein-Barr Virus Si-IIA]
  misc_feature (39)..(178): Homolog of NCBI NO: 18025496 NR Description: EBNA-1 [cercopithicine herpesvirus 15]
  misc_feature (40)..(115): Homolog of NCBI NO: 322647 NR Description: glycine-rich protein GRP22 - rape
  misc_feature (40)..(95): Homolog of NCBI NO: 322647 NR Description: glycine-rich protein GRP22 - rape
  misc_feature (7)..(119): Homolog of NCBI NO: 24652652 NR Description: CG13214-PA [Drosophila melanogaster]
  misc_feature (40)..(121): Homolog of NCBI NO: 24652652 NR Description: CG13214-PA [Drosophila melanogaster]
  misc_feature (65)..(65): Xaa is any aa, unknown or other
DLYFPFPGGSRSPPQLLPTHPRSLLSSPPVPPISSHQRRGNGGRAVDAGGGGGPVGGAGLEPPRXAGGDGGGGGGERGAPRAPAAGGPAAGGDHGVPARRRHGSVRGPAGRALHGALRGRPPLQRHRLRGHQPRPDRPTSPASPRRTSSCGSPSTTSRSTSPPPASSTSTSASSRSTSRSPSSTRRRLARPTRSCSGWRTWARADWPWWAPRRPGDDGWRRRRRVRRRRRARITSAVLRGERAIAGLLRCT

SEQ ID NO: 7872 - protein, 238 aa, Zea mays subsp. mays
  peptide (1)..(238): Ceres Seq. ID no. 13498112
  misc_feature (68)..(138): Pfam Name: Protein of unknown function, DUF538 Pfam Description: Protein of unknown function, DUF538
  misc_feature (68)..(138): Homolog of NCBI NO: 34906900 NR Description: P0470A12.30 [Oryza sativa (japonica
  misc_feature (50)..(138): Homolog of NCBI NO: 18397959 NR Description: expressed protein [Arabidopsis thaliana] AT3g07470/F21O3_18 [Arabidopsis thaliana]
  misc_feature (50)..(138): Homolog of NCBI NO: 6041854 NR Description: unknown protein [Arabidopsis thaliana]
  misc_feature (49)..(137): Homolog of NCBI NO: 6041844 NR Description: unknown protein [Arabidopsis thaliana]
  misc_feature (49)..(137): Homolog of NCBI NO: 22330911 NR Description: expressed protein [Arabidopsis thaliana] unknown protein [Arabidopsis thaliana]
  misc_feature (49)..(137): Homolog of NCBI NO: 21592465 NR Description: unknown [Arabidopsis thaliana]
  misc_feature (78)..(137): Homolog of NCBI NO: 9759120 NR Description: gb|AAF02163.1~gene_id:MQK4.11~similar to unknown
  misc_feature (78)..(137): Homolog of NCBI NO: 18417957 NR Description: expressed protein [Arabidopsis thaliana] unknown protein [Arabidopsis thaliana]
  misc_feature (78)..(137): Homolog of NCBI NO: 21536941 NR Description: unknown [Arabidopsis thaliana]
  misc_feature (42)..(137): Homolog of NCBI NO: 34898576 NR Description: P0534A03.14 [Oryza sativa (japonica >gi|28564794|dbj|BAC57724.1| hypothetical protein [Oryza sativa
  misc_feature (66)..(66): Xaa is any aa, unknown or other
TISISHFRAAPVLHLNYCPPIPAPSSPLLPSHPSPRTSAGGMAAALWTLVVAVALSAALASNRPVXRAATAAAEAANEVLRAHQLPGGLLPAGITAFRHDAATGAFEARLDAPCTARFEVGLRYNATVSGVISPGQIARHLRRRRAGPLHVVPRPRHQGRHPLLRRHLLQRRRRQEAPPARRLRRAAGLHARPAPAAAGGRGRGRIGRGGRRGVPAMMGGGDGGGFDGAGEPGSRAQF

SEQ ID NO: 7873 - protein, 216 aa, Zea mays subsp. mays
  peptide (1)..(216): Ceres Seq. ID no. 13498113
  misc_feature (136)..(194): Pfam Name: Protein of unknown function, DUF538 Pfam Description: Protein of unknown function, DUF538
  misc_feature (136)..(215): Homolog of NCBI NO: 34906900 NR Description: P0470A12.30 [Oryza sativa (japonica
  misc_feature (130)..(199): Homolog of NCBI NO: 18397959 NR Description: expressed protein [Arabidopsis thaliana] AT3g07470/F21O3_18 [Arabidopsis thaliana]
  misc_feature (130)..(191): Homolog of NCBI NO: 6041854 NR Description: unknown protein [Arabidopsis thaliana]
  misc_feature (130)..(189): Homolog of NCBI NO: 6041844 NR Description: unknown protein [Arabidopsis thaliana]
  misc_feature (130)..(189): Homolog of NCBI NO: 22330911 NR Description: expressed protein [Arabidopsis thaliana] unknown protein [Arabidopsis thaliana]
  misc_feature (130)..(189): Homolog of NCBI NO: 21592465 NR Description: unknown [Arabidopsis thaliana]
  misc_feature (130)..(190): Homolog of NCBI NO: 9759120 NR Description: gb|AAF02163.1~gene_id:MQK4.11~similar to unknown
  misc_feature (130)..(190): Homolog of NCBI NO: 18417957 NR Description: expressed protein [Arabidopsis thaliana] unknown protein [Arabidopsis thaliana]
  misc_feature (130)..(190): Homolog of NCBI NO: 21536941 NR Description: unknown [Arabidopsis thaliana]
  misc_feature (140)..(191): Homolog of NCBI NO: 34898576 NR Description: P0534A03.14 [Oryza sativa (japonica >gi|28564794|dbj|BAC57724.1| hypothetical protein [Oryza sativa
  misc_feature (66)..(66): Xaa is any aa, unknown or other
RSLFPISGRLPFSTSIIAHPSPLPPLLSSRPTHLLAPAPGEWRPRCGRWWWRWPCRRRWPRTAPWXGRRRRRRRRRTRCSARTSCRGACCRRGSRRSGTTPPRERSRPGWTRPARRASRSASATTPPSPGSSAPARSPDISGVAAQDLFMWFPVHDIKVDIPSSGVIYFNVGVVKKHLPLAVFDAPPACTPDPLLQRLEDVGEGGLAVVGAAASRR

SEQ ID NO: 7874 - protein, 197 aa, Zea mays subsp. mays
  peptide (1)..(197): Ceres Seq. ID no. 13498114
  misc_feature (27)..(97): Pfam Name: Protein of unknown function, DUF538 Pfam Description: Protein of unknown function, DUF538
  misc_feature (27)..(97): Homolog of NCBI NO: 34906900 NR Description: P0470A12.30 [Oryza sativa (japonica
  misc_feature (9)..(97): Homolog of NCBI NO: 18397959 NR Description: expressed protein [Arabidopsis thaliana] AT3g07470/F21O3_18 [Arabidopsis thaliana]
  misc_feature (9)..(97): Homolog of NCBI NO: 6041854 NR Description: unknown protein [Arabidopsis thaliana]
  misc_feature (8)..(96): Homolog of NCBI NO: 6041844 NR Description: unknown protein [Arabidopsis thaliana]
  misc_feature (8)..(96): Homolog of NCBI NO: 22330911 NR Description: expressed protein [Arabidopsis thaliana] unknown protein [Arabidopsis thaliana]
  misc_feature (8)..(96): Homolog of NCBI NO: 21592465 NR Description: unknown [Arabidopsis thaliana]
  misc_feature (37)..(96): Homolog of NCBI NO: 9759120 NR Description: gb|AAF02163.1~gene_id:MQK4.11~similar to unknown
  misc_feature (37)..(96): Homolog of NCBI NO: 18417957 NR Description: expressed protein [Arabidopsis thaliana] unknown protein [Arabidopsis thaliana]
  misc_feature (37)..(96): Homolog of NCBI NO: 21536941 NR Description: unknown [Arabidopsis thaliana]
  misc_feature (1)..(96): Homolog of NCBI NO: 34898576 NR Description: P0534A03.14 [Oryza sativa (japonica >gi|28564794|dbj|BAC57724.1| hypothetical protein [Oryza sativa
  misc_feature (25)..(25): Xaa is any aa, unknown or other
MAAALWTLVVAVALSAALASNRPVXRAATAAAEAANEVLRAHQLPGGLLPAGITAFRHDAATGAFEARLDAPCTARFEVGLRYNATVSGVISPGQIARHLRRRRAGPLHVVPRPRHQGRHPLLRRHLLQRRRRQEAPPARRLRRAAGLHARPAPAAAGGRGRGRIGRGGRRGVPAMMGGGDGGGFDGAGEPGSRAQF

SEQ ID NO: 7875 - DNA, 1099 bp, Zea mays subsp. mays
  misc_feature (1)..(1099): Ceres Seq. ID no. 12403084
  misc_feature: MA Experiment ID: 108535 Result: Up-regulated in Transcription
  misc_feature: MA Experiment 108535 PARAMETER Experiment Name: Zm_Meristem_P Parameter: Age (day) Value: 8
  misc_feature: MA Experiment 108535 PARAMETER Experiment Name: Zm_Meristem_P Parameter: Organism Value: Zea mays
  misc_feature: MA Experiment 108535 PARAMETER Experiment Name: Zm_Meristem_P Parameter: Plant Line Value: 35A19
  misc_feature: MA Experiment 108535 PARAMETER Experiment Name: Zm_Meristem_P Parameter: Tissue Value: Root Meristem vs. Above Root Meristem
acacttctccattccattgcggttctgcgagcccctacctccctgtggtgcttggccatggcggactaccacttcgtgtataaggacgtggagggggcgagcacagagtgggacgacatccagcgccgcctcgggaacttgcccccgaagccggagcccttcaagccgccgcccttcgccccgaaggttgacgccgacgagcagcccaagtccaaggaatggcttgacgtgcgcgagcccgaagagctcgaggaactagaggacgatctggatgacgaccgcttcctcgagaagtacaggaagatgaggctcgcagagctgagggaagccgcaaaagccgcgcgatttggtactatacttcccatcactggctccgacttcgtgcgggaggtatcgcaggcacaatcagatgtttgggttgtggtcttcctctacaaggatgggatacctgaatgtggattgcttcagaattgtttggaagaattggctactaggtatccagcgacgaagtttgttaaaattatctccacagactgcatccccaactacccagataggaatgttcctacaatactggtgtataacaacagtgctgtcaaagggacttatgttggtttgcagaagtttggtggaaagagatgcacacctgaatctgttgcgttagccctttgccagtcagacccggtactgaatgatgggcatggtggcagcgattcatctcggggcaatgtcttcgaaggtgttcgcaggaagttcatagagaaggttgtggcccagcatgaagagcgggaagaagaggacagtgactaagctaatacttgtgtttgttttccgcagctggcggatccaatttggttccaatgtttactgatcttatgtgatttttgtgggtgaaatttgccagagttttctgatacctggctgtgcggctgaagtttttgaaagttcacgggtcttattgcctacctttcagctgtaacacagctccattattatattgttaagagatcagagatgattagtgcacttgtataattgcatgagaaaaaatccagccaaactttgaatccacagtatttcactatcttgaacatttccc

SEQ ID NO: 7876 - protein, 269 aa, Zea mays subsp. mays
  peptide (1)..(269): Ceres Seq. ID no. 12403085
  misc_feature (20)..(269): Homolog of NCBI NO: 34906294 NR Description: unnamed protein product [Oryza sativa (japonica group)] >gi|9558421|dbj|BAB03357.1| unnamed protein product
  misc_feature (20)..(267): Homolog of NCBI NO: 15241349 NR Description: putative protein; protein id: At5g14240.1, by cDNA: 37589. [Arabidopsis thaliana] >gi|11357553|pir||T48597
  misc_feature (20)..(267): Homolog of NCBI NO: 21593265 NR Description: unknown [Arabidopsis thaliana]
  misc_feature (33)..(232): Homolog of NCBI NO: 13129044 NR Description: IAP-associated factor VIAF1; phosducin-like 2
  misc_feature (33)..(229): Homolog of NCBI NO: 31560120 NR Description: IAP-associated factor VIAF1 [Mus musculus]
  misc_feature (33)..(229): Homolog of NCBI NO: 12835481 NR Description: unnamed protein product [Mus musculus]
  misc_feature (33)..(229): Homolog of NCBI NO: 34875632 NR Description: similar to IAP-associated factor VIAF1 [Rattus
  misc_feature (33)..(232): Homolog of NCBI NO: 9957067 NR Description: IAP-associated factor Viaf1 [Danio rerio]
  misc_feature (33)..(232): Homolog of NCBI NO: 40555753 NR Description: Unknown (protein for MGC:73170) [Danio rerio]
  misc_feature (35)..(229): Homolog of NCBI NO: 32966896 NR Description: IAP-associated factor Viaf1 [Branchiostoma
TLLHSIAVLRAPTSLWCLAMADYHFVYKDVEGASTEWDDIQRRLGNLPPKPEPFKPPPFAPKVDADEQPKSKEWLDVREPEELEELEDDLDDDRFLEKYRKMRLAELREAAKAARFGTILPITGSDFVREVSQAQSDVWVVVFLYKDGIPECGLLQNCLEELATRYPATKFVKIISTDCIPNYPDRNVPTILVYNNSAVKGTYVGLQKFGGKRCTPESVALALCQSDPVLNDGHGGSDSSRGNVFEGVRRKFIEKVVAQHEEREEEDSD

SEQ ID NO: 7877 - protein, 250 aa, Zea mays subsp. mays
  peptide (1)..(250): Ceres Seq. ID no. 12403086
  misc_feature (1)..(250): Homolog of NCBI NO: 34906294 NR Description: unnamed protein product [Oryza sativa (japonica group)] >gi|9558421|dbj|BAB03357.1| unnamed protein product
  misc_feature (1)..(248): Homolog of NCBI NO: 15241349 NR Description: putative protein; protein id: At5g14240.1, by cDNA: 37589. [Arabidopsis thaliana] >gi|11357553|pir||T48597
  misc_feature (1)..(248): Homolog of NCBI NO: 21593265 NR Description: unknown [Arabidopsis thaliana]
  misc_feature (14)..(213): Homolog of NCBI NO: 13129044 NR Description: IAP-associated factor VIAF1; phosducin-like 2
  misc_feature (14)..(210): Homolog of NCBI NO: 31560120 NR Description: IAP-associated factor VIAF1 [Mus musculus]
  misc_feature (14)..(210): Homolog of NCBI NO: 12835481 NR Description: unnamed protein product [Mus musculus]
  misc_feature (14)..(210): Homolog of NCBI NO: 34875632 NR Description: similar to IAP-associated factor VIAF1 [Rattus
  misc_feature (14)..(213): Homolog of NCBI NO: 9957067 NR Description: IAP-associated factor Viaf1 [Danio rerio]
  misc_feature (14)..(213): Homolog of NCBI NO: 40555753 NR Description: Unknown (protein for MGC:73170) [Danio rerio]
  misc_feature (16)..(210): Homolog of NCBI NO: 32966896 NR Description: IAP-associated factor Viaf1 [Branchiostoma
MADYHFVYKDVEGASTEWDDIQRRLGNLPPKPEPFKPPPFAPKVDADEQPKSKEWLDVREPEELEELEDDLDDDRFLEKYRKMRLAELREAAKAARFGTILPITGSDFVREVSQAQSDVWVVVFLYKDGIPECGLLQNCLEELATRYPATKFVKIISTDCIPNYPDRNVPTILVYNNSAVKGTYVGLQKFGGKRCTPESVALALCQSDPVLNDGHGGSDSSRGNVFEGVRRKFIEKVVAQHEEREEEDSD

SEQ ID NO: 7878 - protein, 168 aa, Zea mays subsp. mays
  peptide (1)..(168): Ceres Seq. ID no. 12403087
  misc_feature (1)..(168): Homolog of NCBI NO: 34906294 NR Description: unnamed protein product [Oryza sativa (japonica group)] >gi|9558421|dbj|BAB03357.1| unnamed protein product
  misc_feature (1)..(166): Homolog of NCBI NO: 15241349 NR Description: putative protein; protein id: At5g14240.1, by cDNA: 37589. [Arabidopsis thaliana] >gi|11357553|pir||T48597
  misc_feature (1)..(166): Homolog of NCBI NO: 21593265 NR Description: unknown [Arabidopsis thaliana]
  misc_feature (1)..(131): Homolog of NCBI NO: 13129044 NR Description: IAP-associated factor VIAF1; phosducin-like 2
  misc_feature (1)..(128): Homolog of NCBI NO: 31560120 NR Description: IAP-associated factor VIAF1 [Mus musculus]
  misc_feature (1)..(128): Homolog of NCBI NO: 12835481 NR Description: unnamed protein product [Mus musculus]
  misc_feature (1)..(128): Homolog of NCBI NO: 34875632 NR Description: similar to IAP-associated factor VIAF1 [Rattus
  misc_feature (1)..(131): Homolog of NCBI NO: 9957067 NR Description: IAP-associated factor Viaf1 [Danio rerio]
  misc_feature (1)..(131): Homolog of NCBI NO: 40555753 NR Description: Unknown (protein for MGC:73170) [Danio rerio]
  misc_feature (1)..(128): Homolog of NCBI NO: 32966896 NR Description: IAP-associated factor Viaf1 [Branchiostoma
MRLAELREAAKAARFGTILPITGSDFVREVSQAQSDVWVVVFLYKDGIPECGLLQNCLEELATRYPATKFVKIISTDCIPNYPDRNVPTILVYNNSAVKGTYVGLQKFGGKRCTPESVALALCQSDPVLNDGHGGSDSSRGNVFEGVRRKFIEKVVAQHEEREEEDSD

SEQ ID NO: 7879 - DNA, 1036 bp, Zea mays subsp. mays
  misc_feature (1)..(1036): Ceres Seq. ID no. 12401998
  misc_feature: MA Experiment ID: 108504 Result: Up-regulated in Transcription
  misc_feature: MA Experiment 108504 PARAMETER Experiment Name: Zm_Drought_P Parameter: Age (day) Value: 8
  misc_feature: MA Experiment 108504 PARAMETER Experiment Name: Zm_Drought_P Parameter: Organism Value: Zea mays
  misc_feature: MA Experiment 108504 PARAMETER Experiment Name: Zm_Drought_P Parameter: Plant Line Value: 35A19
  misc_feature: MA Experiment 108504 PARAMETER Experiment Name: Zm_Drought_P Parameter: Timepoint (hr) Value: 12
  misc_feature: MA Experiment 108504 PARAMETER Experiment Name: Zm_Drought_P Parameter: Tissue Value: Aerial
  misc_feature: MA Experiment 108504 PARAMETER Experiment Name: Zm_Drought_P Parameter: Treatment Value: Drought vs. No Drought
  misc_feature: MA Experiment ID: 108513 Result: Up-regulated in Transcription
  misc_feature: MA Experiment 108513 PARAMETER Experiment Name: Zm_100uM_ABA_P Parameter: Age (day) Value: 8
  misc_feature: MA Experiment 108513 PARAMETER Experiment Name: Zm_100uM_ABA_P Parameter: Organism Value: Zea mays
  misc_feature: MA Experiment 108513 PARAMETER Experiment Name: Zm_100uM_ABA_P Parameter: Plant Line Value: 35A19
  misc_feature: MA Experiment 108513 PARAMETER Experiment Name: Zm_100uM_ABA_P Parameter: Timepoint (hr) Value: 6
  misc_feature: MA Experiment 108513 PARAMETER Experiment Name: Zm_100uM_ABA_P Parameter: Tissue Value: Aerial
  misc_feature: MA Experiment 108513 PARAMETER Experiment Name: Zm_100uM_ABA_P Parameter: Treatment Value: 100uM ABA vs. No Treatment
  misc_feature: MA Experiment ID: 108528 Result: Up-regulated in Transcription
  misc_feature: MA Experiment 108528 PARAMETER Experiment Name: Zm_Imbibed_Seeds_P Parameter: Age (day) Value: 5 vs. 2
  misc_feature: MA Experiment 108528 PARAMETER Experiment Name: Zm_Imbibed_Seeds_P Parameter: Organism Value: Zea mays
  misc_feature: MA Experiment 108528 PARAMETER Experiment Name: Zm_Imbibed_Seeds_P Parameter: Plant Line Value: 35A19
  misc_feature: MA Experiment 108528 PARAMETER Experiment Name: Zm_Imbibed_Seeds_P Parameter: Tissue Value: Aerial vs. Embryo
  misc_feature: MA Experiment ID: 108529 Result: Up-regulated in Transcription
  misc_feature: MA Experiment 108529 PARAMETER Experiment Name: Zm_Imbibed_Seeds_P Parameter: Age (day) Value: 5 vs. 2
  misc_feature: MA Experiment 108529 PARAMETER Experiment Name: Zm_Imbibed_Seeds_P Parameter: Organism Value: Zea mays
  misc_feature: MA Experiment 108529 PARAMETER Experiment Name: Zm_Imbibed_Seeds_P Parameter: Plant Line Value: 35A19
  misc_feature: MA Experiment 108529 PARAMETER Experiment Name: Zm_Imbibed_Seeds_P Parameter: Tissue Value: Roots vs. Embryo
  misc_feature: MA Experiment ID: 108530 Result: Up-regulated in Transcription
  misc_feature: MA Experiment 108530 PARAMETER Experiment Name: Zm_Imbibed_Seeds_P Parameter: Age (day) Value: 6 vs. 2
  misc_feature: MA Experiment 108530 PARAMETER Experiment Name: Zm_Imbibed_Seeds_P Parameter: Organism Value: Zea mays
  misc_feature: MA Experiment 108530 PARAMETER Experiment Name: Zm_Imbibed_Seeds_P Parameter: Plant Line Value: 35A19
  misc_feature: MA Experiment 108530 PARAMETER Experiment Name: Zm_Imbibed_Seeds_P Parameter: Tissue Value: Aerial vs. Embryo
  misc_feature: MA Experiment ID: 108533 Result: Down-regulated in Transcription
  misc_feature: MA Experiment 108533 PARAMETER Experiment Name: Zm_4deg_Cold_P Parameter: Age (hr) Value: 8
  misc_feature: MA Experiment 108533 PARAMETER Experiment Name: Zm_4deg_Cold_P Parameter: Organism Value: Zea mays
  misc_feature: MA Experiment 108533 PARAMETER Experiment Name: Zm_4deg_Cold_P Parameter: Plant Line Value: 35A19
  misc_feature: MA Experiment 108533 PARAMETER Experiment Name: Zm_4deg_Cold_P Parameter: Temperature (deg C) Value: 4 vs. 22
  misc_feature: MA Experiment 108533 PARAMETER Experiment Name: Zm_4deg_Cold_P Parameter: Timepoint (hr) Value: 1
  misc_feature: MA Experiment 108533 PARAMETER Experiment Name: Zm_4deg_Cold_P Parameter: Tissue Value: Aerial
  misc_feature: MA Experiment ID: 108540 Result: Up-regulated in Transcription
  misc_feature: MA Experiment 108540 PARAMETER Experiment Name: Zm_20percent_PEG_P Parameter: Age (day) Value: 8
  misc_feature: MA Experiment 108540 PARAMETER Experiment Name: Zm_20percent_PEG_P Parameter: Organism Value: Zea mays
  misc_feature: MA Experiment 108540 PARAMETER Experiment Name: Zm_20percent_PEG_P Parameter: Plant Line Value: 35A19
  misc_feature: MA Experiment 108540 PARAMETER Experiment Name: Zm_20percent_PEG_P Parameter: Timepoint (hr) Value: 6
  misc_feature: MA Experiment 108540 PARAMETER Experiment Name: Zm_20percent_PEG_P Parameter: Tissue Value: Aerial
  misc_feature: MA Experiment 108540 PARAMETER Experiment Name: Zm_20percent_PEG_P Parameter: Treatment Value: 20percent PEG vs. No Treatment
  misc_feature: MA Experiment ID: 108546 Result: Up-regulated in Transcription
  misc_feature: MA Experiment 108546 PARAMETER Experiment Name: Zm_Imbibed_Seeds_P Parameter: Age (day) Value: 3 vs. 2
  misc_feature: MA Experiment 108546 PARAMETER Experiment Name: Zm_Imbibed_Seeds_P Parameter: Organism Value: Zea mays
  misc_feature: MA Experiment 108546 PARAMETER Experiment Name: Zm_Imbibed_Seeds_P Parameter: Plant Line Value: 35A19
  misc_feature: MA Experiment 108546 PARAMETER Experiment Name: Zm_Imbibed_Seeds_P Parameter: Tissue Value: Roots vs. Embryo
  misc_feature: MA Experiment ID: 108547 Result: Up-regulated in Transcription
  misc_feature: MA Experiment 108547 PARAMETER Experiment Name: Zm_Imbibed_Seeds_P Parameter: Age (day) Value: 4 vs. 2
  misc_feature: MA Experiment 108547 PARAMETER Experiment Name: Zm_Imbibed_Seeds_P Parameter: Organism Value: Zea mays
  misc_feature: MA Experiment 108547 PARAMETER Experiment Name: Zm_Imbibed_Seeds_P Parameter: Plant Line Value: 35A19
  misc_feature: MA Experiment 108547 PARAMETER Experiment Name: Zm_Imbibed_Seeds_P Parameter: Tissue Value: Aerial vs. Embryo
  misc_feature: MA Experiment ID: 108556 Result: Up-regulated in Transcription
  misc_feature: MA Experiment 108556 PARAMETER Experiment Name: Zm_Drought_P Parameter: Age (day) Value: 9
  misc_feature: MA Experiment 108556 PARAMETER Experiment Name: Zm_Drought_P Parameter: Organism Value: Zea mays
  misc_feature: MA Experiment 108556 PARAMETER Experiment Name: Zm_Drought_P Parameter: Plant Line Value: 35A19
  misc_feature: MA Experiment 108556 PARAMETER Experiment Name: Zm_Drought_P Parameter: Timepoint (hr) Value: 24
  misc_feature: MA Experiment 108556 PARAMETER Experiment Name: Zm_Drought_P Parameter: Tissue Value: Aerial
  misc_feature: MA Experiment 108556 PARAMETER Experiment Name: Zm_Drought_P Parameter: Treatment Value: Drought vs. No Drought
  misc_feature: MA Experiment ID: 108597 Result: Up-regulated in Transcription
  misc_feature: MA Experiment 108597 PARAMETER Experiment Name: Zm_100uM_ABA_P Parameter: Age (day) Value: 9
  misc_feature: MA Experiment 108597 PARAMETER Experiment Name: Zm_100uM_ABA_P Parameter: Organism Value: Zea mays
  misc_feature: MA Experiment 108597 PARAMETER Experiment Name: Zm_100uM_ABA_P Parameter: Plant Line Value: 35A19
  misc_feature: MA Experiment 108597 PARAMETER Experiment Name: Zm_100uM_ABA_P Parameter: Timepoint (hr) Value: 24
  misc_feature: MA Experiment 108597 PARAMETER Experiment Name: Zm_100uM_ABA_P Parameter: Tissue Value: Aerial
  misc_feature: MA Experiment 108597 PARAMETER Experiment Name: Zm_100uM_ABA_P Parameter: Treatment Value: 100uM ABA vs. No Treatment
  misc_feature: MA Experiment ID: 20000477 Result: Up-regulated in Transcription
  misc_feature: MA Experiment 20000477 PARAMETER Experiment Name: Zm_5mM_SA_P Parameter: Age (day) Value: 10
  misc_feature: MA Experiment 20000477 PARAMETER Experiment Name: Zm_5mM_SA_P Parameter: Organism Value: Zea mays
  misc_feature: MA Experiment 20000477 PARAMETER Experiment Name: Zm_5mM_SA_P Parameter: Plant Line Value: 35A19
  misc_feature: MA Experiment 20000477 PARAMETER Experiment Name: Zm_5mM_SA_P Parameter: Timepoint (hr) Value: 48
  misc_feature: MA Experiment 20000477 PARAMETER Experiment Name: Zm_5mM_SA_P Parameter: Tissue Value: Aerial
  misc_feature: MA Experiment 20000477 PARAMETER Experiment Name: Zm_5mM_SA_P Parameter: Treatment Value: 5mM SA vs. No Treatment
  misc_feature: MA Experiment ID: 20000478 Result: Up-regulated in Transcription
  misc_feature: MA Experiment 20000478 PARAMETER Experiment Name: Zm_5mM_SA_P Parameter: Age (day) Value: 11
  misc_feature: MA Experiment 20000478 PARAMETER Experiment Name: Zm_5mM_SA_P Parameter: Organism Value: Zea mays
  misc_feature: MA Experiment 20000478 PARAMETER Experiment Name: Zm_5mM_SA_P Parameter: Plant Line Value: 35A19
  misc_feature: MA Experiment 20000478 PARAMETER Experiment Name: Zm_5mM_SA_P Parameter: Timepoint (hr) Value: 72
  misc_feature: MA Experiment 20000478 PARAMETER Experiment Name: Zm_5mM_SA_P Parameter: Tissue Value: Aerial
  misc_feature: MA Experiment 20000478 PARAMETER Experiment Name: Zm_5mM_SA_P Parameter: Treatment Value: 5mM SA vs. No Treatment
  misc_feature: MA Experiment ID: 20000492 Result: Down-regulated in Transcription
  misc_feature: MA Experiment 20000492 PARAMETER Experiment Name: Zm_Hybrid_Seed_Dev_P Parameter: DAP Value: 12
  misc_feature: MA Experiment 20000492 PARAMETER Experiment Name: Zm_Hybrid_Seed_Dev_P Parameter: Organism Value: Zea mays
  misc_feature: MA Experiment 20000492 PARAMETER Experiment Name: Zm_Hybrid_Seed_Dev_P Parameter: Plant Line Value: 35A19
  misc_feature: MA Experiment 20000492 PARAMETER Experiment Name: Zm_Hybrid_Seed_Dev_P Parameter: Tissue Value: Fert Kernel vs. Unfert Floret
  misc_feature: MA Experiment ID: 20000532 Result: Up-regulated in Transcription
  misc_feature: MA Experiment 20000532 PARAMETER Experiment Name: Zm_0.001percent_MeJA_P Parameter: Age (day) Value: 10
  misc_feature: MA Experiment 20000532 PARAMETER Experiment Name: Zm_0.001percent_MeJA_P Parameter: Organism Value: Zea mays
  misc_feature: MA Experiment 20000532 PARAMETER Experiment Name: Zm_0.001percent_MeJA_P Parameter: Plant Line Value: 35A19
  misc_feature: MA Experiment 20000532 PARAMETER Experiment Name: Zm_0.001percent_MeJA_P Parameter: Timepoint (hr) Value: 48
  misc_feature: MA Experiment 20000532 PARAMETER Experiment Name: Zm_0.001percent_MeJA_P Parameter: Tissue Value: Aerial
  misc_feature: MA Experiment 20000532 PARAMETER Experiment Name: Zm_0.001percent_MeJA_P Parameter: Treatment Value: 0.001percent MeJA vs. No Treatment
  misc_feature: MA Experiment ID: 20000533 Result: Up-regulated in Transcription
  misc_feature: MA Experiment 20000533 PARAMETER Experiment Name: Zm_0.001percent_MeJA_P Parameter: Age (day) Value: 11
  misc_feature: MA Experiment 20000533 PARAMETER Experiment Name: Zm_0.001percent_MeJA_P Parameter: Organism Value: Zea mays
  misc_feature: MA Experiment 20000533 PARAMETER Experiment Name: Zm_0.001percent_MeJA_P Parameter: Plant Line Value: 35A19
  misc_feature: MA Experiment 20000533 PARAMETER Experiment Name: Zm_0.001percent_MeJA_P Parameter: Timepoint (hr) Value: 72
  misc_feature: MA Experiment 20000533 PARAMETER Experiment Name: Zm_0.001percent_MeJA_P Parameter: Tissue Value: Aerial
  misc_feature: MA Experiment 20000533 PARAMETER Experiment Name: Zm_0.001percent_MeJA_P Parameter: Treatment Value: 0.001percent MeJA vs. No Treatment
  misc_feature: MA Experiment ID: 20000535 Result: Down-regulated in Transcription
  misc_feature: MA Experiment 20000535 PARAMETER Experiment Name: Zm_Hybrid_Seed_Dev_P Parameter: DAP Value: 30 vs. 12
  misc_feature: MA Experiment 20000535 PARAMETER Experiment Name: Zm_Hybrid_Seed_Dev_P Parameter: Organism Value: Zea mays
  misc_feature: MA Experiment 20000535 PARAMETER Experiment Name: Zm_Hybrid_Seed_Dev_P Parameter: Plant Line Value: 35A19
  misc_feature: MA Experiment 20000535 PARAMETER Experiment Name: Zm_Hybrid_Seed_Dev_P Parameter: Tissue Value: Embryo vs. Unfert Floret
actagtagtgctgtgtctaatagttctagtgtcgtgccgggccggacggcagtttggccatctataactgtacaccatatagcaccaatcactccgcagtgcagacgcagcgcatgcaggtagcaatggcgggggagacgaagaagggcctggtgctgctggacttctgggtgagcccgttcgggcagcgctgccgcatcgcgctggcggagaagggcatcgcctacgagtactcggagcaggagctgctgggcggcgccaagagcgacatcctcctccgctccaacccggtgcacaagaagatccccgtgctcctccacgacggccgccccgtctgcgagtccctcgtcatcctcgagtacctcgaggaggccttcccggaggcctcccccaggctgctccccgacgccgcctacgcgcgcgcgcaggcccgcttctgggcggcctactccgacaaggtctacaaggccggcacgcggctgtggaagctcaggggcgacgcgcgggcgcaggcgcgcgccgagatcgtgcaggtggtccggaacctcgacggcgagctaggggacaaggccttcttcggcggcgaggcgttcgggttcgtggacgtggcgctcgtgcccttcgtgccgtggctccccagctacgagcggtacggggacttcagcgtggcggagatcgcgcccaggctggcggcgtgggcgcgccggtgcgcgcagcgggagagcgtggccaggacccttcacccgccggaaaaggtggacgagttcatcaacctgctcaagaagacctacggcatcgagtagtagagcggactactactagcagaggagatggtaccggccgtacgtacgtggctgccatgcagtttttgtttcggtttgtttaaacgggactccatgaatggatggaactcttcttgggctccgtgtgctacatacacatctgtaaaggtgaactaaaatcacggtaaaaactcggaaattagtttgtaaagggtccagcccccctcctttataaatagagaggtatacggctg

SEQ ID NO: 7880 - protein, 229 aa, Zea mays subsp. mays
  peptide (1)..(229): Ceres Seq. ID no. 12401999
  misc_feature (5)..(229): Homolog of NCBI NO: 11385489 NR Description: glutathione S-transferase GST 19 [Zea mays]
  misc_feature (5)..(229): Homolog of NCBI NO: 6683765 NR Description: glutathione-S-transferase [Hordeum vulgare]
  misc_feature (5)..(229): Homolog of NCBI NO: 20067417 NR Description: glutathione transferase [Triticum aestivum]
  misc_feature (5)..(229): Homolog of NCBI NO: 20067419 NR Description: glutathione transferase [Triticum aestivum]
  misc_feature (5)..(229): Homolog of NCBI NO: 20067415 NR Description: glutathione transferase [Triticum aestivum]
  misc_feature (5)..(229): Homolog of NCBI NO: 7447304 NR Description: glutathione transferase (EC 2.5.1.18) - maize
  misc_feature (13)..(227): Homolog of NCBI NO: 4468796 NR Description: GST6 protein [Zea mays]
  misc_feature (10)..(229): Homolog of NCBI NO: 33357806 NR Description: Chain A, Crystal Structure Solution Of Rice Gst1 In Complex With Glutathione. >gi|33357807|pdb|1OYJ|B Chain B, Structure Solution Of Rice Gst1 (Osgstu1) In Complex With Gst1
  misc_feature (13)..(227): Homolog of NCBI NO: 11177831 NR Description: putative glutathione S-transferase OsGSTU5 [Oryza
  misc_feature (10)..(229): Homolog of NCBI NO: 7447301 NR Description: glutathione transferase (EC 2.5.1.18) - rice
MQVAMAGETKKGLVLLDFWVSPFGQRCRIALAEKGIAYEYSEQELLGGAKSDILLRSNPVHKKIPVLLHDGRPVCESLVILEYLEEAFPEASPRLLPDAAYARAQARFWAAYSDKVYKAGTRLWKLRGDARAQARAEIVQVVRNLDGELGDKAFFGGEAFGFVDVALVPFVPWLPSYERYGDFSVAEIAPRLAAWARRCAQRESVARTLHPPEKVDEFINLLKKTYGIE

SEQ ID NO: 7881 - protein, 225 aa, Zea mays subsp. mays
  peptide (1)..(225): Ceres Seq. ID no. 12402000
  misc_feature (1)..(225): Homolog of NCBI NO: 11385489 NR Description: glutathione S-transferase GST 19 [Zea mays]
  misc_feature (1)..(225): Homolog of NCBI NO: 6683765 NR Description: glutathione-S-transferase [Hordeum vulgare]
  misc_feature (1)..(225): Homolog of NCBI NO: 20067417 NR Description: glutathione transferase [Triticum aestivum]
  misc_feature (1)..(225): Homolog of NCBI NO: 20067419 NR Description: glutathione transferase [Triticum aestivum]
  misc_feature (1)..(225): Homolog of NCBI NO: 20067415 NR Description: glutathione transferase [Triticum aestivum]
  misc_feature (1)..(225): Homolog of NCBI NO: 7447304 NR Description: glutathione transferase (EC 2.5.1.18) - maize
  misc_feature (9)..(223): Homolog of NCBI NO: 4468796 NR Description: GST6 protein [Zea mays]
  misc_feature (6)..(225): Homolog of NCBI NO: 33357806 NR Description: Chain A, Crystal Structure Solution Of Rice Gst1 In Complex With Glutathione. >gi|33357807|pdb|1OYJ|B Chain B, Structure Solution Of Rice Gst1 (Osgstu1) In Complex With Gst1
  misc_feature (9)..(223): Homolog of NCBI NO: 11177831 NR Description: putative glutathione S-transferase OsGSTU5 [Oryza
  misc_feature (6)..(225): Homolog of NCBI NO: 7447301 NR Description: glutathione transferase (EC 2.5.1.18) - rice
MAGETKKGLVLLDFWVSPFGQRCRIALAEKGIAYEYSEQELLGGAKSDILLRSNPVHKKIPVLLHDGRPVCESLVILEYLEEAFPEASPRLLPDAAYARAQARFWAAYSDKVYKAGTRLWKLRGDARAQARAEIVQVVRNLDGELGDKAFFGGEAFGFVDVALVPFVPWLPSYERYGDFSVAEIAPRLAAWARRCAQRESVARTLHPPEKVDEFINLLKKTYGIE

SEQ ID NO: 7882 - DNA, 796 bp, Zea mays subsp. mays
  misc_feature (1)..(796): Ceres Seq. ID no. 12595084
  misc_feature: MA Experiment ID: 108535 Result: Up-regulated in Transcription
  misc_feature: MA Experiment 108535 PARAMETER Experiment Name: Zm_Meristem_P Parameter: Age (day) Value: 8
  misc_feature: MA Experiment 108535 PARAMETER Experiment Name: Zm_Meristem_P Parameter: Organism Value: Zea mays
  misc_feature: MA Experiment 108535 PARAMETER Experiment Name: Zm_Meristem_P Parameter: Plant Line Value: 35A19
  misc_feature: MA Experiment 108535 PARAMETER Experiment Name: Zm_Meristem_P Parameter: Tissue Value: Root Meristem vs. Above Root Meristem
  misc_feature: MA Experiment ID: 108556 Result: Down-regulated in Transcription
  misc_feature: MA Experiment 108556 PARAMETER Experiment Name: Zm_Drought_P Parameter: Age (day) Value: 9
  misc_feature: MA Experiment 108556 PARAMETER Experiment Name: Zm_Drought_P Parameter: Organism Value: Zea mays
  misc_feature: MA Experiment 108556 PARAMETER Experiment Name: Zm_Drought_P Parameter: Plant Line Value: 35A19
  misc_feature: MA Experiment 108556 PARAMETER Experiment Name: Zm_Drought_P Parameter: Timepoint (hr) Value: 24
  misc_feature: MA Experiment 108556 PARAMETER Experiment Name: Zm_Drought_P Parameter: Tissue Value: Aerial
  misc_feature: MA Experiment 108556 PARAMETER Experiment Name: Zm_Drought_P Parameter: Treatment Value: Drought vs. No Drought
  misc_feature: MA Experiment ID: 108597 Result: Down-regulated in Transcription
  misc_feature: MA Experiment 108597 PARAMETER Experiment Name: Zm_100uM_ABA_P Parameter: Age (day) Value: 9
  misc_feature: MA Experiment 108597 PARAMETER Experiment Name: Zm_100uM_ABA_P Parameter: Organism Value: Zea mays
  misc_feature: MA Experiment 108597 PARAMETER Experiment Name: Zm_100uM_ABA_P Parameter: Plant Line Value: 35A19
  misc_feature: MA Experiment 108597 PARAMETER Experiment Name: Zm_100uM_ABA_P Parameter: Timepoint (hr) Value: 24
  misc_feature: MA Experiment 108597 PARAMETER Experiment Name: Zm_100uM_ABA_P Parameter: Tissue Value: Aerial
  misc_feature: MA Experiment 108597 PARAMETER Experiment Name: Zm_100uM_ABA_P Parameter: Treatment Value: 100uM ABA vs. No Treatment
  misc_feature: MA Experiment ID: 20000478 Result: Down-regulated in Transcription
  misc_feature: MA Experiment 20000478 PARAMETER Experiment Name: Zm_5mM_SA_P Parameter: Age (day) Value: 11
  misc_feature: MA Experiment 20000478 PARAMETER Experiment Name: Zm_5mM_SA_P Parameter: Organism Value: Zea mays
  misc_feature: MA Experiment 20000478 PARAMETER Experiment Name: Zm_5mM_SA_P Parameter: Plant Line Value: 35A19
  misc_feature: MA Experiment 20000478 PARAMETER Experiment Name: Zm_5mM_SA_P Parameter: Timepoint (hr) Value: 72
  misc_feature: MA Experiment 20000478 PARAMETER Experiment Name: Zm_5mM_SA_P Parameter: Tissue Value: Aerial
  misc_feature: MA Experiment 20000478 PARAMETER Experiment Name: Zm_5mM_SA_P Parameter: Treatment Value: 5mM SA vs. No Treatment
  misc_feature: MA Experiment ID: 20000479 Result: Down-regulated in Transcription
  misc_feature: MA Experiment 20000479 PARAMETER Experiment Name: Zm_Drought_P Parameter: Age (day) Value: 10
  misc_feature: MA Experiment 20000479 PARAMETER Experiment Name: Zm_Drought_P Parameter: Organism Value: Zea mays
  misc_feature: MA Experiment 20000479 PARAMETER Experiment Name: Zm_Drought_P Parameter: Plant Line Value: 35A19
  misc_feature: MA Experiment 20000479 PARAMETER Experiment Name: Zm_Drought_P Parameter: Timepoint (hr) Value: 48
  misc_feature: MA Experiment 20000479 PARAMETER Experiment Name: Zm_Drought_P Parameter: Tissue Value: Aerial
  misc_feature: MA Experiment 20000479 PARAMETER Experiment Name: Zm_Drought_P Parameter: Treatment Value: Drought vs. No Drought
  misc_feature: MA Experiment ID: 20000534 Result: Down-regulated in Transcription
  misc_feature: MA Experiment 20000534 PARAMETER Experiment Name: Zm_Hybrid_Pollen_P Parameter: Age (day) Value: 8
  misc_feature: MA Experiment 20000534 PARAMETER Experiment Name: Zm_Hybrid_Pollen_P Parameter: Organism Value: Zea mays
  misc_feature: MA Experiment 20000534 PARAMETER Experiment Name: Zm_Hybrid_Pollen_P Parameter: Plant Line Value: 35A19
  misc_feature: MA Experiment 20000534 PARAMETER Experiment Name: Zm_Hybrid_Pollen_P Parameter: Tissue Value: Pollen vs. Aerial
  misc_feature: MA Experiment ID: 20000632 Result: Down-regulated in Transcription
  misc_feature: MA Experiment 20000632 PARAMETER Experiment Name: Zm_Herbicide-Treatments_P Parameter: Timepoint (hr) Value: 4
  misc_feature: MA Experiment 20000632 PARAMETER Experiment Name: Zm_Herbicide-Treatments_P Parameter: Tissue Value: Aerial
  misc_feature: MA Experiment 20000632 PARAMETER Experiment Name: Zm_Herbicide-Treatments_P Parameter: Treatment Value: Glean vs. No Treatment
ccatcgccccccacaccgtctcctccacaacacgctcctcacctcgcggcgactcttgccaggcattcctccgcgaaaaacgcatccgctccaaggggagttgatcgagaagcgttggtggacatgggtcagatccagtactccgagaagtacttcgacgacacctacgagtacaggcacgtcgtcctcccgcccgaggtcgccaagctcctccccaagaaccgtctcctgtccgagaacgagtggcgcgcgatcggagtgcagcagagccgcgggtgggtgcactacgcgatccaccgcccggagccgcacatcatgctgttccgccgcccgatcaactaccagcagcagcaggaggcggctgccgcgcagatgctggccaagtgagcccccggtggccagggcggcgaccaggaacgtttaaaaccctaaccccctttccatctctaaaaggggcgtcgctgttctgttgatcaattcctctatgctgttagttggaaacttcgggtgtagttggtggatttgctggtgtgtgccttgtgttcgtggaaattcctgtgaaggaactgccatgtgttaggctgttaccatgcccattttcttaatactatgtgttgactgtgatcaagatggcactcatgcagggatgatatttaatctgtttgacgtgatctttgtaatggtgtgatctggttagtagcactgatatcatgtttaatctgttatgtgtgatggtcagtatggtcatggtgattttgcatgatgagaattgttacctagtgatctaagtttagtc

SEQ ID NO: 7883 - protein, 140 aa, Zea mays subsp. mays
  peptide (1)..(140): Ceres Seq. ID no. 12595085
HRPPHRLLHNTLLTSRRLLPGIPPRKTHPLQGELIEKRWWTWVRSSTPRSTSTTPTSTGTSSSRPRSPSSSPRTVSCPRTSGARSECSRAAGGCTTRSTARSRTSCCSAARSTTSSSRRRLPRRCWPSEPPVARAATRNV

SEQ ID NO: 7884 - protein, 128 aa, Zea mays subsp. mays
  peptide (1)..(128): Ceres Seq. ID no. 12595086
  misc_feature (42)..(113): Pfam Name: Cyclin-dependent kinase regulatory subunit Pfam Description: Cyclin-dependent kinase regulatory subunit
  misc_feature (42)..(113): Pfam Name: Cyclin-dependent kinase regulatory subunit Pfam Description: Cyclin-dependent kinase regulatory subunit
  misc_feature (42)..(128): Homolog of NCBI NO: 15451612 NR Description: Putative cyclin-dependent kinase regulatory
  misc_feature (42)..(128): Homolog of NCBI NO: 15226294 NR Description: CDK-subunit 1; protein id: At2g27960.1, supported cDNA: 5750. [Arabidopsis thaliana] >gi|25287718|pir||A84679
  misc_feature (42)..(128): Homolog of NCBI NO: 40641585 NR Description: putative cyclin-dependent kinase regulatory
  misc_feature (42)..(124): Homolog of NCBI NO: 15226297 NR Description: CDK-subunit 2; protein id: At2g27970.1
  misc_feature (42)..(121): Homolog of NCBI NO: 27435806 NR Description: CKS1 protein [Populus tremula x Populus
  misc_feature (45)..(112): Homolog of NCBI NO: 2493727 NR Description: PROBABLE CYCLIN-DEPENDENT KINASES REGULATORY
  misc_feature (44)..(127): Homolog of NCBI NO: 21355377 NR Description: CG9790-PA [Drosophila melanogaster]
  misc_feature (44)..(118): Homolog of NCBI NO: 13384804 NR Description: RIKEN cDNA 1110038L14 [Mus musculus]
  misc_feature (44)..(118): Homolog of NCBI NO: 4502859 NR Description: CDC28 protein kinase 2; CKS1(S. cerevisiae
  misc_feature (36)..(111): Homolog of NCBI NO: 2493729 NR Description: CYCLIN-DEPENDENT KINASES REGULATORY SUBUNIT
  misc_feature (42)..(128): Homolog of NCBI NO: 15451612 NR Description: Putative cyclin-dependent kinase regulatory
  misc_feature (42)..(128): Homolog of NCBI NO: 15226294 NR Description: CDK-subunit 1; protein id: At2g27960.1, supported cDNA: 5750. [Arabidopsis thaliana] >gi|25287718|pir||A84679
  misc_feature (42)..(128): Homolog of NCBI NO: 40641585 NR Description: putative cyclin-dependent kinase regulatory
  misc_feature (42)..(124): Homolog of NCBI NO: 15226297 NR Description: CDK-subunit 2; protein id: At2g27970.1
  misc_feature (42)..(121): Homolog of NCBI NO: 27435806 NR Description: CKS1 protein [Populus tremula x Populus
  misc_feature (45)..(112): Homolog of NCBI NO: 2493727 NR Description: PROBABLE CYCLIN-DEPENDENT KINASES REGULATORY
  misc_feature (44)..(127): Homolog of NCBI NO: 21355377 NR Description: CG9790-PA [Drosophila melanogaster]
  misc_feature (44)..(118): Homolog of NCBI NO: 13384804 NR Description: RIKEN cDNA 1110038L14 [Mus musculus]
  misc_feature (44)..(118): Homolog of NCBI NO: 4502859 NR Description: CDC28 protein kinase 2; CKS1(S. cerevisiae
  misc_feature (36)..(111): Homolog of NCBI NO: 2493729 NR Description: CYCLIN-DEPENDENT KINASES REGULATORY SUBUNIT
PSPPTPSPPQHAPHLAATLARHSSAKNASAPRGVDREALVDMGQIQYSEKYFDDTYEYRHVVLPPEVAKLLPKNRLLSENEWRAIGVQQSRGWVHYAIHRPEPHIMLFRRPINYQQQQEAAAAQMLAK

SEQ ID NO: 7885 - protein, 87 aa, Zea mays subsp. mays
  peptide (1)..(87): Ceres Seq. ID no. 12595087
  misc_feature (1)..(72): Pfam Name: Cyclin-dependent kinase regulatory subunit Pfam Description: Cyclin-dependent kinase regulatory subunit
  misc_feature (1)..(72): Pfam Name: Cyclin-dependent kinase regulatory subunit Pfam Description: Cyclin-dependent kinase regulatory subunit
  misc_feature (1)..(87): Homolog of NCBI NO: 15451612 NR Description: Putative cyclin-dependent kinase regulatory
  misc_feature (1)..(87): Homolog of NCBI NO: 15226294 NR Description: CDK-subunit 1; protein id: At2g27960.1, supported cDNA: 5750. [Arabidopsis thaliana] >gi|25287718|pir||A84679
  misc_feature (1)..(87): Homolog of NCBI NO: 40641585 NR Description: putative cyclin-dependent kinase regulatory
  misc_feature (1)..(83): Homolog of NCBI NO: 15226297 NR Description: CDK-subunit 2; protein id: At2g27970.1
  misc_feature (1)..(80): Homolog of NCBI NO: 27435806 NR Description: CKS1 protein [Populus tremula x Populus
  misc_feature (1)..(87): Homolog of NCBI NO: 15226294 NR Description: CDK-subunit 1; protein id: At2g27960.1, supported cDNA: 5750. [Arabidopsis thaliana] >gi|25287718|pir||A84679
  misc_feature (1)..(83): Homolog of NCBI NO: 15226297 NR Description: CDK-subunit 2; protein id: At2g27970.1
  misc_feature (1)..(70): Homolog of NCBI NO: 2493729 NR Description: CYCLIN-DEPENDENT KINASES REGULATORY SUBUNIT
  misc_feature (3)..(77): Homolog of NCBI NO: 4502859 NR Description: CDC28 protein kinase 2; CKS1(S. cerevisiae
  misc_feature (3)..(77): Homolog of NCBI NO: 13384804 NR Description: RIKEN cDNA 1110038L14 [Mus musculus]
  misc_feature (3)..(86): Homolog of NCBI NO: 21355377 NR Description: CG9790-PA [Drosophila melanogaster]
  misc_feature (4)..(71): Homolog of NCBI NO: 2493727 NR Description: PROBABLE CYCLIN-DEPENDENT KINASES REGULATORY
  misc_feature (1)..(80): Homolog of NCBI NO: 27435806 NR Description: CKS1 protein [Populus tremula x Populus
  misc_feature (1)..(87): Homolog of NCBI NO: 40641585 NR Description: putative cyclin-dependent kinase regulatory
  misc_feature (1)..(87): Homolog of NCBI NO: 15451612 NR Description: Putative cyclin-dependent kinase regulatory
  misc_feature (4)..(71): Homolog of NCBI NO: 2493727 NR Description: PROBABLE CYCLIN-DEPENDENT KINASES REGULATORY
  misc_feature (3)..(86): Homolog of NCBI NO: 21355377 NR Description: CG9790-PA [Drosophila melanogaster]
  misc_feature (3)..(77): Homolog of NCBI NO: 13384804 NR Description: RIKEN cDNA 1110038L14 [Mus musculus]
  misc_feature (3)..(77): Homolog of NCBI NO: 4502859 NR Description: CDC28 protein kinase 2; CKS1(S. cerevisiae
  misc_feature (1)..(70): Homolog of NCBI NO: 2493729 NR Description: CYCLIN-DEPENDENT KINASES REGULATORY SUBUNIT
MGQIQYSEKYFDDTYEYRHVVLPPEVAKLLPKNRLLSENEWRAIGVQQSRGWVHYAIHRPEPHIMLFRRPINYQQQQEAAAAQMLAK

SEQ ID NO: 7886 - DNA, 832 bp, Zea mays subsp. mays
  misc_feature (1)..(832): Ceres Seq. ID no. 12404307
  misc_feature: MA Experiment ID: 108527 Result: Down-regulated in Transcription
  misc_feature: MA Experiment 108527 PARAMETER Experiment Name: Zm_5mM_NO_P Parameter: Age (day) Value: 8
  misc_feature: MA Experiment 108527 PARAMETER Experiment Name: Zm_5mM_NO_P Parameter: Organism Value: Zea mays
  misc_feature: MA Experiment 108527 PARAMETER Experiment Name: Zm_5mM_NO_P Parameter: Plant Line Value: 35A19
  misc_feature: MA Experiment 108527 PARAMETER Experiment Name: Zm_5mM_NO_P Parameter: Timepoint (hr) Value: 6
  misc_feature: MA Experiment 108527 PARAMETER Experiment Name: Zm_5mM_NO_P Parameter: Tissue Value: Aerial
  misc_feature: MA Experiment 108527 PARAMETER Experiment Name: Zm_5mM_NO_P Parameter: Treatment Value: 5mM NO vs. No Treatment
  misc_feature: MA Experiment ID: 108528 Result: Up-regulated in Transcription
  misc_feature: MA Experiment 108528 PARAMETER Experiment Name: Zm_Imbibed_Seeds_P Parameter: Age (day) Value: 5 vs. 2
  misc_feature: MA Experiment 108528 PARAMETER Experiment Name: Zm_Imbibed_Seeds_P Parameter: Organism Value: Zea mays
  misc_feature: MA Experiment 108528 PARAMETER Experiment Name: Zm_Imbibed_Seeds_P Parameter: Plant Line Value: 35A19
  misc_feature: MA Experiment 108528 PARAMETER Experiment Name: Zm_Imbibed_Seeds_P Parameter: Tissue Value: Aerial vs. Embryo
  misc_feature: MA Experiment ID: 108529 Result: Down-regulated in Transcription
  misc_feature: MA Experiment 108529 PARAMETER Experiment Name: Zm_Imbibed_Seeds_P Parameter: Age (day) Value: 5 vs. 2
  misc_feature: MA Experiment 108529 PARAMETER Experiment Name: Zm_Imbibed_Seeds_P Parameter: Organism Value: Zea mays
  misc_feature: MA Experiment 108529 PARAMETER Experiment Name: Zm_Imbibed_Seeds_P Parameter: Plant Line Value: 35A19
  misc_feature: MA Experiment 108529 PARAMETER Experiment Name: Zm_Imbibed_Seeds_P Parameter: Tissue Value: Roots vs. Embryo
  misc_feature: MA Experiment ID: 108530 Result: Up-regulated in Transcription
  misc_feature: MA Experiment 108530 PARAMETER Experiment Name: Zm_Imbibed_Seeds_P Parameter: Age (day) Value: 6 vs. 2
  misc_feature: MA Experiment 108530 PARAMETER Experiment Name: Zm_Imbibed_Seeds_P Parameter: Organism Value: Zea mays
  misc_feature: MA Experiment 108530 PARAMETER Experiment Name: Zm_Imbibed_Seeds_P Parameter: Plant Line Value: 35A19
  misc_feature: MA Experiment 108530 PARAMETER Experiment Name: Zm_Imbibed_Seeds_P Parameter: Tissue Value: Aerial vs. Embryo
  misc_feature: MA Experiment ID: 108536 Result: Down-regulated in Transcription
  misc_feature: MA Experiment 108536 PARAMETER Experiment Name: Zm_Meristem_P Parameter: Age (day) Value: 8
  misc_feature: MA Experiment 108536 PARAMETER Experiment Name: Zm_Meristem_P Parameter: Organism Value: Zea mays
  misc_feature: MA Experiment 108536 PARAMETER Experiment Name: Zm_Meristem_P Parameter: Plant Line Value: 35A19
  misc_feature: MA Experiment 108536 PARAMETER Experiment Name: Zm_Meristem_P Parameter: Tissue Value: Shoot Meristem vs. Above Shoot Meristem
  misc_feature: MA Experiment ID: 108543 Result: Up-regulated in Transcription
  misc_feature: MA Experiment ID: 108545 Result: Up-regulated in Transcription
  misc_feature: MA Experiment 108545 PARAMETER Experiment Name: Zm_Imbibed_Seeds_P Parameter: Age (day) Value: 3 vs. 2
  misc_feature: MA Experiment 108545 PARAMETER Experiment Name: Zm_Imbibed_Seeds_P Parameter: Organism Value: Zea mays
  misc_feature: MA Experiment 108545 PARAMETER Experiment Name: Zm_Imbibed_Seeds_P Parameter: Plant Line Value: 35A19
  misc_feature: MA Experiment 108545 PARAMETER Experiment Name: Zm_Imbibed_Seeds_P Parameter: Tissue Value: Aerial vs. Embryo
  misc_feature: MA Experiment ID: 108546 Result: Down-regulated in Transcription
  misc_feature: MA Experiment 108546 PARAMETER Experiment Name: Zm_Imbibed_Seeds_P Parameter: Age (day) Value: 3 vs. 2
  misc_feature: MA Experiment 108546 PARAMETER Experiment Name: Zm_Imbibed_Seeds_P Parameter: Organism Value: Zea mays
  misc_feature: MA Experiment 108546 PARAMETER Experiment Name: Zm_Imbibed_Seeds_P Parameter: Plant Line Value: 35A19
  misc_feature: MA Experiment 108546 PARAMETER Experiment Name: Zm_Imbibed_Seeds_P Parameter: Tissue Value: Roots vs. Embryo
  misc_feature: MA Experiment ID: 108687 Result: Down-regulated in Transcription
  misc_feature: MA Experiment 108687 PARAMETER Experiment Name: Zm_Embryos-Flowers__P Parameter: Tissue Value: Embryo vs. Aerial+
  misc_feature: MA Experiment ID: 20000480 Result: Down-regulated in Transcription
  misc_feature: MA Experiment 20000480 PARAMETER Experiment Name: Zm_Drought_P Parameter: Age (day) Value: 11
  misc_feature: MA Experiment 20000480 PARAMETER Experiment Name: Zm_Drought_P Parameter: Organism Value: Zea mays
  misc_feature: MA Experiment 20000480 PARAMETER Experiment Name: Zm_Drought_P Parameter: Plant Line Value: 35A19
  misc_feature: MA Experiment 20000480 PARAMETER Experiment Name: Zm_Drought_P Parameter: Timepoint (hr) Value: 72
  misc_feature: MA Experiment 20000480 PARAMETER Experiment Name: Zm_Drought_P Parameter: Tissue Value: Aerial
  misc_feature: MA Experiment 20000480 PARAMETER Experiment Name: Zm_Drought_P Parameter: Treatment Value: Drought vs. No Drought
  misc_feature: MA Experiment ID: 20000488 Result: Up-regulated in Transcription
  misc_feature: MA Experiment 20000488 PARAMETER Experiment Name: Zm_50mM_NH4NO3_L_to_H_P Parameter: Organism Value: Zea mays
  misc_feature: MA Experiment 20000488 PARAMETER Experiment Name: Zm_50mM_NH4NO3_L_to_H_P Parameter: Timepoint (hr) Value: 8
  misc_feature: MA Experiment 20000488 PARAMETER Experiment Name: Zm_50mM_NH4NO3_L_to_H_P Parameter: Tissue Value: Leaves
  misc_feature: MA Experiment 20000488 PARAMETER Experiment Name: Zm_50mM_NH4NO3_L_to_H_P Parameter: Treatment Value: 50mM NH4NO3 vs. 100mM Mannitol
  misc_feature: MA Experiment ID: 20000535 Result: Down-regulated in Transcription
  misc_feature: MA Experiment 20000535 PARAMETER Experiment Name: Zm_Hybrid_Seed_Dev_P Parameter: DAP Value: 30 vs. 12
  misc_feature: MA Experiment 20000535 PARAMETER Experiment Name: Zm_Hybrid_Seed_Dev_P Parameter: Organism Value: Zea mays
  misc_feature: MA Experiment 20000535 PARAMETER Experiment Name: Zm_Hybrid_Seed_Dev_P Parameter: Plant Line Value: 35A19
  misc_feature: MA Experiment 20000535 PARAMETER Experiment Name: Zm_Hybrid_Seed_Dev_P Parameter: Tissue Value: Embryo vs. Unfert Floret
  misc_feature: MA Experiment ID: 20000626 Result: Down-regulated in Transcription
  misc_feature: MA Experiment 20000626 PARAMETER Experiment Name: Zm_Herbicide-Treatments_P Parameter: Timepoint (hr) Value: 12
  misc_feature: MA Experiment 20000626 PARAMETER Experiment Name: Zm_Herbicide-Treatments_P Parameter: Tissue Value: Aerial
  misc_feature: MA Experiment 20000626 PARAMETER Experiment Name: Zm_Herbicide-Treatments_P Parameter: Treatment Value: Roundup vs. No Treatment
  misc_feature: MA Experiment ID: 20001606 Result: Up-regulated in Transcription
  misc_feature: MA Experiment 20001606 PARAMETER Experiment Name: Zm_50ppm_KNO3_L-to-H_P Parameter: Age (day) Value: 19
  misc_feature: MA Experiment 20001606 PARAMETER Experiment Name: Zm_50ppm_KNO3_L-to-H_P Parameter: Organism Value: Zea mays
  misc_feature: MA Experiment 20001606 PARAMETER Experiment Name: Zm_50ppm_KNO3_L-to-H_P Parameter: Plant Line Value: 35A19
  misc_feature: MA Experiment 20001606 PARAMETER Experiment Name: Zm_50ppm_KNO3_L-to-H_P Parameter: Timepoint (hr) Value: 8
  misc_feature: MA Experiment 20001606 PARAMETER Experiment Name: Zm_50ppm_KNO3_L-to-H_P Parameter: Tissue Value: Shoots
  misc_feature: MA Experiment 20001606 PARAMETER Experiment Name: Zm_50ppm_KNO3_L-to-H_P Parameter: Treatment Value: 50ppm KNO3 vs. 50ppm KCl
  misc_feature: MA Experiment ID: 20001608 Result: Up-regulated in Transcription
  misc_feature: MA Experiment 20001608 PARAMETER Experiment Name: Zm_50ppm_KNO3_L-to-H_P Parameter: Age (day) Value: 21
  misc_feature: MA Experiment 20001608 PARAMETER Experiment Name: Zm_50ppm_KNO3_L-to-H_P Parameter: Organism Value: Zea mays
  misc_feature: MA Experiment 20001608 PARAMETER Experiment Name: Zm_50ppm_KNO3_L-to-H_P Parameter: Plant Line Value: 35A19
  misc_feature: MA Experiment 20001608 PARAMETER Experiment Name: Zm_50ppm_KNO3_L-to-H_P Parameter: Timepoint (hr) Value: 48
  misc_feature: MA Experiment 20001608 PARAMETER Experiment Name: Zm_50ppm_KNO3_L-to-H_P Parameter: Tissue Value: Shoots
  misc_feature: MA Experiment 20001608 PARAMETER Experiment Name: Zm_50ppm_KNO3_L-to-H_P Parameter: Treatment Value: 50ppm KNO3 vs. 50ppm KCl
atcctagaaggaaacaggaacaggcagctctgaaagactgaaactcacggccatggccatcctgggcgccctcaggctcgcgccgtctccacccgccctcgccggcgctgcgccaccggctacgtcgccgtctgcggctgtacgctcctccgtgcacttccacctcgccaatgccggcgccgccgcgctcgtcgccgcctcgctcctcgccgccgaccccgccgtggctttcattggaggaggaccgtacgggaagcaggtgacgcgggggcaggacctcaccggcaaggacttcagcggccagacactcatcaagcaggacttcaagacgtctatactgaggcaggcgaacttcaaaggcgcgaacctgctcggcgcgagcttcttcgatgcagacctcacaagcgctgatctctctgacgctgatcttagaggcgctgatttgtcgctggcgaatttaacgaaggcaaacttatcaaatgccaacttagaaggggcacttgccactgggaacacttctttcaaaggtgccgacataactggggcagattttaccgatgtgccgctgcgagatgatcaacgggagtacctctgcaaaatcgctgacggagtaaattcaaccactggaaacccaacaaaggagactctgttctgcagctgatcgacggaaggacctgggacttgtgacttattcaacgtcttgataaacttgcatctgctgctgtaagcacgtgaggaatgtaaattgagttatagagggttcctagaaataataactggtaattacgtgtaaatcaaccaacaataaaagtgtgtgctgccctttgaatgt

SEQ ID NO: 7887 - protein, 202 aa, Zea mays subsp. mays
  peptide (1)..(202): Ceres Seq. ID no. 12404308
  misc_feature (94)..(133): Pfam Name: Pentapeptide repeats (8 copies) Pfam Description: Pentapeptide repeats (8 copies)
  misc_feature (3)..(201): Homolog of NCBI NO: 34895746 NR Description: P0024G09.19 [Oryza sativa (japonica
  misc_feature (24)..(202): Homolog of NCBI NO: 18406661 NR Description: thylakoid lumen pentapeptide repeat family protein id: At2g44920.2 [Arabidopsis thaliana] Thylakoid lumenal 15 kDa protein, chloroplast precursor (p15)
  misc_feature (24)..(165): Homolog of NCBI NO: 18406663 NR Description: thylakoid lumen pentapeptide repeat family protein id: At2g44920.1 [Arabidopsis thaliana]
  misc_feature (59)..(201): Homolog of NCBI NO: 23128511 NR Description: hypothetical protein [Nostoc punctiforme]
  misc_feature (43)..(201): Homolog of NCBI NO: 33865584 NR Description: conserved hypothetical protein [Synechococcus sp.
  misc_feature (76)..(201): Homolog of NCBI NO: 17230824 NR Description: hypothetical protein [Nostoc sp. PCC 7120]
  misc_feature (72)..(201): Homolog of NCBI NO: 16331083 NR Description: unknown protein [Synechocystis sp. PCC 6803]
  misc_feature (64)..(201): Homolog of NCBI NO: 22298403 NR Description: ORF_ID:tll0860~hypothetical protein
  misc_feature (57)..(201): Homolog of NCBI NO: 23039927 NR Description: hypothetical protein [Trichodesmium erythraeum
  misc_feature (101)..(202): Homolog of NCBI NO: 7486947 NR Description: hypothetical protein At2g44920 [imported] -
MAILGALRLAPSPPALAGAAPPATSPSAAVRSSVHFHLANAGAAALVAASLLAADPAVAFIGGGPYGKQVTRGQDLTGKDFSGQTLIKQDFKTSILRQANFKGANLLGASFFDADLTSADLSDADLRGADLSLANLTKANLSNANLEGALATGNTSFKGADITGADFTDVPLRDDQREYLCKIADGVNSTTGNPTKETLFCS

SEQ ID NO: 7888 - DNA, 666 bp, Zea mays subsp. mays
  misc_feature (1)..(666): Ceres Seq. ID no. 12403251
  misc_feature: MA Experiment ID: 108527 Result: Up-regulated in Transcription
  misc_feature: MA Experiment 108527 PARAMETER Experiment Name: Zm_5mM_NO_P Parameter: Age (day) Value: 8
  misc_feature: MA Experiment 108527 PARAMETER Experiment Name: Zm_5mM_NO_P Parameter: Organism Value: Zea mays
  misc_feature: MA Experiment 108527 PARAMETER Experiment Name: Zm_5mM_NO_P Parameter: Plant Line Value: 35A19
  misc_feature: MA Experiment 108527 PARAMETER Experiment Name: Zm_5mM_NO_P Parameter: Timepoint (hr) Value: 6
  misc_feature: MA Experiment 108527 PARAMETER Experiment Name: Zm_5mM_NO_P Parameter: Tissue Value: Aerial
  misc_feature: MA Experiment 108527 PARAMETER Experiment Name: Zm_5mM_NO_P Parameter: Treatment Value: 5mM NO vs. No Treatment
  misc_feature: MA Experiment ID: 20000477 Result: Up-regulated in Transcription
  misc_feature: MA Experiment 20000477 PARAMETER Experiment Name: Zm_5mM_SA_P Parameter: Age (day) Value: 10
  misc_feature: MA Experiment 20000477 PARAMETER Experiment Name: Zm_5mM_SA_P Parameter: Organism Value: Zea mays
  misc_feature: MA Experiment 20000477 PARAMETER Experiment Name: Zm_5mM_SA_P Parameter: Plant Line Value: 35A19
  misc_feature: MA Experiment 20000477 PARAMETER Experiment Name: Zm_5mM_SA_P Parameter: Timepoint (hr) Value: 48
  misc_feature: MA Experiment 20000477 PARAMETER Experiment Name: Zm_5mM_SA_P Parameter: Tissue Value: Aerial
  misc_feature: MA Experiment 20000477 PARAMETER Experiment Name: Zm_5mM_SA_P Parameter: Treatment Value: 5mM SA vs. No Treatment
  misc_feature: MA Experiment ID: 20000478 Result: Up-regulated in Transcription
  misc_feature: MA Experiment 20000478 PARAMETER Experiment Name: Zm_5mM_SA_P Parameter: Age (day) Value: 11
  misc_feature: MA Experiment 20000478 PARAMETER Experiment Name: Zm_5mM_SA_P Parameter: Organism Value: Zea mays
  misc_feature: MA Experiment 20000478 PARAMETER Experiment Name: Zm_5mM_SA_P Parameter: Plant Line Value: 35A19
  misc_feature: MA Experiment 20000478 PARAMETER Experiment Name: Zm_5mM_SA_P Parameter: Timepoint (hr) Value: 72
  misc_feature: MA Experiment 20000478 PARAMETER Experiment Name: Zm_5mM_SA_P Parameter: Tissue Value: Aerial
  misc_feature: MA Experiment 20000478 PARAMETER Experiment Name: Zm_5mM_SA_P Parameter: Treatment Value: 5mM SA vs. No Treatment
gccggtaggagcggaggagacggcgtctcgccgctcgcttcgtttccgccttccccctcccgcaaagtcgccgccggctcgcattcgtggttccgcgtgggggtccggggaaacgcgacgagagaggcggaagcgatggcgaagtcgtgcaaggggttggccatggagctcgtcaagtgtctcagcgagacccactgcgtcaaggtgcagaaaaggccgtacaaggagtgcgctggggagaaggtgcccaacattaccagcgagtgcgctggcctgcgggagacctacttcaactgcaagaggggccaggttgacatgcgggcccgaatacgcgggaacaagggatactagtgatgtgcctgcaatatccacaatcagttttggtttctagccatgcttctgtgacattgaggtgtaatgataacatggtttagtgtgcccgtgttctgtttttgataggtgaggggaactcacaacacacgtggcttcaattgatgaggggagtgcattcatgtctacattctattacatttgatattccctctgttttaaattgtttgacgttttgttactatgatctatgcgtgtagcaaaagttaatctatggtccgtttggtttagctgtagattcctgaaaatctaattctagccgtgaaagttgcagcg

SEQ ID NO: 7889 - protein, 129 aa, Zea mays subsp. mays
  peptide (1)..(129): Ceres Seq. ID no. 12403252
PVGAEETASRRSLRFRLPPPAKSPPARIRGSAWGSGETRRERRKRWRSRARGWPWSSSSVSARPTASRCRKGRTRSALGRRCPTLPASALACGRPTSTARGARLTCGPEYAGTRDTSDVPAISTISFGF

SEQ ID NO: 7890 - protein, 116 aa, Zea mays subsp. mays
  peptide (1)..(116): Ceres Seq. ID no. 12403253
  misc_feature (46)..(116): Homolog of NCBI NO: 26452537 NR Description: unknown protein [Arabidopsis thaliana]
  misc_feature (42)..(115): Homolog of NCBI NO: 17509739 NR Description: Assembly cytochrome oxidase like (10.8 kD)
  misc_feature (49)..(116): Homolog of NCBI NO: 24653548 NR Description: CG13018-PA [Drosophila melanogaster]
  misc_feature (42)..(115): Homolog of NCBI NO: 39592432 NR Description: Hypothetical protein CBG07988 [Caenorhabditis
AGRSGGDGVSPLASFPPSPSRKVAAGSHSWFRVGVRGNATREAEAMAKSCKGLAMELVKCLSETHCVKVQKRPYKECAGEKVPNITSECAGLRETYFNCKRGQVDMRARIRGNKGY

SEQ ID NO: 7891 - protein, 71 aa, Zea mays subsp. mays
  peptide (1)..(71): Ceres Seq. ID no. 12403254
  misc_feature (1)..(71): Homolog of NCBI NO: 26452537 NR Description: unknown protein [Arabidopsis thaliana]
  misc_feature (1)..(70): Homolog of NCBI NO: 17509739 NR Description: Assembly cytochrome oxidase like (10.8 kD)
  misc_feature (4)..(71): Homolog of NCBI NO: 24653548 NR Description: CG13018-PA [Drosophila melanogaster]
  misc_feature (1)..(70): Homolog of NCBI NO: 39592432 NR Description: Hypothetical protein CBG07988 [Caenorhabditis
MAKSCKGLAMELVKCLSETHCVKVQKRPYKECAGEKVPNITSECAGLRETYFNCKRGQVDMRARIRGNKGY

SEQ ID NO: 7892 - DNA, 832 bp, Zea mays subsp. mays
  misc_feature (1)..(832): Ceres Seq. ID no. 12351256
  misc_feature: MA Experiment ID: 108523 Result: Down-regulated in Transcription
  misc_feature: MA Experiment 108523 PARAMETER Experiment Name: Zm_42deg_Heat_P Parameter: Age (day) Value: 8
  misc_feature: MA Experiment 108523 PARAMETER Experiment Name: Zm_42deg_Heat_P Parameter: Organism Value: Zea mays
  misc_feature: MA Experiment 108523 PARAMETER Experiment Name: Zm_42deg_Heat_P Parameter: Plant Line Value: 35A19
  misc_feature: MA Experiment 108523 PARAMETER Experiment Name: Zm_42deg_Heat_P Parameter: Temperature (deg C) Value: 42 vs. 22
  misc_feature: MA Experiment 108523 PARAMETER Experiment Name: Zm_42deg_Heat_P Parameter: Timepoint (hr) Value: 6
  misc_feature: MA Experiment 108523 PARAMETER Experiment Name: Zm_42deg_Heat_P Parameter: Tissue Value: Aerial
  misc_feature: MA Experiment ID: 108527 Result: Down-regulated in Transcription
  misc_feature: MA Experiment 108527 PARAMETER Experiment Name: Zm_5mM_NO_P Parameter: Age (day) Value: 8
  misc_feature: MA Experiment 108527 PARAMETER Experiment Name: Zm_5mM_NO_P Parameter: Organism Value: Zea mays
  misc_feature: MA Experiment 108527 PARAMETER Experiment Name: Zm_5mM_NO_P Parameter: Plant Line Value: 35A19
  misc_feature: MA Experiment 108527 PARAMETER Experiment Name: Zm_5mM_NO_P Parameter: Timepoint (hr) Value: 6
  misc_feature: MA Experiment 108527 PARAMETER Experiment Name: Zm_5mM_NO_P Parameter: Tissue Value: Aerial
  misc_feature: MA Experiment 108527 PARAMETER Experiment Name: Zm_5mM_NO_P Parameter: Treatment Value: 5mM NO vs. No Treatment
  misc_feature: MA Experiment ID: 108528 Result: Up-regulated in Transcription
  misc_feature: MA Experiment 108528 PARAMETER Experiment Name: Zm_Imbibed_Seeds_P Parameter: Age (day) Value: 5 vs. 2
  misc_feature: MA Experiment 108528 PARAMETER Experiment Name: Zm_Imbibed_Seeds_P Parameter: Organism Value: Zea mays
  misc_feature: MA Experiment 108528 PARAMETER Experiment Name: Zm_Imbibed_Seeds_P Parameter: Plant Line Value: 35A19
  misc_feature: MA Experiment 108528 PARAMETER Experiment Name: Zm_Imbibed_Seeds_P Parameter: Tissue Value: Aerial vs. Embryo
  misc_feature: MA Experiment ID: 108529 Result: Up-regulated in Transcription
  misc_feature: MA Experiment 108529 PARAMETER Experiment Name: Zm_Imbibed_Seeds_P Parameter: Age (day) Value: 5 vs. 2
  misc_feature: MA Experiment 108529 PARAMETER Experiment Name: Zm_Imbibed_Seeds_P Parameter: Organism Value: Zea mays
  misc_feature: MA Experiment 108529 PARAMETER Experiment Name: Zm_Imbibed_Seeds_P Parameter: Plant Line Value: 35A19
  misc_feature: MA Experiment 108529 PARAMETER Experiment Name: Zm_Imbibed_Seeds_P Parameter: Tissue Value: Roots vs. Embryo
  misc_feature: MA Experiment ID: 108530 Result: Up-regulated in Transcription
  misc_feature: MA Experiment 108530 PARAMETER Experiment Name: Zm_Imbibed_Seeds_P Parameter: Age (day) Value: 6 vs. 2
  misc_feature: MA Experiment 108530 PARAMETER Experiment Name: Zm_Imbibed_Seeds_P Parameter: Organism Value: Zea mays
  misc_feature: MA Experiment 108530 PARAMETER Experiment Name: Zm_Imbibed_Seeds_P Parameter: Plant Line Value: 35A19
  misc_feature: MA Experiment 108530 PARAMETER Experiment Name: Zm_Imbibed_Seeds_P Parameter: Tissue Value: Aerial vs. Embryo
  misc_feature: MA Experiment ID: 108535 Result: Down-regulated in Transcription
  misc_feature: MA Experiment 108535 PARAMETER Experiment Name: Zm_Meristem_P Parameter: Age (day) Value: 8
  misc_feature: MA Experiment 108535 PARAMETER Experiment Name: Zm_Meristem_P Parameter: Organism Value: Zea mays
  misc_feature: MA Experiment 108535 PARAMETER Experiment Name: Zm_Meristem_P Parameter: Plant Line Value: 35A19
  misc_feature: MA Experiment 108535 PARAMETER Experiment Name: Zm_Meristem_P Parameter: Tissue Value: Root Meristem vs. Above Root Meristem
  misc_feature: MA Experiment ID: 108543 Result: Up-regulated in Transcription
  misc_feature: MA Experiment ID: 108547 Result: Up-regulated in Transcription
  misc_feature: MA Experiment 108547 PARAMETER Experiment Name: Zm_Imbibed_Seeds_P Parameter: Age (day) Value: 4 vs. 2
  misc_feature: MA Experiment 108547 PARAMETER Experiment Name: Zm_Imbibed_Seeds_P Parameter: Organism Value: Zea mays
  misc_feature: MA Experiment 108547 PARAMETER Experiment Name: Zm_Imbibed_Seeds_P Parameter: Plant Line Value: 35A19
  misc_feature: MA Experiment 108547 PARAMETER Experiment Name: Zm_Imbibed_Seeds_P Parameter: Tissue Value: Aerial vs. Embryo
  misc_feature: MA Experiment ID: 108556 Result: Down-regulated in Transcription
  misc_feature: MA Experiment 108556 PARAMETER Experiment Name: Zm_Drought_P Parameter: Age (day) Value: 9
  misc_feature: MA Experiment 108556 PARAMETER Experiment Name: Zm_Drought_P Parameter: Organism Value: Zea mays
  misc_feature: MA Experiment 108556 PARAMETER Experiment Name: Zm_Drought_P Parameter: Plant Line Value: 35A19
  misc_feature: MA Experiment 108556 PARAMETER Experiment Name: Zm_Drought_P Parameter: Timepoint (hr) Value: 24
  misc_feature: MA Experiment 108556 PARAMETER Experiment Name: Zm_Drought_P Parameter: Tissue Value: Aerial
  misc_feature: MA Experiment 108556 PARAMETER Experiment Name: Zm_Drought_P Parameter: Treatment Value: Drought vs. No Drought
  misc_feature: MA Experiment ID: 108687 Result: Down-regulated in Transcription
  misc_feature: MA Experiment 108687 PARAMETER Experiment Name: Zm_Embryos-Flowers__P Parameter: Tissue Value: Embryo vs. Aerial+
  misc_feature: MA Experiment ID: 20000477 Result: Down-regulated in Transcription
  misc_feature: MA Experiment 20000477 PARAMETER Experiment Name: Zm_5mM_SA_P Parameter: Age (day) Value: 10
  misc_feature: MA Experiment 20000477 PARAMETER Experiment Name: Zm_5mM_SA_P Parameter: Organism Value: Zea mays
  misc_feature: MA Experiment 20000477 PARAMETER Experiment Name: Zm_5mM_SA_P Parameter: Plant Line Value: 35A19
  misc_feature: MA Experiment 20000477 PARAMETER Experiment Name: Zm_5mM_SA_P Parameter: Timepoint (hr) Value: 48
  misc_feature: MA Experiment 20000477 PARAMETER Experiment Name: Zm_5mM_SA_P Parameter: Tissue Value: Aerial
  misc_feature: MA Experiment 20000477 PARAMETER Experiment Name: Zm_5mM_SA_P Parameter: Treatment Value: 5mM SA vs. No Treatment
  misc_feature: MA Experiment ID: 20000478 Result: Down-regulated in Transcription
  misc_feature: MA Experiment 20000478 PARAMETER Experiment Name: Zm_5mM_SA_P Parameter: Age (day) Value: 11
  misc_feature: MA Experiment 20000478 PARAMETER Experiment Name: Zm_5mM_SA_P Parameter: Organism Value: Zea mays
  misc_feature: MA Experiment 20000478 PARAMETER Experiment Name: Zm_5mM_SA_P Parameter: Plant Line Value: 35A19
  misc_feature: MA Experiment 20000478 PARAMETER Experiment Name: Zm_5mM_SA_P Parameter: Timepoint (hr) Value: 72
  misc_feature: MA Experiment 20000478 PARAMETER Experiment Name: Zm_5mM_SA_P Parameter: Tissue Value: Aerial
  misc_feature: MA Experiment 20000478 PARAMETER Experiment Name: Zm_5mM_SA_P Parameter: Treatment Value: 5mM SA vs. No Treatment
  misc_feature: MA Experiment ID: 20000479 Result: Down-regulated in Transcription
  misc_feature: MA Experiment 20000479 PARAMETER Experiment Name: Zm_Drought_P Parameter: Age (day) Value: 10
  misc_feature: MA Experiment 20000479 PARAMETER Experiment Name: Zm_Drought_P Parameter: Organism Value: Zea mays
  misc_feature: MA Experiment 20000479 PARAMETER Experiment Name: Zm_Drought_P Parameter: Plant Line Value: 35A19
  misc_feature: MA Experiment 20000479 PARAMETER Experiment Name: Zm_Drought_P Parameter: Timepoint (hr) Value: 48
  misc_feature: MA Experiment 20000479 PARAMETER Experiment Name: Zm_Drought_P Parameter: Tissue Value: Aerial
  misc_feature: MA Experiment 20000479 PARAMETER Experiment Name: Zm_Drought_P Parameter: Treatment Value: Drought vs. No Drought
  misc_feature: MA Experiment ID: 20000480 Result: Down-regulated in Transcription
  misc_feature: MA Experiment 20000480 PARAMETER Experiment Name: Zm_Drought_P Parameter: Age (day) Value: 11
  misc_feature: MA Experiment 20000480 PARAMETER Experiment Name: Zm_Drought_P Parameter: Organism Value: Zea mays
  misc_feature: MA Experiment 20000480 PARAMETER Experiment Name: Zm_Drought_P Parameter: Plant Line Value: 35A19
  misc_feature: MA Experiment 20000480 PARAMETER Experiment Name: Zm_Drought_P Parameter: Timepoint (hr) Value: 72
  misc_feature: MA Experiment 20000480 PARAMETER Experiment Name: Zm_Drought_P Parameter: Tissue Value: Aerial
  misc_feature: MA Experiment 20000480 PARAMETER Experiment Name: Zm_Drought_P Parameter: Treatment Value: Drought vs. No Drought
aacggttcacacttcacagcccacatcaacaaatggccaggaaagaagtgacgctcctgctcttcctcgtgctgcttgtcgcagccgtcgaggcacagctgcacgacgagcctacggcggccgctgtcgggcggcggcgtggcgcgaaggccgccacggcgccgacgcacctccacttcttcttccacgacacggtgagcggcaagtcgccgacggcggtacgcgtggtgagcccgccggcgtcgtcgccgtcgcccgtgttcgggatggtgaacgtgatggacgacccgctgacggaagggccggagcaagggtcggcccccgtcggccgcgcccagggcctgtacatggggtccgaccaggccaagatcggcttcctgcaggccatgaacctcgtgttcaccgcgggggactacaacggcagcacgctcgcgctgctcggccgcaactgcccgctcgacgccgtccgcgagctccccgtcgtcggcggcacgggcgcgttccgcttcgcccgcggctacgcgctgctgcgcacccactggctcgacttcgccaccggcgacgccaccgtcgagtacgacgtctacgtcacggactagctaattaataacgtaccgccttgctagccctcaccctcactgatgagtgccataagcattactacaaagacaggaccacgcaacaacaatggtgccaataaaggctttgaagcatgcttcgccacagagcgcctgctttttcttttaaaaccagcattttcgtttcagcttatatatatatttatagaacgcatgatctgtatccaatacaagcttcagaacccctttatgtt

SEQ ID NO: 7893 - protein, 201 aa, Zea mays subsp. mays
  peptide (1)..(201): Ceres Seq. ID no. 12351257
  misc_feature (30)..(186): Homolog of NCBI NO: 18958209 NR Description: subtilisin-like protease PR1G [Metarhizium
TVHTSQPTSTNGQERSDAPALPRAACRSRRGTAARRAYGGRCRAAAWREGRHGADAPPLLLPRHGERQVADGGTRGEPAGVVAVARVRDGERDGRPADGRAGARVGPRRPRPGPVHGVRPGQDRLPAGHEPRVHRGGLQRQHARAARPQLPARRRPRAPRRRRHGRVPLRPRLRAAAHPLARLRHRRRHRRVRRLRHGLAN

SEQ ID NO: 7894 - protein, 198 aa, Zea mays subsp. mays
  peptide (1)..(198): Ceres Seq. ID no. 12351258
  misc_feature (55)..(196): Pfam Name: Dirigent-like protein Pfam Description: Dirigent-like protein
  misc_feature (18)..(196): Homolog of NCBI NO: 15218836 NR Description: disease resistance response protein-related/
  misc_feature (11)..(196): Homolog of NCBI NO: 15238982 NR Description: disease resistance response protein-related; id: At5g42510.1 [Arabidopsis thaliana] contains similarity to disease resistance response
  misc_feature (55)..(196): Homolog of NCBI NO: 15219966 NR Description: disease resistance response protein-related; id: At1g22900.1 [Arabidopsis thaliana] >gi|25347090|pir||A86363
  misc_feature (14)..(196): Homolog of NCBI NO: 15238980 NR Description: disease resistance response protein-related; id: At5g42500.1, supported by cDNA: gi_20260391 [Arabidopsis
  misc_feature (11)..(196): Homolog of NCBI NO: 15239779 NR Description: disease resistance response protein-related/
  misc_feature (18)..(196): Homolog of NCBI NO: 15222673 NR Description: disease resistance response protein-related/
  misc_feature (18)..(196): Homolog of NCBI NO: 22135914 NR Description: unknown protein [Arabidopsis thaliana]
  misc_feature (14)..(196): Homolog of NCBI NO: 15231302 NR Description: disease resistance response protein-related/
  misc_feature (11)..(196): Homolog of NCBI NO: 30681257 NR Description: disease resistance response protein-related/
  misc_feature (11)..(193): Homolog of NCBI NO: 25412014 NR Description: probable disease resistance response protein - Arabidopsis thaliana >gi|4803933|gb|AAD29806.1| putative
RFTLHSPHQQMARKEVTLLLFLVLLVAAVEAQLHDEPTAAAVGRRRGAKAATAPTHLHFFFHDTVSGKSPTAVRVVSPPASSPSPVFGMVNVMDDPLTEGPEQGSAPVGRAQGLYMGSDQAKIGFLQAMNLVFTAGDYNGSTLALLGRNCPLDAVRELPVVGGTGAFRFARGYALLRTHWLDFATGDATVEYDVYVTD

SEQ ID NO: 7895 - protein, 188 aa, Zea mays subsp. mays
  peptide (1)..(188): Ceres Seq. ID no. 12351259
  misc_feature (45)..(186): Pfam Name: Dirigent-like protein Pfam Description: Dirigent-like protein
  misc_feature (8)..(186): Homolog of NCBI NO: 15218836 NR Description: disease resistance response protein-related/
  misc_feature (1)..(186): Homolog of NCBI NO: 15238982 NR Description: disease resistance response protein-related; id: At5g42510.1 [Arabidopsis thaliana] contains similarity to disease resistance response
  misc_feature (45)..(186): Homolog of NCBI NO: 15219966 NR Description: disease resistance response protein-related; id: At1g22900.1 [Arabidopsis thaliana] >gi|25347090|pir||A86363
  misc_feature (4)..(186): Homolog of NCBI NO: 15238980 NR Description: disease resistance response protein-related; id: At5g42500.1, supported by cDNA: gi_20260391 [Arabidopsis
  misc_feature (1)..(186): Homolog of NCBI NO: 15239779 NR Description: disease resistance response protein-related/
  misc_feature (8)..(186): Homolog of NCBI NO: 15222673 NR Description: disease resistance response protein-related/
  misc_feature (8)..(186): Homolog of NCBI NO: 22135914 NR Description: unknown protein [Arabidopsis thaliana]
  misc_feature (4)..(186): Homolog of NCBI NO: 15231302 NR Description: disease resistance response protein-related/
  misc_feature (1)..(186): Homolog of NCBI NO: 30681257 NR Description: disease resistance response protein-related/
  misc_feature (1)..(183): Homolog of NCBI NO: 25412014 NR Description: probable disease resistance response protein - Arabidopsis thaliana >gi|4803933|gb|AAD29806.1| putative
MARKEVTLLLFLVLLVAAVEAQLHDEPTAAAVGRRRGAKAATAPTHLHFFFHDTVSGKSPTAVRVVSPPASSPSPVFGMVNVMDDPLTEGPEQGSAPVGRAQGLYMGSDQAKIGFLQAMNLVFTAGDYNGSTLALLGRNCPLDAVRELPVVGGTGAFRFARGYALLRTHWLDFATGDATVEYDVYVTD

SEQ ID NO: 7896 - DNA, 809 bp, Zea mays subsp. mays
  misc_feature (1)..(809): Ceres Seq. ID no. 12352576
  misc_feature: MA Experiment ID: 108523 Result: Down-regulated in Transcription
  misc_feature: MA Experiment 108523 PARAMETER Experiment Name: Zm_42deg_Heat_P Parameter: Age (day) Value: 8
  misc_feature: MA Experiment 108523 PARAMETER Experiment Name: Zm_42deg_Heat_P Parameter: Organism Value: Zea mays
  misc_feature: MA Experiment 108523 PARAMETER Experiment Name: Zm_42deg_Heat_P Parameter: Plant Line Value: 35A19
  misc_feature: MA Experiment 108523 PARAMETER Experiment Name: Zm_42deg_Heat_P Parameter: Temperature (deg C) Value: 42 vs. 22
  misc_feature: MA Experiment 108523 PARAMETER Experiment Name: Zm_42deg_Heat_P Parameter: Timepoint (hr) Value: 6
  misc_feature: MA Experiment 108523 PARAMETER Experiment Name: Zm_42deg_Heat_P Parameter: Tissue Value: Aerial
  misc_feature: MA Experiment ID: 108527 Result: Down-regulated in Transcription
  misc_feature: MA Experiment 108527 PARAMETER Experiment Name: Zm_5mM_NO_P Parameter: Age (day) Value: 8
  misc_feature: MA Experiment 108527 PARAMETER Experiment Name: Zm_5mM_NO_P Parameter: Organism Value: Zea mays
  misc_feature: MA Experiment 108527 PARAMETER Experiment Name: Zm_5mM_NO_P Parameter: Plant Line Value: 35A19
  misc_feature: MA Experiment 108527 PARAMETER Experiment Name: Zm_5mM_NO_P Parameter: Timepoint (hr) Value: 6
  misc_feature: MA Experiment 108527 PARAMETER Experiment Name: Zm_5mM_NO_P Parameter: Tissue Value: Aerial
  misc_feature: MA Experiment 108527 PARAMETER Experiment Name: Zm_5mM_NO_P Parameter: Treatment Value: 5mM NO vs. No Treatment
  misc_feature: MA Experiment ID: 108528 Result: Up-regulated in Transcription
  misc_feature: MA Experiment 108528 PARAMETER Experiment Name: Zm_Imbibed_Seeds_P Parameter: Age (day) Value: 5 vs. 2
  misc_feature: MA Experiment 108528 PARAMETER Experiment Name: Zm_Imbibed_Seeds_P Parameter: Organism Value: Zea mays
  misc_feature: MA Experiment 108528 PARAMETER Experiment Name: Zm_Imbibed_Seeds_P Parameter: Plant Line Value: 35A19
  misc_feature: MA Experiment 108528 PARAMETER Experiment Name: Zm_Imbibed_Seeds_P Parameter: Tissue Value: Aerial vs. Embryo
  misc_feature: MA Experiment ID: 108530 Result: Up-regulated in Transcription
  misc_feature: MA Experiment 108530 PARAMETER Experiment Name: Zm_Imbibed_Seeds_P Parameter: Age (day) Value: 6 vs. 2
  misc_feature: MA Experiment 108530 PARAMETER Experiment Name: Zm_Imbibed_Seeds_P Parameter: Organism Value: Zea mays
  misc_feature: MA Experiment 108530 PARAMETER Experiment Name: Zm_Imbibed_Seeds_P Parameter: Plant Line Value: 35A19
  misc_feature: MA Experiment 108530 PARAMETER Experiment Name: Zm_Imbibed_Seeds_P Parameter: Tissue Value: Aerial vs. Embryo
  misc_feature: MA Experiment ID: 108597 Result: Down-regulated in Transcription
  misc_feature: MA Experiment 108597 PARAMETER Experiment Name: Zm_100uM_ABA_P Parameter: Age (day) Value: 9
  misc_feature: MA Experiment 108597 PARAMETER Experiment Name: Zm_100uM_ABA_P Parameter: Organism Value: Zea mays
  misc_feature: MA Experiment 108597 PARAMETER Experiment Name: Zm_100uM_ABA_P Parameter: Plant Line Value: 35A19
  misc_feature: MA Experiment 108597 PARAMETER Experiment Name: Zm_100uM_ABA_P Parameter: Timepoint (hr) Value: 24
  misc_feature: MA Experiment 108597 PARAMETER Experiment Name: Zm_100uM_ABA_P Parameter: Tissue Value: Aerial
  misc_feature: MA Experiment 108597 PARAMETER Experiment Name: Zm_100uM_ABA_P Parameter: Treatment Value: 100uM ABA vs. No Treatment
  misc_feature: MA Experiment ID: 108687 Result: Down-regulated in Transcription
  misc_feature: MA Experiment 108687 PARAMETER Experiment Name: Zm_Embryos-Flowers__P Parameter: Tissue Value: Embryo vs. Aerial+
  misc_feature: MA Experiment ID: 20000477 Result: Down-regulated in Transcription
  misc_feature: MA Experiment 20000477 PARAMETER Experiment Name: Zm_5mM_SA_P Parameter: Age (day) Value: 10
  misc_feature: MA Experiment 20000477 PARAMETER Experiment Name: Zm_5mM_SA_P Parameter: Organism Value: Zea mays
  misc_feature: MA Experiment 20000477 PARAMETER Experiment Name: Zm_5mM_SA_P Parameter: Plant Line Value: 35A19
  misc_feature: MA Experiment 20000477 PARAMETER Experiment Name: Zm_5mM_SA_P Parameter: Timepoint (hr) Value: 48
  misc_feature: MA Experiment 20000477 PARAMETER Experiment Name: Zm_5mM_SA_P Parameter: Tissue Value: Aerial
  misc_feature: MA Experiment 20000477 PARAMETER Experiment Name: Zm_5mM_SA_P Parameter: Treatment Value: 5mM SA vs. No Treatment
  misc_feature: MA Experiment ID: 20000479 Result: Down-regulated in Transcription
  misc_feature: MA Experiment 20000479 PARAMETER Experiment Name: Zm_Drought_P Parameter: Age (day) Value: 10
  misc_feature: MA Experiment 20000479 PARAMETER Experiment Name: Zm_Drought_P Parameter: Organism Value: Zea mays
  misc_feature: MA Experiment 20000479 PARAMETER Experiment Name: Zm_Drought_P Parameter: Plant Line Value: 35A19
  misc_feature: MA Experiment 20000479 PARAMETER Experiment Name: Zm_Drought_P Parameter: Timepoint (hr) Value: 48
  misc_feature: MA Experiment 20000479 PARAMETER Experiment Name: Zm_Drought_P Parameter: Tissue Value: Aerial
  misc_feature: MA Experiment 20000479 PARAMETER Experiment Name: Zm_Drought_P Parameter: Treatment Value: Drought vs. No Drought
  misc_feature: MA Experiment ID: 20000480 Result: Down-regulated in Transcription
  misc_feature: MA Experiment 20000480 PARAMETER Experiment Name: Zm_Drought_P Parameter: Age (day) Value: 11
  misc_feature: MA Experiment 20000480 PARAMETER Experiment Name: Zm_Drought_P Parameter: Organism Value: Zea mays
  misc_feature: MA Experiment 20000480 PARAMETER Experiment Name: Zm_Drought_P Parameter: Plant Line Value: 35A19
  misc_feature: MA Experiment 20000480 PARAMETER Experiment Name: Zm_Drought_P Parameter: Timepoint (hr) Value: 72
  misc_feature: MA Experiment 20000480 PARAMETER Experiment Name: Zm_Drought_P Parameter: Tissue Value: Aerial
  misc_feature: MA Experiment 20000480 PARAMETER Experiment Name: Zm_Drought_P Parameter: Treatment Value: Drought vs. No Drought
atgatgtccgggaaacaaatcctatccccgccgcctacgccggccgttcgcgctcacctagtcaccacattcgttctcgccgtggacgcgcgcgcgtgaggtgagtgagaccaccacgccagacaagaattaatggccctggagacgtgcttcagagcgtgggcgctgcacgccgcccctgctggcagcaagaacaggctcctcgtctgcagcagcggcggtaacctggtgctgccttcgaagcgggtcgcggccgcgccgctgtccgtcggccgcgtcgccacgcgccgggcgcggcacgtctgccagtccaagaacgccgtggacgaagtgctggtggcggacgagaagaactgggacgggatggtgatggcgtgcgagacgccggtgctggtggagttctgggcgccgtggtgcgggccgtgccggatgatcgcgccggtgatcgacgagctggccaaggactacgccggcaagatcatgtgctgcaaggtgaacacggacgacagccccaacgtggcatccacctacggcatccgcagcatccccaccgtgctcatcttcaagggcggcgagaagaaggagagcgtcatcggcgccgtccccaagtccacgctcaccaccctcatcgacaagtacatcggtagtagctcatgagcgcgcgagagaggcagcccatgtctcgtgatgtgcccccgagctgcatctgcatgcatgggatactgggatcgatgatacatgtgcccagctcgcgcataaacaccatgtatctctagccttgcccttgcatatatatggatggatatatg

SEQ ID NO: 7897 - protein, 174 aa, Zea mays subsp. mays
  peptide (1)..(174): Ceres Seq. ID no. 12352577
  misc_feature (1)..(173): Homolog of NCBI NO: 3334376 NR Description: Thioredoxin M-type, chloroplast precursor (TRX-M)
  misc_feature (1)..(172): Homolog of NCBI NO: 11135474 NR Description: Thioredoxin M-type, chloroplast precursor (TRX-M)
  misc_feature (1)..(172): Homolog of NCBI NO: 11135471 NR Description: Thioredoxin M-type, chloroplast precursor (TRX-M)
  misc_feature (1)..(170): Homolog of NCBI NO: 1351239 NR Description: Thioredoxin M-type, chloroplast precursor (TRX-M)
  misc_feature (1)..(170): Homolog of NCBI NO: 1388088 NR Description: thioredoxin m
  misc_feature (1)..(170): Homolog of NCBI NO: 21354 NR Description: thioredoxin M precursor (AA -67 to 114) [Spinacia
  misc_feature (45)..(170): Homolog of NCBI NO: 15594012 NR Description: putative thioredoxin m2 [Pisum sativum]
  misc_feature (1)..(170): Homolog of NCBI NO: 2507458 NR Description: Thioredoxin M-type, chloroplast precursor (TRX-M)
  misc_feature (27)..(170): Homolog of NCBI NO: 15236327 NR Description: putative M-type thioredoxin; protein id: supported by cDNA: 10950., supported by cDNA: gi_15028102, by cDNA: gi_19310724, supported by cDNA: gi_6539609 [Arabidopsis
  misc_feature (27)..(170): Homolog of NCBI NO: 6539610 NR Description: thioredoxin m2 [Arabidopsis thaliana]
MALETCFRAWALHAAPAGSKNRLLVCSSGGNLVLPSKRVAAAPLSVGRVATRRARHVCQSKNAVDEVLVADEKNWDGMVMACETPVLVEFWAPWCGPCRMIAPVIDELAKDYAGKIMCCKVNTDDSPNVASTYGIRSIPTVLIFKGGEKKESVIGAVPKSTLTTLIDKYIGSSS

SEQ ID NO: 7898 - protein, 97 aa, Zea mays subsp. mays
  peptide (1)..(97): Ceres Seq. ID no. 12352578
  misc_feature (1)..(96): Homolog of NCBI NO: 3334376 NR Description: Thioredoxin M-type, chloroplast precursor (TRX-M)
  misc_feature (1)..(95): Homolog of NCBI NO: 11135474 NR Description: Thioredoxin M-type, chloroplast precursor (TRX-M)
  misc_feature (1)..(95): Homolog of NCBI NO: 11135471 NR Description: Thioredoxin M-type, chloroplast precursor (TRX-M)
  misc_feature (1)..(93): Homolog of NCBI NO: 1351239 NR Description: Thioredoxin M-type, chloroplast precursor (TRX-M)
  misc_feature (1)..(93): Homolog of NCBI NO: 1388088 NR Description: thioredoxin m
  misc_feature (1)..(93): Homolog of NCBI NO: 21354 NR Description: thioredoxin M precursor (AA -67 to 114) [Spinacia
  misc_feature (1)..(93): Homolog of NCBI NO: 15594012 NR Description: putative thioredoxin m2 [Pisum sativum]
  misc_feature (1)..(93): Homolog of NCBI NO: 2507458 NR Description: Thioredoxin M-type, chloroplast precursor (TRX-M)
  misc_feature (1)..(93): Homolog of NCBI NO: 15236327 NR Description: putative M-type thioredoxin; protein id: supported by cDNA: 10950., supported by cDNA: gi_15028102, by cDNA: gi_19310724, supported by cDNA: gi_6539609 [Arabidopsis
  misc_feature (1)..(93): Homolog of NCBI NO: 6539610 NR Description: thioredoxin m2 [Arabidopsis thaliana]
MVMACETPVLVEFWAPWCGPCRMIAPVIDELAKDYAGKIMCCKVNTDDSPNVASTYGIRSIPTVLIFKGGEKKESVIGAVPKSTLTTLIDKYIGSSS

SEQ ID NO: 7899 - protein, 95 aa, Zea mays subsp. mays
  peptide (1)..(95): Ceres Seq. ID no. 12352579
  misc_feature (1)..(94): Homolog of NCBI NO: 3334376 NR Description: Thioredoxin M-type, chloroplast precursor (TRX-M)
  misc_feature (1)..(93): Homolog of NCBI NO: 11135474 NR Description: Thioredoxin M-type, chloroplast precursor (TRX-M)
  misc_feature (1)..(93): Homolog of NCBI NO: 11135471 NR Description: Thioredoxin M-type, chloroplast precursor (TRX-M)
  misc_feature (1)..(91): Homolog of NCBI NO: 1351239 NR Description: Thioredoxin M-type, chloroplast precursor (TRX-M)
  misc_feature (1)..(91): Homolog of NCBI NO: 1388088 NR Description: thioredoxin m
  misc_feature (1)..(91): Homolog of NCBI NO: 21354 NR Description: thioredoxin M precursor (AA -67 to 114) [Spinacia
  misc_feature (1)..(91): Homolog of NCBI NO: 15594012 NR Description: putative thioredoxin m2 [Pisum sativum]
  misc_feature (1)..(91): Homolog of NCBI NO: 2507458 NR Description: Thioredoxin M-type, chloroplast precursor (TRX-M)
  misc_feature (1)..(91): Homolog of NCBI NO: 15236327 NR Description: putative M-type thioredoxin; protein id: supported by cDNA: 10950., supported by cDNA: gi_15028102, by cDNA: gi_19310724, supported by cDNA: gi_6539609 [Arabidopsis
  misc_feature (1)..(91): Homolog of NCBI NO: 6539610 NR Description: thioredoxin m2 [Arabidopsis thaliana]
MACETPVLVEFWAPWCGPCRMIAPVIDELAKDYAGKIMCCKVNTDDSPNVASTYGIRSIPTVLIFKGGEKKESVIGAVPKSTLTTLIDKYIGSSS

SEQ ID NO: 7900 - DNA, 1170 bp, Zea mays subsp. mays
  misc_feature (1)..(1170): Ceres Seq. ID no. 13498164
  misc_feature: MA Experiment ID: 108527 Result: Up-regulated in Transcription
  misc_feature: MA Experiment 108527 PARAMETER Experiment Name: Zm_5mM_NO_P Parameter: Age (day) Value: 8
  misc_feature: MA Experiment 108527 PARAMETER Experiment Name: Zm_5mM_NO_P Parameter: Organism Value: Zea mays
  misc_feature: MA Experiment 108527 PARAMETER Experiment Name: Zm_5mM_NO_P Parameter: Plant Line Value: 35A19
  misc_feature: MA Experiment 108527 PARAMETER Experiment Name: Zm_5mM_NO_P Parameter: Timepoint (hr) Value: 6
  misc_feature: MA Experiment 108527 PARAMETER Experiment Name: Zm_5mM_NO_P Parameter: Tissue Value: Aerial
  misc_feature: MA Experiment 108527 PARAMETER Experiment Name: Zm_5mM_NO_P Parameter: Treatment Value: 5mM NO vs. No Treatment
  misc_feature: MA Experiment ID: 108533 Result: Down-regulated in Transcription
  misc_feature: MA Experiment 108533 PARAMETER Experiment Name: Zm_4deg_Cold_P Parameter: Age (hr) Value: 8
  misc_feature: MA Experiment 108533 PARAMETER Experiment Name: Zm_4deg_Cold_P Parameter: Organism Value: Zea mays
  misc_feature: MA Experiment 108533 PARAMETER Experiment Name: Zm_4deg_Cold_P Parameter: Plant Line Value: 35A19
  misc_feature: MA Experiment 108533 PARAMETER Experiment Name: Zm_4deg_Cold_P Parameter: Temperature (deg C) Value: 4 vs. 22
  misc_feature: MA Experiment 108533 PARAMETER Experiment Name: Zm_4deg_Cold_P Parameter: Timepoint (hr) Value: 1
  misc_feature: MA Experiment 108533 PARAMETER Experiment Name: Zm_4deg_Cold_P Parameter: Tissue Value: Aerial
  misc_feature: MA Experiment ID: 108535 Result: Down-regulated in Transcription
  misc_feature: MA Experiment 108535 PARAMETER Experiment Name: Zm_Meristem_P Parameter: Age (day) Value: 8
  misc_feature: MA Experiment 108535 PARAMETER Experiment Name: Zm_Meristem_P Parameter: Organism Value: Zea mays
  misc_feature: MA Experiment 108535 PARAMETER Experiment Name: Zm_Meristem_P Parameter: Plant Line Value: 35A19
  misc_feature: MA Experiment 108535 PARAMETER Experiment Name: Zm_Meristem_P Parameter: Tissue Value: Root Meristem vs. Above Root Meristem
  misc_feature: MA Experiment ID: 108544 Result: Up-regulated in Transcription
  misc_feature: MA Experiment ID: 108559 Result: Up-regulated in Transcription
  misc_feature: MA Experiment 108559 PARAMETER Experiment Name: Zm_5mM_NO_P Parameter: Age (day) Value: 8
  misc_feature: MA Experiment 108559 PARAMETER Experiment Name: Zm_5mM_NO_P Parameter: Organism Value: Zea mays
  misc_feature: MA Experiment 108559 PARAMETER Experiment Name: Zm_5mM_NO_P Parameter: Plant Line Value: 35A19
  misc_feature: MA Experiment 108559 PARAMETER Experiment Name: Zm_5mM_NO_P Parameter: Timepoint (hr) Value: 12
  misc_feature: MA Experiment 108559 PARAMETER Experiment Name: Zm_5mM_NO_P Parameter: Tissue Value: Aerial
  misc_feature: MA Experiment 108559 PARAMETER Experiment Name: Zm_5mM_NO_P Parameter: Treatment Value: 5mM NO vs. No Treatment
  misc_feature: MA Experiment ID: 108687 Result: Up-regulated in Transcription
  misc_feature: MA Experiment 108687 PARAMETER Experiment Name: Zm_Embryos-Flowers__P Parameter: Tissue Value: Embryo vs. Aerial+
  misc_feature: MA Experiment ID: 20000535 Result: Up-regulated in Transcription
  misc_feature: MA Experiment 20000535 PARAMETER Experiment Name: Zm_Hybrid_Seed_Dev_P Parameter: DAP Value: 30 vs. 12
  misc_feature: MA Experiment 20000535 PARAMETER Experiment Name: Zm_Hybrid_Seed_Dev_P Parameter: Organism Value: Zea mays
  misc_feature: MA Experiment 20000535 PARAMETER Experiment Name: Zm_Hybrid_Seed_Dev_P Parameter: Plant Line Value: 35A19
  misc_feature: MA Experiment 20000535 PARAMETER Experiment Name: Zm_Hybrid_Seed_Dev_P Parameter: Tissue Value: Embryo vs. Unfert Floret
acacctgaggctgcggcctttgtgccatccaggggtcgtcgtcgtcactctctccctctcgccctcgccatcgccctcgcggtctcgccgcggcataaacaaaacaagcaaagcaaggcaaaggcaaaggcaaaaccccacctcctcgctccgcacctcgtcgtctgcttttcctcggtgcggaacacaagcccctgccgcctccattaccgggctgtgcctgtgcgaggctgcgagcgtggtggctgtgtctggctttgcggcggcggcggtgatggtggtggagatggacggaggcgtgggagtagcagcaggaggaggaggaggagcgcagacgccggcgccggcgccgccgcggcggtggcgcttggcggacgagcggtgcgacctgcgcgccatggagacggactacgtgcggcggttccaccggcacgagccccgcgaccaccagtgctcctccgccgtcgccaagcacatcaaggcgcctgtccaccttgtctggtccctggtgaggcggttcgaccagccacagctcttcaagcccttcgtgagccggtgtgagatgaaggggaacatcgagatcggtagcgtcagggaggtcaacgtcaagtccgggctgccggccacaagaagcacggagaggctcgagctgttagacgacgacgagcgcattctcagcgtcaggttcgttggaggcgatcacaggctgcagaactactcctccatcctcaccgtccacccggaggtcatcgacggccggccagggacgctcgtcatcgagtccttcgtcgtcgacgtccccgacggcaacaccaaggacgagacctgctacttcgtggaggcgctgctcaagtgcaacctccggtcactcgcggaggtgtccgagggccaggtcatcatggaccagacggagccccttgaccggtgaataatgagtcggaccattatattgcattgcattctgtgtacgcgtagacctgttctccaatgcatggagcccctaggttcttgggaaactgctatgccgcgttcaaagtcaagttctttttcccccctccttgcgattgtgttttgctgttcttctctggcgttgtatgtcgcagagggagaagtgcagagtatgatgtgcttgatgaaaattgaaagaaaaaaaaagaatttagaactgcg

SEQ ID NO: 7901 - protein, 308 aa, Zea mays subsp. mays
  peptide (1)..(308): Ceres Seq. ID no. 13498165
  misc_feature (150)..(291): Pfam Name: Pathogenesis-related protein Bet v I family Pfam Description: Pathogenesis-related protein Bet v I family
  misc_feature (134)..(304): Homolog of NCBI NO: 15238661 NR Description: expressed protein [Arabidopsis thaliana] gene_id:MFH8.10~pir||T02893~similar to unknown protein thaliana] >gi|27808528|gb|AAO24544.1| At5g53160 [Arabidopsis
  misc_feature (133)..(304): Homolog of NCBI NO: 18378830 NR Description: expressed protein [Arabidopsis thaliana]
  misc_feature (133)..(304): Homolog of NCBI NO: 21593547 NR Description: unknown [Arabidopsis thaliana]
  misc_feature (133)..(304): Homolog of NCBI NO: 25348264 NR Description: hypothetical protein F6F3.16 - Arabidopsis >gi|9665155|gb|AAF97339.1|AC023628_20 Unknown protein
  misc_feature (138)..(306): Homolog of NCBI NO: 18411513 NR Description: expressed protein [Arabidopsis thaliana]
  misc_feature (138)..(306): Homolog of NCBI NO: 21593105 NR Description: unknown [Arabidopsis thaliana]
  misc_feature (129)..(295): Homolog of NCBI NO: 30687786 NR Description: expressed protein [Arabidopsis thaliana]
  misc_feature (129)..(295): Homolog of NCBI NO: 7486961 NR Description: hypothetical protein T13J8.30 - Arabidopsis >gi|4455351|emb|CAB36761.1| putative protein [Arabidopsis >gi|7269646|emb|CAB79594.1| putative protein [Arabidopsis
  misc_feature (166)..(306): Homolog of NCBI NO: 7486358 NR Description: hypothetical protein F3I3.40 - Arabidopsis >gi|5262156|emb|CAB45785.1| putative protein [Arabidopsis >gi|7267599|emb|CAB80911.1| putative protein [Arabidopsis
  misc_feature (140)..(295): Homolog of NCBI NO: 18404709 NR Description: expressed protein [Arabidopsis thaliana]
HLRLRPLCHPGVVVVTLSLSPSPSPSRSRRGINKTSKARQRQRQNPTSSLRTSSSAFPRCGTQAPAASITGLCLCEAASVVAVSGFAAAAVMVVEMDGGVGVAAGGGGGAQTPAPAPPRRWRLADERCDLRAMETDYVRRFHRHEPRDHQCSSAVAKHIKAPVHLVWSLVRRFDQPQLFKPFVSRCEMKGNIEIGSVREVNVKSGLPATRSTERLELLDDDERILSVRFVGGDHRLQNYSSILTVHPEVIDGRPGTLVIESFVVDVPDGNTKDETCYFVEALLKCNLRSLAEVSEGQVIMDQTEPLDR

SEQ ID NO: 7902 - protein, 217 aa, Zea mays subsp. mays
  peptide (1)..(217): Ceres Seq. ID no. 13498166
  misc_feature (59)..(200): Pfam Name: Pathogenesis-related protein Bet v I family Pfam Description: Pathogenesis-related protein Bet v I family
  misc_feature (43)..(213): Homolog of NCBI NO: 15238661 NR Description: expressed protein [Arabidopsis thaliana] gene_id:MFH8.10~pir||T02893~similar to unknown protein thaliana] >gi|27808528|gb|AAO24544.1| At5g53160 [Arabidopsis
  misc_feature (42)..(213): Homolog of NCBI NO: 18378830 NR Description: expressed protein [Arabidopsis thaliana]
  misc_feature (42)..(213): Homolog of NCBI NO: 25348264 NR Description: hypothetical protein F6F3.16 - Arabidopsis >gi|9665155|gb|AAF97339.1|AC023628_20 Unknown protein
  misc_feature (42)..(213): Homolog of NCBI NO: 21593547 NR Description: unknown [Arabidopsis thaliana]
  misc_feature (47)..(215): Homolog of NCBI NO: 18411513 NR Description: expressed protein [Arabidopsis thaliana]
  misc_feature (47)..(215): Homolog of NCBI NO: 21593105 NR Description: unknown [Arabidopsis thaliana]
  misc_feature (38)..(204): Homolog of NCBI NO: 30687786 NR Description: expressed protein [Arabidopsis thaliana]
  misc_feature (38)..(204): Homolog of NCBI NO: 7486961 NR Description: hypothetical protein T13J8.30 - Arabidopsis >gi|4455351|emb|CAB36761.1| putative protein [Arabidopsis >gi|7269646|emb|CAB79594.1| putative protein [Arabidopsis
  misc_feature (75)..(215): Homolog of NCBI NO: 7486358 NR Description: hypothetical protein F3I3.40 - Arabidopsis >gi|5262156|emb|CAB45785.1| putative protein [Arabidopsis >gi|7267599|emb|CAB80911.1| putative protein [Arabidopsis
  misc_feature (49)..(204): Homolog of NCBI NO: 18404709 NR Description: expressed protein [Arabidopsis thaliana]
MVVEMDGGVGVAAGGGGGAQTPAPAPPRRWRLADERCDLRAMETDYVRRFHRHEPRDHQCSSAVAKHIKAPVHLVWSLVRRFDQPQLFKPFVSRCEMKGNIEIGSVREVNVKSGLPATRSTERLELLDDDERILSVRFVGGDHRLQNYSSILTVHPEVIDGRPGTLVIESFVVDVPDGNTKDETCYFVEALLKCNLRSLAEVSEGQVIMDQTEPLDR

SEQ ID NO: 7903 - protein, 213 aa, Zea mays subsp. mays
  peptide (1)..(213): Ceres Seq. ID no. 13498167
  misc_feature (55)..(196): Pfam Name: Pathogenesis-related protein Bet v I family Pfam Description: Pathogenesis-related protein Bet v I family
  misc_feature (34)..(200): Homolog of NCBI NO: 7486961 NR Description: hypothetical protein T13J8.30 - Arabidopsis >gi|4455351|emb|CAB36761.1| putative protein [Arabidopsis >gi|7269646|emb|CAB79594.1| putative protein [Arabidopsis
  misc_feature (71)..(211): Homolog of NCBI NO: 7486358 NR Description: hypothetical protein F3I3.40 - Arabidopsis >gi|5262156|emb|CAB45785.1| putative protein [Arabidopsis >gi|7267599|emb|CAB80911.1| putative protein [Arabidopsis
  misc_feature (38)..(209): Homolog of NCBI NO: 18378830 NR Description: expressed protein [Arabidopsis thaliana]
  misc_feature (38)..(209): Homolog of NCBI NO: 21593547 NR Description: unknown [Arabidopsis thaliana]
  misc_feature (43)..(211): Homolog of NCBI NO: 21593105 NR Description: unknown [Arabidopsis thaliana]
  misc_feature (34)..(200): Homolog of NCBI NO: 30687786 NR Description: expressed protein [Arabidopsis thaliana]
  misc_feature (43)..(211): Homolog of NCBI NO: 18411513 NR Description: expressed protein [Arabidopsis thaliana]
  misc_feature (38)..(209): Homolog of NCBI NO: 25348264 NR Description: hypothetical protein F6F3.16 - Arabidopsis >gi|9665155|gb|AAF97339.1|AC023628_20 Unknown protein
  misc_feature (39)..(209): Homolog of NCBI NO: 15238661 NR Description: expressed protein [Arabidopsis thaliana] gene_id:MFH8.10~pir||T02893~similar to unknown protein thaliana] >gi|27808528|gb|AAO24544.1| At5g53160 [Arabidopsis
  misc_feature (45)..(200): Homolog of NCBI NO: 18404709 NR Description: expressed protein [Arabidopsis thaliana]
MDGGVGVAAGGGGGAQTPAPAPPRRWRLADERCDLRAMETDYVRRFHRHEPRDHQCSSAVAKHIKAPVHLVWSLVRRFDQPQLFKPFVSRCEMKGNIEIGSVREVNVKSGLPATRSTERLELLDDDERILSVRFVGGDHRLQNYSSILTVHPEVIDGRPGTLVIESFVVDVPDGNTKDETCYFVEALLKCNLRSLAEVSEGQVIMDQTEPLDR

SEQ ID NO: 7904 - DNA, 978 bp, Zea mays subsp. mays
  misc_feature (1)..(978): Ceres Seq. ID no. 12402449
  misc_feature: MA Experiment ID: 108528 Result: Up-regulated in Transcription
  misc_feature: MA Experiment 108528 PARAMETER Experiment Name: Zm_Imbibed_Seeds_P Parameter: Age (day) Value: 5 vs. 2
  misc_feature: MA Experiment 108528 PARAMETER Experiment Name: Zm_Imbibed_Seeds_P Parameter: Organism Value: Zea mays
  misc_feature: MA Experiment 108528 PARAMETER Experiment Name: Zm_Imbibed_Seeds_P Parameter: Plant Line Value: 35A19
  misc_feature: MA Experiment 108528 PARAMETER Experiment Name: Zm_Imbibed_Seeds_P Parameter: Tissue Value: Aerial vs. Embryo
  misc_feature: MA Experiment ID: 108529 Result: Down-regulated in Transcription
  misc_feature: MA Experiment 108529 PARAMETER Experiment Name: Zm_Imbibed_Seeds_P Parameter: Age (day) Value: 5 vs. 2
  misc_feature: MA Experiment 108529 PARAMETER Experiment Name: Zm_Imbibed_Seeds_P Parameter: Organism Value: Zea mays
  misc_feature: MA Experiment 108529 PARAMETER Experiment Name: Zm_Imbibed_Seeds_P Parameter: Plant Line Value: 35A19
  misc_feature: MA Experiment 108529 PARAMETER Experiment Name: Zm_Imbibed_Seeds_P Parameter: Tissue Value: Roots vs. Embryo
  misc_feature: MA Experiment ID: 108530 Result: Up-regulated in Transcription
  misc_feature: MA Experiment 108530 PARAMETER Experiment Name: Zm_Imbibed_Seeds_P Parameter: Age (day) Value: 6 vs. 2
  misc_feature: MA Experiment 108530 PARAMETER Experiment Name: Zm_Imbibed_Seeds_P Parameter: Organism Value: Zea mays
  misc_feature: MA Experiment 108530 PARAMETER Experiment Name: Zm_Imbibed_Seeds_P Parameter: Plant Line Value: 35A19
  misc_feature: MA Experiment 108530 PARAMETER Experiment Name: Zm_Imbibed_Seeds_P Parameter: Tissue Value: Aerial vs. Embryo
  misc_feature: MA Experiment ID: 108536 Result: Down-regulated in Transcription
  misc_feature: MA Experiment 108536 PARAMETER Experiment Name: Zm_Meristem_P Parameter: Age (day) Value: 8
  misc_feature: MA Experiment 108536 PARAMETER Experiment Name: Zm_Meristem_P Parameter: Organism Value: Zea mays
  misc_feature: MA Experiment 108536 PARAMETER Experiment Name: Zm_Meristem_P Parameter: Plant Line Value: 35A19
  misc_feature: MA Experiment 108536 PARAMETER Experiment Name: Zm_Meristem_P Parameter: Tissue Value: Shoot Meristem vs. Above Shoot Meristem
  misc_feature: MA Experiment ID: 108544 Result: Up-regulated in Transcription
  misc_feature: MA Experiment ID: 108545 Result: Up-regulated in Transcription
  misc_feature: MA Experiment 108545 PARAMETER Experiment Name: Zm_Imbibed_Seeds_P Parameter: Age (day) Value: 3 vs. 2
  misc_feature: MA Experiment 108545 PARAMETER Experiment Name: Zm_Imbibed_Seeds_P Parameter: Organism Value: Zea mays
  misc_feature: MA Experiment 108545 PARAMETER Experiment Name: Zm_Imbibed_Seeds_P Parameter: Plant Line Value: 35A19
  misc_feature: MA Experiment 108545 PARAMETER Experiment Name: Zm_Imbibed_Seeds_P Parameter: Tissue Value: Aerial vs. Embryo
  misc_feature: MA Experiment ID: 108546 Result: Down-regulated in Transcription
  misc_feature: MA Experiment 108546 PARAMETER Experiment Name: Zm_Imbibed_Seeds_P Parameter: Age (day) Value: 3 vs. 2
  misc_feature: MA Experiment 108546 PARAMETER Experiment Name: Zm_Imbibed_Seeds_P Parameter: Organism Value: Zea mays
  misc_feature: MA Experiment 108546 PARAMETER Experiment Name: Zm_Imbibed_Seeds_P Parameter: Plant Line Value: 35A19
  misc_feature: MA Experiment 108546 PARAMETER Experiment Name: Zm_Imbibed_Seeds_P Parameter: Tissue Value: Roots vs. Embryo
  misc_feature: MA Experiment ID: 108547 Result: Up-regulated in Transcription
  misc_feature: MA Experiment 108547 PARAMETER Experiment Name: Zm_Imbibed_Seeds_P Parameter: Age (day) Value: 4 vs. 2
  misc_feature: MA Experiment 108547 PARAMETER Experiment Name: Zm_Imbibed_Seeds_P Parameter: Organism Value: Zea mays
  misc_feature: MA Experiment 108547 PARAMETER Experiment Name: Zm_Imbibed_Seeds_P Parameter: Plant Line Value: 35A19
  misc_feature: MA Experiment 108547 PARAMETER Experiment Name: Zm_Imbibed_Seeds_P Parameter: Tissue Value: Aerial vs. Embryo
  misc_feature: MA Experiment ID: 108687 Result: Down-regulated in Transcription
  misc_feature: MA Experiment 108687 PARAMETER Experiment Name: Zm_Embryos-Flowers__P Parameter: Tissue Value: Embryo vs. Aerial+
  misc_feature: MA Experiment ID: 108688 Result: Down-regulated in Transcription
  misc_feature: MA Experiment 108688 PARAMETER Experiment Name: Zm_Embryos-Flowers__P Parameter: Tissue Value: Immature Flowers vs. Aerial+
  misc_feature: MA Experiment ID: 20000492 Result: Down-regulated in Transcription
  misc_feature: MA Experiment 20000492 PARAMETER Experiment Name: Zm_Hybrid_Seed_Dev_P Parameter: DAP Value: 12
  misc_feature: MA Experiment 20000492 PARAMETER Experiment Name: Zm_Hybrid_Seed_Dev_P Parameter: Organism Value: Zea mays
  misc_feature: MA Experiment 20000492 PARAMETER Experiment Name: Zm_Hybrid_Seed_Dev_P Parameter: Plant Line Value: 35A19
  misc_feature: MA Experiment 20000492 PARAMETER Experiment Name: Zm_Hybrid_Seed_Dev_P Parameter: Tissue Value: Fert Kernel vs. Unfert Floret
  misc_feature: MA Experiment ID: 20000535 Result: Down-regulated in Transcription
  misc_feature: MA Experiment 20000535 PARAMETER Experiment Name: Zm_Hybrid_Seed_Dev_P Parameter: DAP Value: 30 vs. 12
  misc_feature: MA Experiment 20000535 PARAMETER Experiment Name: Zm_Hybrid_Seed_Dev_P Parameter: Organism Value: Zea mays
  misc_feature: MA Experiment 20000535 PARAMETER Experiment Name: Zm_Hybrid_Seed_Dev_P Parameter: Plant Line Value: 35A19
  misc_feature: MA Experiment 20000535 PARAMETER Experiment Name: Zm_Hybrid_Seed_Dev_P Parameter: Tissue Value: Embryo vs. Unfert Floret
tccccgctccccaccacggtgccaccgttcccgtgcgtcgctgcaccaccaccgtagcctcctcctctcacccggacgcggccgagccagaatggttagcgagcaacaagctcctgcgcggaggtggtggtggagggcagcgaggcggcggcggaggtgcccgtggagagcgaggaggcggccgcgcccaaggcggaggagcaactggatgacgaggcgccggtcgtcgaggacgtcaaggaagacgaggacgaggatgaggacgacgacgacgacgacgacgctgacgatgatgacgccgatggaggcgccggcgcaaccgagggcaccaagcagagccggagcgangaagaagagccgcaagncatgatgaagctcggaatgaaacccgtcaccggcgtcaccaggataaccatcaaaagagccaagaacatactgttcgtggtctcgaagccggacgtcttcaagagcccgacgtcggagacgtacgtgatattcggcgaggccaagatagaggacctgagctcccagctgcaggcgcaggccgcgcagcagttcaggatgcaggacctcagcaaggtgatggccaagcaggacgcggccgccgccgcggcggcgccggccgacgaggaggaggaggtcgacgaggccgggatagagccccgcgacatcgacctcgtcatgacgcaggccagcgtcacccgcgccaaggccgtcaaggctctcaaggcgcacgacggcgacatcgtcagcgccatcatggagctcacggcctgatcatgatataccagtgcaatgccgtacggccgtttcttcctcgttattgcagtctgcttcgtccagcgtcgctgttcatttttgggatttgcataaaagacgagctttgaataagagatgtactgtttgttcaccgtatgaacgtttttgcatcatgtcagtttccggattattattattgccactccttaagttgttatg

SEQ ID NO: 7905 - protein, 136 aa, Zea mays subsp. mays
  peptide (1)..(136): Ceres Seq. ID no. 12402450
  misc_feature (1)..(51): Pfam Name: NAC domain Pfam Description: NAC domain
  misc_feature (1)..(136): Homolog of NCBI NO: 34902238 NR Description: Putative nascent polypeptide associated complex
  misc_feature (1)..(123): Homolog of NCBI NO: 34911462 NR Description: putative nascent polypeptide associated complex
  misc_feature (1)..(135): Homolog of NCBI NO: 15229149 NR Description: alpha NAC-like protein; protein id: At3g49470.1, by cDNA: gi_13899100, supported by cDNA: gi_18377569 [Arabidopsis
  misc_feature (1)..(135): Homolog of NCBI NO: 13899101 NR Description: alpha NAC-like protein [Arabidopsis thaliana]
  misc_feature (1)..(135): Homolog of NCBI NO: 15230476 NR Description: nascent polypeptide associated complex alpha putative; protein id: At3g12390.1 [Arabidopsis thaliana]
  misc_feature (1)..(135): Homolog of NCBI NO: 34907258 NR Description: putative nascent polypeptide associated complex
  misc_feature (1)..(135): Homolog of NCBI NO: 15235122 NR Description: putative alpha NAC; protein id: At4g10480.1, by cDNA: gi_15027908, supported by cDNA: gi_17065295, supported cDNA: gi_20465564 [Arabidopsis thaliana] >gi|7487971|pir||T04183
  misc_feature (1)..(135): Homolog of NCBI NO: 6752882 NR Description: nascent polypeptide associated complex alpha
  misc_feature (1)..(135): Homolog of NCBI NO: 18398710 NR Description: expressed protein; protein id: At1g33040.1, by cDNA: 105071., supported by cDNA: gi_15010761, supported by
  misc_feature (1)..(135): Homolog of NCBI NO: 21536597 NR Description: putative alpha NAC [Arabidopsis thaliana]
MMKLGMKPVTGVTRITIKRAKNILFVVSKPDVFKSPTSETYVIFGEAKIEDLSSQLQAQAAQQFRMQDLSKVMAKQDAAAAAAAPADEEEEVDEAGIEPRDIDLVMTQASVTRAKAVKALKAHDGDIVSAIMELTA

SEQ ID NO: 7906 - protein, 135 aa, Zea mays subsp. mays
  peptide (1)..(135): Ceres Seq. ID no. 12402451
  misc_feature (1)..(50): Pfam Name: NAC domain Pfam Description: NAC domain
  misc_feature (1)..(135): Homolog of NCBI NO: 34902238 NR Description: Putative nascent polypeptide associated complex
  misc_feature (1)..(122): Homolog of NCBI NO: 34911462 NR Description: putative nascent polypeptide associated complex
  misc_feature (1)..(134): Homolog of NCBI NO: 15229149 NR Description: alpha NAC-like protein; protein id: At3g49470.1, by cDNA: gi_13899100, supported by cDNA: gi_18377569 [Arabidopsis
  misc_feature (1)..(134): Homolog of NCBI NO: 13899101 NR Description: alpha NAC-like protein [Arabidopsis thaliana]
  misc_feature (1)..(134): Homolog of NCBI NO: 15230476 NR Description: nascent polypeptide associated complex alpha putative; protein id: At3g12390.1 [Arabidopsis thaliana]
  misc_feature (1)..(134): Homolog of NCBI NO: 34907258 NR Description: putative nascent polypeptide associated complex
  misc_feature (1)..(134): Homolog of NCBI NO: 15235122 NR Description: putative alpha NAC; protein id: At4g10480.1, by cDNA: gi_15027908, supported by cDNA: gi_17065295, supported cDNA: gi_20465564 [Arabidopsis thaliana] >gi|7487971|pir||T04183
  misc_feature (1)..(134): Homolog of NCBI NO: 6752882 NR Description: nascent polypeptide associated complex alpha
  misc_feature (1)..(134): Homolog of NCBI NO: 18398710 NR Description: expressed protein; protein id: At1g33040.1, by cDNA: 105071., supported by cDNA: gi_15010761, supported by
  misc_feature (1)..(134): Homolog of NCBI NO: 21536597 NR Description: putative alpha NAC [Arabidopsis thaliana]
MKLGMKPVTGVTRITIKRAKNILFVVSKPDVFKSPTSETYVIFGEAKIEDLSSQLQAQAAQQFRMQDLSKVMAKQDAAAAAAAPADEEEEVDEAGIEPRDIDLVMTQASVTRAKAVKALKAHDGDIVSAIMELTA

SEQ ID NO: 7907 - protein, 131 aa, Zea mays subsp. mays
  peptide (1)..(131): Ceres Seq. ID no. 12402452
  misc_feature (1)..(46): Pfam Name: NAC domain Pfam Description: NAC domain
  misc_feature (1)..(131): Homolog of NCBI NO: 34902238 NR Description: Putative nascent polypeptide associated complex
  misc_feature (1)..(118): Homolog of NCBI NO: 34911462 NR Description: putative nascent polypeptide associated complex
  misc_feature (1)..(130): Homolog of NCBI NO: 15229149 NR Description: alpha NAC-like protein; protein id: At3g49470.1, by cDNA: gi_13899100, supported by cDNA: gi_18377569 [Arabidopsis
  misc_feature (1)..(130): Homolog of NCBI NO: 13899101 NR Description: alpha NAC-like protein [Arabidopsis thaliana]
  misc_feature (1)..(130): Homolog of NCBI NO: 15230476 NR Description: nascent polypeptide associated complex alpha putative; protein id: At3g12390.1 [Arabidopsis thaliana]
  misc_feature (1)..(130): Homolog of NCBI NO: 34907258 NR Description: putative nascent polypeptide associated complex
  misc_feature (1)..(130): Homolog of NCBI NO: 15235122 NR Description: putative alpha NAC; protein id: At4g10480.1, by cDNA: gi_15027908, supported by cDNA: gi_17065295, supported cDNA: gi_20465564 [Arabidopsis thaliana] >gi|7487971|pir||T04183
  misc_feature (1)..(130): Homolog of NCBI NO: 6752882 NR Description: nascent polypeptide associated complex alpha
  misc_feature (1)..(130): Homolog of NCBI NO: 18398710 NR Description: expressed protein; protein id: At1g33040.1, by cDNA: 105071., supported by cDNA: gi_15010761, supported by
  misc_feature (1)..(130): Homolog of NCBI NO: 21536597 NR Description: putative alpha NAC [Arabidopsis thaliana]
MKPVTGVTRITIKRAKNILFVVSKPDVFKSPTSETYVIFGEAKIEDLSSQLQAQAAQQFRMQDLSKVMAKQDAAAAAAAPADEEEEVDEAGIEPRDIDLVMTQASVTRAKAVKALKAHDGDIVSAIMELTA

SEQ ID NO: 7908 - DNA, 1155 bp, Zea mays subsp. mays
  misc_feature (1)..(1155): Ceres Seq. ID no. 12353947
  misc_feature: MA Experiment ID: 108515 Result: Down-regulated in Transcription
  misc_feature: MA Experiment 108515 PARAMETER Experiment Name: Zm_2mM_SA_P Parameter: Age (day) Value: 8
  misc_feature: MA Experiment 108515 PARAMETER Experiment Name: Zm_2mM_SA_P Parameter: Organism Value: Zea mays
  misc_feature: MA Experiment 108515 PARAMETER Experiment Name: Zm_2mM_SA_P Parameter: Plant Line Value: 35A19
  misc_feature: MA Experiment 108515 PARAMETER Experiment Name: Zm_2mM_SA_P Parameter: Timepoint (hr) Value: 12
  misc_feature: MA Experiment 108515 PARAMETER Experiment Name: Zm_2mM_SA_P Parameter: Tissue Value: Aerial
  misc_feature: MA Experiment 108515 PARAMETER Experiment Name: Zm_2mM_SA_P Parameter: Treatment Value: 2mM SA vs. No Treatment
  misc_feature: MA Experiment ID: 108523 Result: Down-regulated in Transcription
  misc_feature: MA Experiment 108523 PARAMETER Experiment Name: Zm_42deg_Heat_P Parameter: Age (day) Value: 8
  misc_feature: MA Experiment 108523 PARAMETER Experiment Name: Zm_42deg_Heat_P Parameter: Organism Value: Zea mays
  misc_feature: MA Experiment 108523 PARAMETER Experiment Name: Zm_42deg_Heat_P Parameter: Plant Line Value: 35A19
  misc_feature: MA Experiment 108523 PARAMETER Experiment Name: Zm_42deg_Heat_P Parameter: Temperature (deg C) Value: 42 vs. 22
  misc_feature: MA Experiment 108523 PARAMETER Experiment Name: Zm_42deg_Heat_P Parameter: Timepoint (hr) Value: 6
  misc_feature: MA Experiment 108523 PARAMETER Experiment Name: Zm_42deg_Heat_P Parameter: Tissue Value: Aerial
  misc_feature: MA Experiment ID: 108528 Result: Up-regulated in Transcription
  misc_feature: MA Experiment 108528 PARAMETER Experiment Name: Zm_Imbibed_Seeds_P Parameter: Age (day) Value: 5 vs. 2
  misc_feature: MA Experiment 108528 PARAMETER Experiment Name: Zm_Imbibed_Seeds_P Parameter: Organism Value: Zea mays
  misc_feature: MA Experiment 108528 PARAMETER Experiment Name: Zm_Imbibed_Seeds_P Parameter: Plant Line Value: 35A19
  misc_feature: MA Experiment 108528 PARAMETER Experiment Name: Zm_Imbibed_Seeds_P Parameter: Tissue Value: Aerial vs. Embryo
  misc_feature: MA Experiment ID: 108529 Result: Down-regulated in Transcription
  misc_feature: MA Experiment 108529 PARAMETER Experiment Name: Zm_Imbibed_Seeds_P Parameter: Age (day) Value: 5 vs. 2
  misc_feature: MA Experiment 108529 PARAMETER Experiment Name: Zm_Imbibed_Seeds_P Parameter: Organism Value: Zea mays
  misc_feature: MA Experiment 108529 PARAMETER Experiment Name: Zm_Imbibed_Seeds_P Parameter: Plant Line Value: 35A19
  misc_feature: MA Experiment 108529 PARAMETER Experiment Name: Zm_Imbibed_Seeds_P Parameter: Tissue Value: Roots vs. Embryo
  misc_feature: MA Experiment ID: 108530 Result: Up-regulated in Transcription
  misc_feature: MA Experiment 108530 PARAMETER Experiment Name: Zm_Imbibed_Seeds_P Parameter: Age (day) Value: 6 vs. 2
  misc_feature: MA Experiment 108530 PARAMETER Experiment Name: Zm_Imbibed_Seeds_P Parameter: Organism Value: Zea mays
  misc_feature: MA Experiment 108530 PARAMETER Experiment Name: Zm_Imbibed_Seeds_P Parameter: Plant Line Value: 35A19
  misc_feature: MA Experiment 108530 PARAMETER Experiment Name: Zm_Imbibed_Seeds_P Parameter: Tissue Value: Aerial vs. Embryo
  misc_feature: MA Experiment ID: 108536 Result: Down-regulated in Transcription
  misc_feature: MA Experiment 108536 PARAMETER Experiment Name: Zm_Meristem_P Parameter: Age (day) Value: 8
  misc_feature: MA Experiment 108536 PARAMETER Experiment Name: Zm_Meristem_P Parameter: Organism Value: Zea mays
  misc_feature: MA Experiment 108536 PARAMETER Experiment Name: Zm_Meristem_P Parameter: Plant Line Value: 35A19
  misc_feature: MA Experiment 108536 PARAMETER Experiment Name: Zm_Meristem_P Parameter: Tissue Value: Shoot Meristem vs. Above Shoot Meristem
  misc_feature: MA Experiment ID: 108543 Result: Up-regulated in Transcription
  misc_feature: MA Experiment ID: 108545 Result: Up-regulated in Transcription
  misc_feature: MA Experiment 108545 PARAMETER Experiment Name: Zm_Imbibed_Seeds_P Parameter: Age (day) Value: 3 vs. 2
  misc_feature: MA Experiment 108545 PARAMETER Experiment Name: Zm_Imbibed_Seeds_P Parameter: Organism Value: Zea mays
  misc_feature: MA Experiment 108545 PARAMETER Experiment Name: Zm_Imbibed_Seeds_P Parameter: Plant Line Value: 35A19
  misc_feature: MA Experiment 108545 PARAMETER Experiment Name: Zm_Imbibed_Seeds_P Parameter: Tissue Value: Aerial vs. Embryo
  misc_feature: MA Experiment ID: 108546 Result: Down-regulated in Transcription
  misc_feature: MA Experiment 108546 PARAMETER Experiment Name: Zm_Imbibed_Seeds_P Parameter: Age (day) Value: 3 vs. 2
  misc_feature: MA Experiment 108546 PARAMETER Experiment Name: Zm_Imbibed_Seeds_P Parameter: Organism Value: Zea mays
  misc_feature: MA Experiment 108546 PARAMETER Experiment Name: Zm_Imbibed_Seeds_P Parameter: Plant Line Value: 35A19
  misc_feature: MA Experiment 108546 PARAMETER Experiment Name: Zm_Imbibed_Seeds_P Parameter: Tissue Value: Roots vs. Embryo
  misc_feature: MA Experiment ID: 108547 Result: Up-regulated in Transcription
  misc_feature: MA Experiment 108547 PARAMETER Experiment Name: Zm_Imbibed_Seeds_P Parameter: Age (day) Value: 4 vs. 2
  misc_feature: MA Experiment 108547 PARAMETER Experiment Name: Zm_Imbibed_Seeds_P Parameter: Organism Value: Zea mays
  misc_feature: MA Experiment 108547 PARAMETER Experiment Name: Zm_Imbibed_Seeds_P Parameter: Plant Line Value: 35A19
  misc_feature: MA Experiment 108547 PARAMETER Experiment Name: Zm_Imbibed_Seeds_P Parameter: Tissue Value: Aerial vs. Embryo
  misc_feature: MA Experiment ID: 108556 Result: Down-regulated in Transcription
  misc_feature: MA Experiment 108556 PARAMETER Experiment Name: Zm_Drought_P Parameter: Age (day) Value: 9
  misc_feature: MA Experiment 108556 PARAMETER Experiment Name: Zm_Drought_P Parameter: Organism Value: Zea mays
  misc_feature: MA Experiment 108556 PARAMETER Experiment Name: Zm_Drought_P Parameter: Plant Line Value: 35A19
  misc_feature: MA Experiment 108556 PARAMETER Experiment Name: Zm_Drought_P Parameter: Timepoint (hr) Value: 24
  misc_feature: MA Experiment 108556 PARAMETER Experiment Name: Zm_Drought_P Parameter: Tissue Value: Aerial
  misc_feature: MA Experiment 108556 PARAMETER Experiment Name: Zm_Drought_P Parameter: Treatment Value: Drought vs. No Drought
  misc_feature: MA Experiment ID: 108687 Result: Down-regulated in Transcription
  misc_feature: MA Experiment 108687 PARAMETER Experiment Name: Zm_Embryos-Flowers__P Parameter: Tissue Value: Embryo vs. Aerial+
  misc_feature: MA Experiment ID: 108688 Result: Down-regulated in Transcription
  misc_feature: MA Experiment 108688 PARAMETER Experiment Name: Zm_Embryos-Flowers__P Parameter: Tissue Value: Immature Flowers vs. Aerial+
  misc_feature: MA Experiment ID: 108689 Result: Down-regulated in Transcription
  misc_feature: MA Experiment 108689 PARAMETER Experiment Name: Zm_Drought_Roots_P Parameter: Age (day) Value: 9
  misc_feature: MA Experiment 108689 PARAMETER Experiment Name: Zm_Drought_Roots_P Parameter: Organism Value: Zea mays
  misc_feature: MA Experiment 108689 PARAMETER Experiment Name: Zm_Drought_Roots_P Parameter: Plant Line Value: 35A19
  misc_feature: MA Experiment 108689 PARAMETER Experiment Name: Zm_Drought_Roots_P Parameter: Timepoint (hr) Value: 24
  misc_feature: MA Experiment 108689 PARAMETER Experiment Name: Zm_Drought_Roots_P Parameter: Tissue Value: Roots
  misc_feature: MA Experiment 108689 PARAMETER Experiment Name: Zm_Drought_Roots_P Parameter: Treatment Value: Drought vs. No Drought
  misc_feature: MA Experiment ID: 20000477 Result: Down-regulated in Transcription
  misc_feature: MA Experiment 20000477 PARAMETER Experiment Name: Zm_5mM_SA_P Parameter: Age (day) Value: 10
  misc_feature: MA Experiment 20000477 PARAMETER Experiment Name: Zm_5mM_SA_P Parameter: Organism Value: Zea mays
  misc_feature: MA Experiment 20000477 PARAMETER Experiment Name: Zm_5mM_SA_P Parameter: Plant Line Value: 35A19
  misc_feature: MA Experiment 20000477 PARAMETER Experiment Name: Zm_5mM_SA_P Parameter: Timepoint (hr) Value: 48
  misc_feature: MA Experiment 20000477 PARAMETER Experiment Name: Zm_5mM_SA_P Parameter: Tissue Value: Aerial
  misc_feature: MA Experiment 20000477 PARAMETER Experiment Name: Zm_5mM_SA_P Parameter: Treatment Value: 5mM SA vs. No Treatment
  misc_feature: MA Experiment ID: 20000479 Result: Down-regulated in Transcription
  misc_feature: MA Experiment 20000479 PARAMETER Experiment Name: Zm_Drought_P Parameter: Age (day) Value: 10
  misc_feature: MA Experiment 20000479 PARAMETER Experiment Name: Zm_Drought_P Parameter: Organism Value: Zea mays
  misc_feature: MA Experiment 20000479 PARAMETER Experiment Name: Zm_Drought_P Parameter: Plant Line Value: 35A19
  misc_feature: MA Experiment 20000479 PARAMETER Experiment Name: Zm_Drought_P Parameter: Timepoint (hr) Value: 48
  misc_feature: MA Experiment 20000479 PARAMETER Experiment Name: Zm_Drought_P Parameter: Tissue Value: Aerial
  misc_feature: MA Experiment 20000479 PARAMETER Experiment Name: Zm_Drought_P Parameter: Treatment Value: Drought vs. No Drought
  misc_feature: MA Experiment ID: 20000480 Result: Down-regulated in Transcription
  misc_feature: MA Experiment 20000480 PARAMETER Experiment Name: Zm_Drought_P Parameter: Age (day) Value: 11
  misc_feature: MA Experiment 20000480 PARAMETER Experiment Name: Zm_Drought_P Parameter: Organism Value: Zea mays
  misc_feature: MA Experiment 20000480 PARAMETER Experiment Name: Zm_Drought_P Parameter: Plant Line Value: 35A19
  misc_feature: MA Experiment 20000480 PARAMETER Experiment Name: Zm_Drought_P Parameter: Timepoint (hr) Value: 72
  misc_feature: MA Experiment 20000480 PARAMETER Experiment Name: Zm_Drought_P Parameter: Tissue Value: Aerial
  misc_feature: MA Experiment 20000480 PARAMETER Experiment Name: Zm_Drought_P Parameter: Treatment Value: Drought vs. No Drought
  misc_feature: MA Experiment ID: 20000626 Result: Down-regulated in Transcription
  misc_feature: MA Experiment 20000626 PARAMETER Experiment Name: Zm_Herbicide-Treatments_P Parameter: Timepoint (hr) Value: 12
  misc_feature: MA Experiment 20000626 PARAMETER Experiment Name: Zm_Herbicide-Treatments_P Parameter: Tissue Value: Aerial
  misc_feature: MA Experiment 20000626 PARAMETER Experiment Name: Zm_Herbicide-Treatments_P Parameter: Treatment Value: Roundup vs. No Treatment
agtaacgcctttctccaagcctgagcactccatccactactttactcaaagtctagagctagctttttgctttgctcaccagacaaaccgcagcagatggcgtcgacgatcatggccgccacctcccgcatcgtcgcggccaagacgccgtttcttggccagggtcgcgccgccgccgccgccgccaatgccagccccctccgcgacgtcgccgccgccgctgctggcggccggatcaccatgggcaacgacctgtggtacggcccggaccgcgtcaagtacctgggccccttctccgcccagacgccctcgtacctgaccggcgagttccccggcgactacggctgggacaccgccgggctgtccgcggacccggaggcgttcgcgcggaacagggcgctggaggtgatccacgggcggtgggcgatgctgggtgcgctgggctgcatcaccccggaggtgctggagaagtgggtgcgcgtggacttcaaggagcccgtgtggttcaaggccggcgcgcagatcttctcggagggcgggctggactacctgggcaaccccaacctggtgcacgcgcagagcatcctggccgtgctcggcttccaggtcatcctcatgggcctcgtcgagggcttccgcatcaacggcctcgacggcgtcggcgagggcaacaacctctaccccggcggccagtacttcgacccgctgggcctcgccgacgaccccgtcaccttcgccgagctcaaggtcaaggagatcaagaacggccgcctcgccatgttctccatgttcggcttcttcgtccaggccatcgtcaccggcaaggggcccctcgagaacctgctcgaccacctcgacgaccccgtcgccaacaacgcctgggtctacgccaccaagttcgcaccagggtcttaagctagctaccgggccgcggcgtgccaggacattgtgttgtacactactcgtttctgtcgtgatctgtaccatgaacgaatgcaaatattcttgtgctctcccagaaggaacgaactggactagttttgctcttccattccatgtatactctgcttcagcatatatgtagttgtgtctactggtttttgcagttgttaactgatttgcgtccatatatgaggttgtgtctacttttttttt

SEQ ID NO: 7909 - protein, 272 aa, Zea mays subsp. mays
  peptide (1)..(272): Ceres Seq. ID no. 12353948
  misc_feature (69)..(239): Pfam Name: Chlorophyll A-B binding protein Pfam Description: Chlorophyll A-B binding protein
  misc_feature (1)..(272): Homolog of NCBI NO: 115793 NR Description: Chlorophyll A-B binding protein of LHCII type III,
  misc_feature (1)..(272): Homolog of NCBI NO: 34393384 NR Description: putative chlorophyll A-B binding protein of LHCII
  misc_feature (1)..(272): Homolog of NCBI NO: 4689380 NR Description: LHCII type III chlorophyll a/b binding protein
  misc_feature (5)..(272): Homolog of NCBI NO: 479406 NR Description: chlorophyll a/b-binding protein - garden pea
  misc_feature (6)..(272): Homolog of NCBI NO: 6644196 NR Description: chlorophyll a/b-binding protein [Daucus carota]
  misc_feature (1)..(272): Homolog of NCBI NO: 115794 NR Description: Chlorophyll A-B binding protein 13, chloroplast
  misc_feature (1)..(272): Homolog of NCBI NO: 15239602 NR Description: light-harvesting chlorophyll a/b binding protein, protein id: At5g54270.1, supported by cDNA: gi_13605753,
  misc_feature (52)..(272): Homolog of NCBI NO: 405617 NR Description: LHCII Type III chlorophyll a/b binding protein
  misc_feature (1)..(270): Homolog of NCBI NO: 7443222 NR Description: chlorophyll A/b-binding protein type III Lhcb3.2 - rape >gi|405615|emb|CAA43803.1| LHC II Type III chlorophyll a/b
  misc_feature (43)..(271): Homolog of NCBI NO: 115796 NR Description: Chlorophyll A-B binding protein, chloroplast
MASTIMAATSRIVAAKTPFLGQGRAAAAAANASPLRDVAAAAAGGRITMGNDLWYGPDRVKYLGPFSAQTPSYLTGEFPGDYGWDTAGLSADPEAFARNRALEVIHGRWAMLGALGCITPEVLEKWVRVDFKEPVWFKAGAQIFSEGGLDYLGNPNLVHAQSILAVLGFQVILMGLVEGFRINGLDGVGEGNNLYPGGQYFDPLGLADDPVTFAELKVKEIKNGRLAMFSMFGFFVQAIVTGKGPLENLLDHLDDPVANNAWVYATKFAPGS

SEQ ID NO: 7910 - protein, 267 aa, Zea mays subsp. mays
  peptide (1)..(267): Ceres Seq. ID no. 12353949
  misc_feature (64)..(234): Pfam Name: Chlorophyll A-B binding protein Pfam Description: Chlorophyll A-B binding protein
  misc_feature (1)..(267): Homolog of NCBI NO: 115793 NR Description: Chlorophyll A-B binding protein of LHCII type III,
  misc_feature (1)..(267): Homolog of NCBI NO: 34393384 NR Description: putative chlorophyll A-B binding protein of LHCII
  misc_feature (1)..(267): Homolog of NCBI NO: 4689380 NR Description: LHCII type III chlorophyll a/b binding protein
  misc_feature (1)..(267): Homolog of NCBI NO: 479406 NR Description: chlorophyll a/b-binding protein - garden pea
  misc_feature (1)..(267): Homolog of NCBI NO: 6644196 NR Description: chlorophyll a/b-binding protein [Daucus carota]
  misc_feature (1)..(267): Homolog of NCBI NO: 115794 NR Description: Chlorophyll A-B binding protein 13, chloroplast
  misc_feature (1)..(267): Homolog of NCBI NO: 15239602 NR Description: light-harvesting chlorophyll a/b binding protein, protein id: At5g54270.1, supported by cDNA: gi_13605753,
  misc_feature (47)..(267): Homolog of NCBI NO: 405617 NR Description: LHCII Type III chlorophyll a/b binding protein
  misc_feature (1)..(265): Homolog of NCBI NO: 7443222 NR Description: chlorophyll A/b-binding protein type III Lhcb3.2 - rape >gi|405615|emb|CAA43803.1| LHC II Type III chlorophyll a/b
  misc_feature (38)..(266): Homolog of NCBI NO: 115796 NR Description: Chlorophyll A-B binding protein, chloroplast
MAATSRIVAAKTPFLGQGRAAAAAANASPLRDVAAAAAGGRITMGNDLWYGPDRVKYLGPFSAQTPSYLTGEFPGDYGWDTAGLSADPEAFARNRALEVIHGRWAMLGALGCITPEVLEKWVRVDFKEPVWFKAGAQIFSEGGLDYLGNPNLVHAQSILAVLGFQVILMGLVEGFRINGLDGVGEGNNLYPGGQYFDPLGLADDPVTFAELKVKEIKNGRLAMFSMFGFFVQAIVTGKGPLENLLDHLDDPVANNAWVYATKFAPGS

SEQ ID NO: 7911 - protein, 224 aa, Zea mays subsp. mays
  peptide (1)..(224): Ceres Seq. ID no. 12353950
  misc_feature (21)..(191): Pfam Name: Chlorophyll A-B binding protein Pfam Description: Chlorophyll A-B binding protein
  misc_feature (1)..(224): Homolog of NCBI NO: 115793 NR Description: Chlorophyll A-B binding protein of LHCII type III,
  misc_feature (1)..(224): Homolog of NCBI NO: 34393384 NR Description: putative chlorophyll A-B binding protein of LHCII
  misc_feature (1)..(224): Homolog of NCBI NO: 4689380 NR Description: LHCII type III chlorophyll a/b binding protein
  misc_feature (1)..(224): Homolog of NCBI NO: 479406 NR Description: chlorophyll a/b-binding protein - garden pea
  misc_feature (1)..(224): Homolog of NCBI NO: 6644196 NR Description: chlorophyll a/b-binding protein [Daucus carota]
  misc_feature (1)..(224): Homolog of NCBI NO: 115794 NR Description: Chlorophyll A-B binding protein 13, chloroplast
  misc_feature (1)..(224): Homolog of NCBI NO: 15239602 NR Description: light-harvesting chlorophyll a/b binding protein, protein id: At5g54270.1, supported by cDNA: gi_13605753,
  misc_feature (4)..(224): Homolog of NCBI NO: 405617 NR Description: LHCII Type III chlorophyll a/b binding protein
  misc_feature (1)..(222): Homolog of NCBI NO: 7443222 NR Description: chlorophyll A/b-binding protein type III Lhcb3.2 - rape >gi|405615|emb|CAA43803.1| LHC II Type III chlorophyll a/b
  misc_feature (1)..(223): Homolog of NCBI NO: 115796 NR Description: Chlorophyll A-B binding protein, chloroplast
MGNDLWYGPDRVKYLGPFSAQTPSYLTGEFPGDYGWDTAGLSADPEAFARNRALEVIHGRWAMLGALGCITPEVLEKWVRVDFKEPVWFKAGAQIFSEGGLDYLGNPNLVHAQSILAVLGFQVILMGLVEGFRINGLDGVGEGNNLYPGGQYFDPLGLADDPVTFAELKVKEIKNGRLAMFSMFGFFVQAIVTGKGPLENLLDHLDDPVANNAWVYATKFAPGS

SEQ ID NO: 7912 - DNA, 804 bp, Zea mays subsp. mays
  misc_feature (1)..(804): Ceres Seq. ID no. 12348060
  misc_feature: MA Experiment ID: 108535 Result: Up-regulated in Transcription
  misc_feature: MA Experiment 108535 PARAMETER Experiment Name: Zm_Meristem_P Parameter: Age (day) Value: 8
  misc_feature: MA Experiment 108535 PARAMETER Experiment Name: Zm_Meristem_P Parameter: Organism Value: Zea mays
  misc_feature: MA Experiment 108535 PARAMETER Experiment Name: Zm_Meristem_P Parameter: Plant Line Value: 35A19
  misc_feature: MA Experiment 108535 PARAMETER Experiment Name: Zm_Meristem_P Parameter: Tissue Value: Root Meristem vs. Above Root Meristem
  misc_feature: MA Experiment ID: 20000487 Result: Up-regulated in Transcription
  misc_feature: MA Experiment 20000487 PARAMETER Experiment Name: Zm_50mM_NH4NO3_L_to_H_P Parameter: Organism Value: Zea mays
  misc_feature: MA Experiment 20000487 PARAMETER Experiment Name: Zm_50mM_NH4NO3_L_to_H_P Parameter: Timepoint (hr) Value: 4
  misc_feature: MA Experiment 20000487 PARAMETER Experiment Name: Zm_50mM_NH4NO3_L_to_H_P Parameter: Tissue Value: Leaves
  misc_feature: MA Experiment 20000487 PARAMETER Experiment Name: Zm_50mM_NH4NO3_L_to_H_P Parameter: Treatment Value: 50mM NH4NO3 vs. 100mM Mannitol
  misc_feature: MA Experiment ID: 20001606 Result: Up-regulated in Transcription
  misc_feature: MA Experiment 20001606 PARAMETER Experiment Name: Zm_50ppm_KNO3_L-to-H_P Parameter: Age (day) Value: 19
  misc_feature: MA Experiment 20001606 PARAMETER Experiment Name: Zm_50ppm_KNO3_L-to-H_P Parameter: Organism Value: Zea mays
  misc_feature: MA Experiment 20001606 PARAMETER Experiment Name: Zm_50ppm_KNO3_L-to-H_P Parameter: Plant Line Value: 35A19
  misc_feature: MA Experiment 20001606 PARAMETER Experiment Name: Zm_50ppm_KNO3_L-to-H_P Parameter: Timepoint (hr) Value: 8
  misc_feature: MA Experiment 20001606 PARAMETER Experiment Name: Zm_50ppm_KNO3_L-to-H_P Parameter: Tissue Value: Shoots
  misc_feature: MA Experiment 20001606 PARAMETER Experiment Name: Zm_50ppm_KNO3_L-to-H_P Parameter: Treatment Value: 50ppm KNO3 vs. 50ppm KCl
gaaaattgaaaaccctataatcctccccaaaggcccaaacctatcgcccgtacgagactgcgccgccgttgccgtctcctcctccgtcccatcactctgctgctcgcgcactctcacctgcccgcgccgtcttcgaccgccaccaagatgaacaaggagaggctcatgaagatggccggcgccgtccgcaccggcggcaagggcaccatgcgcaggaagaagaaggctgtacacaagacggtcaccacggacgacaagaggctgcagggcactctcaagagagtaggggtcaacaccatccctgcaatcgaggaggtgaacatattcaaggacgatctcgtcatccagttcttgaaccccaaagtgcaagcttccatcgcagcaaacacatgggtggtcagtggatctccacagacgaaaaagctacaggatgttctccctgggatcattaaccagcttggccctgacaacatggagcacctgaagaggattgccgaggagatgcagaagcaggtggctgctgccggtgcggcagcacaggtcaaggaagacaacgatgacgatgttccagagcttgttcctggagagacttttgaagaagtagctcaggagacaaaagcctgatcataggctctaaatagtgaaatgttactgcaccaatgctgtgaggtcatggttttcgtgtgatggcactcttcttcctcccctcctaggccagccccagccactctttgtgttcgctgttggaaacttttagtttctccatctcaagcttttacctaaggttgtgcatgttgagatgcc

SEQ ID NO: 7913 - protein, 158 aa, Zea mays subsp. mays
  peptide (1)..(158): Ceres Seq. ID no. 12348061
  misc_feature (34)..(92): Pfam Name: NAC domain Pfam Description: NAC domain
  misc_feature (1)..(158): Homolog of NCBI NO: 27573340 NR Description: putative transcription factor [Oryza sativa
  misc_feature (1)..(158): Homolog of NCBI NO: 33945882 NR Description: transcription factor homolog BTF3-like protein
  misc_feature (1)..(155): Homolog of NCBI NO: 24431603 NR Description: Putative transcription factor [Oryza sativa
  misc_feature (1)..(155): Homolog of NCBI NO: 29367567 NR Description: putative transcription factor BTF3 [Oryza sativa
  misc_feature (1)..(157): Homolog of NCBI NO: 37535464 NR Description: putative transcription factor [Oryza sativa
  misc_feature (1)..(158): Homolog of NCBI NO: 15220876 NR Description: transcription factor, putative; protein id: supported by cDNA: 1105., supported by cDNA: gi_12083221, by cDNA: gi_15027872, supported by cDNA: gi_16323126, supported
  misc_feature (1)..(158): Homolog of NCBI NO: 16323127 NR Description: At1g17880/F2H15_10 [Arabidopsis thaliana]
  misc_feature (1)..(155): Homolog of NCBI NO: 15219413 NR Description: putative transcription factor BTF3 (RNA B transcription factor 3); protein id: At1g73230.1, supported by
  misc_feature (1)..(155): Homolog of NCBI NO: 21537065 NR Description: putative transcription factor BTF3 (RNA
  misc_feature (9)..(158): Homolog of NCBI NO: 25956272 NR Description: unnamed protein product [Lotus japonicus]
MNKERLMKMAGAVRTGGKGTMRRKKKAVHKTVTTDDKRLQGTLKRVGVNTIPAIEEVNIFKDDLVIQFLNPKVQASIAANTWVVSGSPQTKKLQDVLPGIINQLGPDNMEHLKRIAEEMQKQVAAAGAAAQVKEDNDDDVPELVPGETFEEVAQETKA

SEQ ID NO: 7914 - protein, 152 aa, Zea mays subsp. mays
  peptide (1)..(152): Ceres Seq. ID no. 12348062
  misc_feature (28)..(86): Pfam Name: NAC domain Pfam Description: NAC domain
  misc_feature (1)..(152): Homolog of NCBI NO: 27573340 NR Description: putative transcription factor [Oryza sativa
  misc_feature (1)..(152): Homolog of NCBI NO: 33945882 NR Description: transcription factor homolog BTF3-like protein
  misc_feature (1)..(149): Homolog of NCBI NO: 24431603 NR Description: Putative transcription factor [Oryza sativa
  misc_feature (1)..(149): Homolog of NCBI NO: 29367567 NR Description: putative transcription factor BTF3 [Oryza sativa
  misc_feature (1)..(151): Homolog of NCBI NO: 37535464 NR Description: putative transcription factor [Oryza sativa
  misc_feature (1)..(152): Homolog of NCBI NO: 15220876 NR Description: transcription factor, putative; protein id: supported by cDNA: 1105., supported by cDNA: gi_12083221, by cDNA: gi_15027872, supported by cDNA: gi_16323126, supported
  misc_feature (1)..(152): Homolog of NCBI NO: 16323127 NR Description: At1g17880/F2H15_10 [Arabidopsis thaliana]
  misc_feature (1)..(149): Homolog of NCBI NO: 15219413 NR Description: putative transcription factor BTF3 (RNA B transcription factor 3); protein id: At1g73230.1, supported by
  misc_feature (1)..(149): Homolog of NCBI NO: 21537065 NR Description: putative transcription factor BTF3 (RNA
  misc_feature (3)..(152): Homolog of NCBI NO: 25956272 NR Description: unnamed protein product [Lotus japonicus]
MKMAGAVRTGGKGTMRRKKKAVHKTVTTDDKRLQGTLKRVGVNTIPAIEEVNIFKDDLVIQFLNPKVQASIAANTWVVSGSPQTKKLQDVLPGIINQLGPDNMEHLKRIAEEMQKQVAAAGAAAQVKEDNDDDVPELVPGETFEEVAQETKA

SEQ ID NO: 7915 - protein, 150 aa, Zea mays subsp. mays
  peptide (1)..(150): Ceres Seq. ID no. 12348063
  misc_feature (26)..(84): Pfam Name: NAC domain Pfam Description: NAC domain
  misc_feature (1)..(150): Homolog of NCBI NO: 27573340 NR Description: putative transcription factor [Oryza sativa
  misc_feature (1)..(150): Homolog of NCBI NO: 33945882 NR Description: transcription factor homolog BTF3-like protein
  misc_feature (1)..(147): Homolog of NCBI NO: 24431603 NR Description: Putative transcription factor [Oryza sativa
  misc_feature (1)..(147): Homolog of NCBI NO: 29367567 NR Description: putative transcription factor BTF3 [Oryza sativa
  misc_feature (1)..(149): Homolog of NCBI NO: 37535464 NR Description: putative transcription factor [Oryza sativa
  misc_feature (1)..(150): Homolog of NCBI NO: 15220876 NR Description: transcription factor, putative; protein id: supported by cDNA: 1105., supported by cDNA: gi_12083221, by cDNA: gi_15027872, supported by cDNA: gi_16323126, supported
  misc_feature (1)..(150): Homolog of NCBI NO: 16323127 NR Description: At1g17880/F2H15_10 [Arabidopsis thaliana]
  misc_feature (1)..(147): Homolog of NCBI NO: 15219413 NR Description: putative transcription factor BTF3 (RNA B transcription factor 3); protein id: At1g73230.1, supported by
  misc_feature (1)..(147): Homolog of NCBI NO: 21537065 NR Description: putative transcription factor BTF3 (RNA
  misc_feature (1)..(150): Homolog of NCBI NO: 25956272 NR Description: unnamed protein product [Lotus japonicus]
MAGAVRTGGKGTMRRKKKAVHKTVTTDDKRLQGTLKRVGVNTIPAIEEVNIFKDDLVIQFLNPKVQASIAANTWVVSGSPQTKKLQDVLPGIINQLGPDNMEHLKRIAEEMQKQVAAAGAAAQVKEDNDDDVPELVPGETFEEVAQETKA

SEQ ID NO: 7916 - DNA, 1002 bp, Zea mays subsp. mays
  misc_feature (1)..(1002): Ceres Seq. ID no. 12341801
  misc_feature: MA Experiment ID: 20000534 Result: Down-regulated in Transcription
  misc_feature: MA Experiment 20000534 PARAMETER Experiment Name: Zm_Hybrid_Pollen_P Parameter: Age (day) Value: 8
  misc_feature: MA Experiment 20000534 PARAMETER Experiment Name: Zm_Hybrid_Pollen_P Parameter: Organism Value: Zea mays
  misc_feature: MA Experiment 20000534 PARAMETER Experiment Name: Zm_Hybrid_Pollen_P Parameter: Plant Line Value: 35A19
  misc_feature: MA Experiment 20000534 PARAMETER Experiment Name: Zm_Hybrid_Pollen_P Parameter: Tissue Value: Pollen vs. Aerial
gggatctggatctctcctctctcgtctgcaccgcgagtccgcgactccgcaccaagcaaatcccctgcccccaaaatattgctagggattcgaggggaggaaaatccaggcgcccaggcctggcaatccgttcgtcggagaggccatgagctcggcgcaggatccgttctacatcgtccgggaggagatccaggagtcgattgataaattgcaaagtaacttccaccgctgggagcaaactgcttcaaacacaggagaatatgttcatctgacaaaggagcttctgaccagctgtgaaagcatcgagtggcaggtagatgagctggaaaagacaatctcagttgcatcaagggatccatcatactatggacttgatgaagttgaactttccagacgaagaaactggactggttctgctcataagcaggttggtacagttaagagagctattgaaaagggcaagagcaatgtagcaacttcaaaataccaggatacaagcaggaccaaccactattctgcccaagataatgatgactttatctcttcagaatcagataggcagcttctactcatgaggcagcaggatgaagaacttgacgagctcagtgaaagtgttcaaaggattggtggctaggactaaccatacacgaagagctgtctggacaggaaaggatcctaaacgacttaagcttggagatggagactacttccaacagacttgatttcgtgcagaaaagagtggccatggtgatgaagaaggccggcatcaagggtcagatcatgctgatcgtgttcctggttgttctgttcatcattctttttgttttggtgttcttgacatagccaagtgcaccagggtcctcgattttctccctcccatttgttgtgcctccctccctagtacgaacataagtatacgtgctggagctatcctttataaatcccgattttaatgcattttgttctgcgtgagatcaccgtcattggaacggtgttatggtt

SEQ ID NO: 7917 - protein, 162 aa, Zea mays subsp. mays
  peptide (1)..(162): Ceres Seq. ID no. 12341802
  misc_feature (47)..(162): Homolog of NCBI NO: 34905840 NR Description: putative syntaxin [Oryza sativa (japonica
  misc_feature (1)..(56): Homolog of NCBI NO: 34905840 NR Description: putative syntaxin [Oryza sativa (japonica
  misc_feature (1)..(162): Homolog of NCBI NO: 18396813 NR Description: syntaxin SYP6 family; protein id: At1g28490.1, by cDNA: gi_16041649, supported by cDNA: gi_18175839 [Arabidopsis
  misc_feature (1)..(162): Homolog of NCBI NO: 18175840 NR Description: unknown protein [Arabidopsis thaliana]
  misc_feature (1)..(161): Homolog of NCBI NO: 498040 NR Description: ORF
  misc_feature (1)..(106): Homolog of NCBI NO: 6560768 NR Description: F3M18.7 [Arabidopsis thaliana]
  misc_feature (56)..(162): Homolog of NCBI NO: 6560768 NR Description: F3M18.7 [Arabidopsis thaliana]
  misc_feature (4)..(161): Homolog of NCBI NO: 20148776 NR Description: syntaxin 6 [Chlamydomonas reinhardtii]
  misc_feature (3)..(129): Homolog of NCBI NO: 24652619 NR Description: Syntaxin 6 CG7736-PC >gi|21627456|gb|AAM68720.1| [Drosophila melanogaster] >gi|25012644|gb|AAN71418.1| RE48509p
  misc_feature (3)..(142): Homolog of NCBI NO: 13928922 NR Description: syntaxin 6 [Rattus norvegicus]
MSSAQDPFYIVREEIQESIDKLQSNFHRWEQTASNTGEYVHLTKELLTSCESIEWQVDELEKTISVASRDPSYYGLDEVELSRRRNWTGSAHKQVGTVKRAIEKGKSNVATSKYQDTSRTNHYSAQDNDDFISSESDRQLLLMRQQDEELDELSESVQRIGG

SEQ ID NO: 7918 - DNA, 629 bp, Zea mays subsp. mays
  misc_feature (1)..(629): Ceres Seq. ID no. 12402244
  misc_feature: MA Experiment ID: 20000478 Result: Up-regulated in Transcription
  misc_feature: MA Experiment 20000478 PARAMETER Experiment Name: Zm_5mM_SA_P Parameter: Age (day) Value: 11
  misc_feature: MA Experiment 20000478 PARAMETER Experiment Name: Zm_5mM_SA_P Parameter: Organism Value: Zea mays
  misc_feature: MA Experiment 20000478 PARAMETER Experiment Name: Zm_5mM_SA_P Parameter: Plant Line Value: 35A19
  misc_feature: MA Experiment 20000478 PARAMETER Experiment Name: Zm_5mM_SA_P Parameter: Timepoint (hr) Value: 72
  misc_feature: MA Experiment 20000478 PARAMETER Experiment Name: Zm_5mM_SA_P Parameter: Tissue Value: Aerial
  misc_feature: MA Experiment 20000478 PARAMETER Experiment Name: Zm_5mM_SA_P Parameter: Treatment Value: 5mM SA vs. No Treatment
  misc_feature: MA Experiment ID: 20000479 Result: Up-regulated in Transcription
  misc_feature: MA Experiment 20000479 PARAMETER Experiment Name: Zm_Drought_P Parameter: Age (day) Value: 10
  misc_feature: MA Experiment 20000479 PARAMETER Experiment Name: Zm_Drought_P Parameter: Organism Value: Zea mays
  misc_feature: MA Experiment 20000479 PARAMETER Experiment Name: Zm_Drought_P Parameter: Plant Line Value: 35A19
  misc_feature: MA Experiment 20000479 PARAMETER Experiment Name: Zm_Drought_P Parameter: Timepoint (hr) Value: 48
  misc_feature: MA Experiment 20000479 PARAMETER Experiment Name: Zm_Drought_P Parameter: Tissue Value: Aerial
  misc_feature: MA Experiment 20000479 PARAMETER Experiment Name: Zm_Drought_P Parameter: Treatment Value: Drought vs. No Drought
  misc_feature: MA Experiment ID: 20000480 Result: Up-regulated in Transcription
  misc_feature: MA Experiment 20000480 PARAMETER Experiment Name: Zm_Drought_P Parameter: Age (day) Value: 11
  misc_feature: MA Experiment 20000480 PARAMETER Experiment Name: Zm_Drought_P Parameter: Organism Value: Zea mays
  misc_feature: MA Experiment 20000480 PARAMETER Experiment Name: Zm_Drought_P Parameter: Plant Line Value: 35A19
  misc_feature: MA Experiment 20000480 PARAMETER Experiment Name: Zm_Drought_P Parameter: Timepoint (hr) Value: 72
  misc_feature: MA Experiment 20000480 PARAMETER Experiment Name: Zm_Drought_P Parameter: Tissue Value: Aerial
  misc_feature: MA Experiment 20000480 PARAMETER Experiment Name: Zm_Drought_P Parameter: Treatment Value: Drought vs. No Drought
attgcgaagcctcacgtctccagcaccgggccaccggcggcgaggtcgcgcgagcgcaggcaggggtggtactgggaggggaggaggggaagaaggaggtgactgcgatgtcgagccggttctggaggtggtacgcggaccggcagttccacaagtgggagaagacggtgctgtgggacatggtggagccctaccgcccgccgcgctccttcgcgccactcgtcggcacctacgtcgccgccttctacaccggcgtcgtcggggccgccgtcaccgagcagctctacaaggagaagtactgggaggatcaccccggcgaggcggtgccgatcatgccgcccaagttctactgggggccttggagggtgatgaacggagaagttccgcgcttcattcagccgcccgacgaggccaagacggcgtaggagcttcgagcttgcttcaaaacttctcagaagaagcatgtatctggtctcgatcgaaaaaaagaaattggagcccttcttttgtgcctctcccactctcctggttgtacgcctgtacctgtctgtctggaatacacgagtaagataagatcaggagaactgaagacctcaaataaagaaaaaaatcagaaaacgttggcatgg

SEQ ID NO: 7919 - protein, 188 aa, Zea mays subsp. mays
  peptide (1)..(188): Ceres Seq. ID no. 12402245
LRSLTSPAPGHRRRGRASAGRGGTGRGGGEEGGDCDVEPVLEVVRGPAVPQVGEDGAVGHGGALPPAALLRATRRHLRRRLLHRRRRGRRHRAALQGEVLGGSPRRGGADHAAQVLLGALEGDERRSSALHSAARRGQDGVGASSLLQNFSEEACIWSRSKKRNWSPSFVPLPLSWLYACTCLSGIHE

SEQ ID NO: 7920 - protein, 140 aa, Zea mays subsp. mays
  peptide (1)..(140): Ceres Seq. ID no. 12402246
  misc_feature (38)..(126): Homolog of NCBI NO: 18417439 NR Description: putative protein; protein id: At4g29660.1, by cDNA: 13465., supported by cDNA: gi_13877544, supported by gi_17978760 [Arabidopsis thaliana]
  misc_feature (38)..(122): Homolog of NCBI NO: 7487097 NR Description: hypothetical protein T16L4.170 - Arabidopsis >gi|5123560|emb|CAB45326.1| putative protein [Arabidopsis >gi|7269865|emb|CAB79724.1| putative protein [Arabidopsis
CEASRLQHRATGGEVARAQAGVVLGGEEGKKEVTAMSSRFWRWYADRQFHKWEKTVLWDMVEPYRPPRSFAPLVGTYVAAFYTGVVGAAVTEQLYKEKYWEDHPGEAVPIMPPKFYWGPWRVMNGEVPRFIQPPDEAKTA

SEQ ID NO: 7921 - protein, 105 aa, Zea mays subsp. mays
  peptide (1)..(105): Ceres Seq. ID no. 12402247
  misc_feature (3)..(87): Homolog of NCBI NO: 7487097 NR Description: hypothetical protein T16L4.170 - Arabidopsis >gi|5123560|emb|CAB45326.1| putative protein [Arabidopsis >gi|7269865|emb|CAB79724.1| putative protein [Arabidopsis
  misc_feature (3)..(91): Homolog of NCBI NO: 18417439 NR Description: putative protein; protein id: At4g29660.1, by cDNA: 13465., supported by cDNA: gi_13877544, supported by gi_17978760 [Arabidopsis thaliana]
MSSRFWRWYADRQFHKWEKTVLWDMVEPYRPPRSFAPLVGTYVAAFYTGVVGAAVTEQLYKEKYWEDHPGEAVPIMPPKFYWGPWRVMNGEVPRFIQPPDEAKTA

SEQ ID NO: 7922 - DNA, 725 bp, Zea mays subsp. mays
  misc_feature (1)..(725): Ceres Seq. ID no. 12402897
  misc_feature: MA Experiment ID: 108528 Result: Up-regulated in Transcription
  misc_feature: MA Experiment 108528 PARAMETER Experiment Name: Zm_Imbibed_Seeds_P Parameter: Age (day) Value: 5 vs. 2
  misc_feature: MA Experiment 108528 PARAMETER Experiment Name: Zm_Imbibed_Seeds_P Parameter: Organism Value: Zea mays
  misc_feature: MA Experiment 108528 PARAMETER Experiment Name: Zm_Imbibed_Seeds_P Parameter: Plant Line Value: 35A19
  misc_feature: MA Experiment 108528 PARAMETER Experiment Name: Zm_Imbibed_Seeds_P Parameter: Tissue Value: Aerial vs. Embryo
  misc_feature: MA Experiment ID: 108530 Result: Up-regulated in Transcription
  misc_feature: MA Experiment 108530 PARAMETER Experiment Name: Zm_Imbibed_Seeds_P Parameter: Age (day) Value: 6 vs. 2
  misc_feature: MA Experiment 108530 PARAMETER Experiment Name: Zm_Imbibed_Seeds_P Parameter: Organism Value: Zea mays
  misc_feature: MA Experiment 108530 PARAMETER Experiment Name: Zm_Imbibed_Seeds_P Parameter: Plant Line Value: 35A19
  misc_feature: MA Experiment 108530 PARAMETER Experiment Name: Zm_Imbibed_Seeds_P Parameter: Tissue Value: Aerial vs. Embryo
  misc_feature: MA Experiment ID: 108536 Result: Down-regulated in Transcription
  misc_feature: MA Experiment 108536 PARAMETER Experiment Name: Zm_Meristem_P Parameter: Age (day) Value: 8
  misc_feature: MA Experiment 108536 PARAMETER Experiment Name: Zm_Meristem_P Parameter: Organism Value: Zea mays
  misc_feature: MA Experiment 108536 PARAMETER Experiment Name: Zm_Meristem_P Parameter: Plant Line Value: 35A19
  misc_feature: MA Experiment 108536 PARAMETER Experiment Name: Zm_Meristem_P Parameter: Tissue Value: Shoot Meristem vs. Above Shoot Meristem
  misc_feature: MA Experiment ID: 108545 Result: Up-regulated in Transcription
  misc_feature: MA Experiment 108545 PARAMETER Experiment Name: Zm_Imbibed_Seeds_P Parameter: Age (day) Value: 3 vs. 2
  misc_feature: MA Experiment 108545 PARAMETER Experiment Name: Zm_Imbibed_Seeds_P Parameter: Organism Value: Zea mays
  misc_feature: MA Experiment 108545 PARAMETER Experiment Name: Zm_Imbibed_Seeds_P Parameter: Plant Line Value: 35A19
  misc_feature: MA Experiment 108545 PARAMETER Experiment Name: Zm_Imbibed_Seeds_P Parameter: Tissue Value: Aerial vs. Embryo
  misc_feature: MA Experiment ID: 108547 Result: Up-regulated in Transcription
  misc_feature: MA Experiment 108547 PARAMETER Experiment Name: Zm_Imbibed_Seeds_P Parameter: Age (day) Value: 4 vs. 2
  misc_feature: MA Experiment 108547 PARAMETER Experiment Name: Zm_Imbibed_Seeds_P Parameter: Organism Value: Zea mays
  misc_feature: MA Experiment 108547 PARAMETER Experiment Name: Zm_Imbibed_Seeds_P Parameter: Plant Line Value: 35A19
  misc_feature: MA Experiment 108547 PARAMETER Experiment Name: Zm_Imbibed_Seeds_P Parameter: Tissue Value: Aerial vs. Embryo
attgtcatctggggcagggcaggggagggcaggagaagctatctattggccatctatccagcagccgctctccccagccccactctctccatctagagctccctaactgcaccggccgccacaccaccgtaccccgacccctcgacaacaatggccaccgtcctaggcagcccccgcgcgccggccttcttcttctcgccgtcctccctccgtgccgcgccggcgcccaccgccgtggcgctgcctgcggccaaggtgggcatcatgggccgtagcgccagcagcaggggcaggctgcgcgcgcaggccacctacaacgtgaagctgatcacgccggagggggaggtggagctgcaggtgcccgacgacgtgtacatcctggaccaggccgaggaggacggcatcgacctgccctactcctgccgcgcggggtcctgctcctcctgcgccggcaaggtcgtctccggctccgtggaccagtccgaccagagctacctcgacgacggccagatcgccgccggctgggtgctcacctgccacgcctaccccacctctgacgtcgtcatcgagacgcacaaggaggaggagctcaccggcgcataatcattcatgcccatccatctctatctctgtgggtcgtcgttgtgtgtaatttgagtacgcgcgtacacgtactgcttttgtttcatttgagcactgttcgtgtaagcgtcgagttgccctgc

SEQ ID NO: 7923 - protein, 150 aa, Zea mays subsp. mays
  peptide (1)..(150): Ceres Seq. ID no. 12402898
  misc_feature (60)..(135): Pfam Name: 2Fe-2S iron-sulfur cluster binding domain Pfam Description: 2Fe-2S iron-sulfur cluster binding domain
  misc_feature (1)..(150): Homolog of NCBI NO: 119928 NR Description: Ferredoxin I, chloroplast precursor (Fd I)
  misc_feature (1)..(147): Homolog of NCBI NO: 119961 NR Description: Ferredoxin V, chloroplast precursor (Fd V)
  misc_feature (16)..(148): Homolog of NCBI NO: 462081 NR Description: Ferredoxin, chloroplast precursor
  misc_feature (53)..(150): Homolog of NCBI NO: 13096166 NR Description: Chain B, Crystal Structure Of The Complex Between
  misc_feature (17)..(147): Homolog of NCBI NO: 18698985 NR Description: anti-disease protein 1 [Oryza sativa]
  misc_feature (17)..(147): Homolog of NCBI NO: 29337209 NR Description: Ferredoxin I, chloroplast precursor (Anti-disease
  misc_feature (3)..(147): Homolog of NCBI NO: 7430752 NR Description: ferredoxin [2Fe-2S] 2 - maize
  misc_feature (17)..(148): Homolog of NCBI NO: 2305115 NR Description: ferredoxin [Oryza sativa]
  misc_feature (18)..(147): Homolog of NCBI NO: 15219837 NR Description: ferrodoxin precursor; protein id: At1g60950.1, by cDNA: gi_11908075, supported by cDNA: gi_12642889, supported cDNA: gi_13265544, supported by cDNA: gi_20260269 [Arabidopsis
  misc_feature (53)..(148): Homolog of NCBI NO: 34921267 NR Description: Ferredoxin
MATVLGSPRAPAFFFSPSSLRAAPAPTAVALPAAKVGIMGRSASSRGRLRAQATYNVKLITPEGEVELQVPDDVYILDQAEEDGIDLPYSCRAGSCSSCAGKVVSGSVDQSDQSYLDDGQIAAGWVLTCHAYPTSDVVIETHKEEELTGA

SEQ ID NO: 7924 - protein, 112 aa, Zea mays subsp. mays
  peptide (1)..(112): Ceres Seq. ID no. 12402899
  misc_feature (22)..(97): Pfam Name: 2Fe-2S iron-sulfur cluster binding domain Pfam Description: 2Fe-2S iron-sulfur cluster binding domain
  misc_feature (1)..(112): Homolog of NCBI NO: 119928 NR Description: Ferredoxin I, chloroplast precursor (Fd I)
  misc_feature (1)..(109): Homolog of NCBI NO: 119961 NR Description: Ferredoxin V, chloroplast precursor (Fd V)
  misc_feature (1)..(110): Homolog of NCBI NO: 462081 NR Description: Ferredoxin, chloroplast precursor
  misc_feature (15)..(112): Homolog of NCBI NO: 13096166 NR Description: Chain B, Crystal Structure Of The Complex Between
  misc_feature (1)..(109): Homolog of NCBI NO: 18698985 NR Description: anti-disease protein 1 [Oryza sativa]
  misc_feature (1)..(109): Homolog of NCBI NO: 29337209 NR Description: Ferredoxin I, chloroplast precursor (Anti-disease
  misc_feature (1)..(109): Homolog of NCBI NO: 7430752 NR Description: ferredoxin [2Fe-2S] 2 - maize
  misc_feature (1)..(110): Homolog of NCBI NO: 2305115 NR Description: ferredoxin [Oryza sativa]
  misc_feature (1)..(109): Homolog of NCBI NO: 15219837 NR Description: ferrodoxin precursor; protein id: At1g60950.1, by cDNA: gi_11908075, supported by cDNA: gi_12642889, supported cDNA: gi_13265544, supported by cDNA: gi_20260269 [Arabidopsis
  misc_feature (15)..(110): Homolog of NCBI NO: 34921267 NR Description: Ferredoxin
MGRSASSRGRLRAQATYNVKLITPEGEVELQVPDDVYILDQAEEDGIDLPYSCRAGSCSSCAGKVVSGSVDQSDQSYLDDGQIAAGWVLTCHAYPTSDVVIETHKEEELTGA

SEQ ID NO: 7925 - protein, 90 aa, Zea mays subsp. mays
  peptide (1)..(90): Ceres Seq. ID no. 12402900
CHLGQGRGGQEKLSIGHLSSSRSPQPHSLHLELPNCTGRHTTVPRPLDNNGHRPRQPPRAGLLLLAVLPPCRAGAHRRGAACGQGGHHGP

SEQ ID NO: 7926 - DNA, 877 bp, Zea mays subsp. mays
  misc_feature (1)..(877): Ceres Seq. ID no. 13493480
  misc_feature: MA Experiment ID: 108527 Result: Up-regulated in Transcription
  misc_feature: MA Experiment 108527 PARAMETER Experiment Name: Zm_5mM_NO_P Parameter: Age (day) Value: 8
  misc_feature: MA Experiment 108527 PARAMETER Experiment Name: Zm_5mM_NO_P Parameter: Organism Value: Zea mays
  misc_feature: MA Experiment 108527 PARAMETER Experiment Name: Zm_5mM_NO_P Parameter: Plant Line Value: 35A19
  misc_feature: MA Experiment 108527 PARAMETER Experiment Name: Zm_5mM_NO_P Parameter: Timepoint (hr) Value: 6
  misc_feature: MA Experiment 108527 PARAMETER Experiment Name: Zm_5mM_NO_P Parameter: Tissue Value: Aerial
  misc_feature: MA Experiment 108527 PARAMETER Experiment Name: Zm_5mM_NO_P Parameter: Treatment Value: 5mM NO vs. No Treatment
  misc_feature: MA Experiment ID: 108536 Result: Down-regulated in Transcription
  misc_feature: MA Experiment 108536 PARAMETER Experiment Name: Zm_Meristem_P Parameter: Age (day) Value: 8
  misc_feature: MA Experiment 108536 PARAMETER Experiment Name: Zm_Meristem_P Parameter: Organism Value: Zea mays
  misc_feature: MA Experiment 108536 PARAMETER Experiment Name: Zm_Meristem_P Parameter: Plant Line Value: 35A19
  misc_feature: MA Experiment 108536 PARAMETER Experiment Name: Zm_Meristem_P Parameter: Tissue Value: Shoot Meristem vs. Above Shoot Meristem
  misc_feature: MA Experiment ID: 108540 Result: Up-regulated in Transcription
  misc_feature: MA Experiment 108540 PARAMETER Experiment Name: Zm_20percent_PEG_P Parameter: Age (day) Value: 8
  misc_feature: MA Experiment 108540 PARAMETER Experiment Name: Zm_20percent_PEG_P Parameter: Organism Value: Zea mays
  misc_feature: MA Experiment 108540 PARAMETER Experiment Name: Zm_20percent_PEG_P Parameter: Plant Line Value: 35A19
  misc_feature: MA Experiment 108540 PARAMETER Experiment Name: Zm_20percent_PEG_P Parameter: Timepoint (hr) Value: 6
  misc_feature: MA Experiment 108540 PARAMETER Experiment Name: Zm_20percent_PEG_P Parameter: Tissue Value: Aerial
  misc_feature: MA Experiment 108540 PARAMETER Experiment Name: Zm_20percent_PEG_P Parameter: Treatment Value: 20percent PEG vs. No Treatment
  misc_feature: MA Experiment ID: 108543 Result: Down-regulated in Transcription
  misc_feature: MA Experiment ID: 108556 Result: Up-regulated in Transcription
  misc_feature: MA Experiment 108556 PARAMETER Experiment Name: Zm_Drought_P Parameter: Age (day) Value: 9
  misc_feature: MA Experiment 108556 PARAMETER Experiment Name: Zm_Drought_P Parameter: Organism Value: Zea mays
  misc_feature: MA Experiment 108556 PARAMETER Experiment Name: Zm_Drought_P Parameter: Plant Line Value: 35A19
  misc_feature: MA Experiment 108556 PARAMETER Experiment Name: Zm_Drought_P Parameter: Timepoint (hr) Value: 24
  misc_feature: MA Experiment 108556 PARAMETER Experiment Name: Zm_Drought_P Parameter: Tissue Value: Aerial
  misc_feature: MA Experiment 108556 PARAMETER Experiment Name: Zm_Drought_P Parameter: Treatment Value: Drought vs. No Drought
  misc_feature: MA Experiment ID: 108559 Result: Up-regulated in Transcription
  misc_feature: MA Experiment 108559 PARAMETER Experiment Name: Zm_5mM_NO_P Parameter: Age (day) Value: 8
  misc_feature: MA Experiment 108559 PARAMETER Experiment Name: Zm_5mM_NO_P Parameter: Organism Value: Zea mays
  misc_feature: MA Experiment 108559 PARAMETER Experiment Name: Zm_5mM_NO_P Parameter: Plant Line Value: 35A19
  misc_feature: MA Experiment 108559 PARAMETER Experiment Name: Zm_5mM_NO_P Parameter: Timepoint (hr) Value: 12
  misc_feature: MA Experiment 108559 PARAMETER Experiment Name: Zm_5mM_NO_P Parameter: Tissue Value: Aerial
  misc_feature: MA Experiment 108559 PARAMETER Experiment Name: Zm_5mM_NO_P Parameter: Treatment Value: 5mM NO vs. No Treatment
  misc_feature: MA Experiment ID: 108688 Result: Down-regulated in Transcription
  misc_feature: MA Experiment 108688 PARAMETER Experiment Name: Zm_Embryos-Flowers__P Parameter: Tissue Value: Immature Flowers vs. Aerial+
  misc_feature: MA Experiment ID: 20000478 Result: Up-regulated in Transcription
  misc_feature: MA Experiment 20000478 PARAMETER Experiment Name: Zm_5mM_SA_P Parameter: Age (day) Value: 11
  misc_feature: MA Experiment 20000478 PARAMETER Experiment Name: Zm_5mM_SA_P Parameter: Organism Value: Zea mays
  misc_feature: MA Experiment 20000478 PARAMETER Experiment Name: Zm_5mM_SA_P Parameter: Plant Line Value: 35A19
  misc_feature: MA Experiment 20000478 PARAMETER Experiment Name: Zm_5mM_SA_P Parameter: Timepoint (hr) Value: 72
  misc_feature: MA Experiment 20000478 PARAMETER Experiment Name: Zm_5mM_SA_P Parameter: Tissue Value: Aerial
  misc_feature: MA Experiment 20000478 PARAMETER Experiment Name: Zm_5mM_SA_P Parameter: Treatment Value: 5mM SA vs. No Treatment
  misc_feature: MA Experiment ID: 20000479 Result: Up-regulated in Transcription
  misc_feature: MA Experiment 20000479 PARAMETER Experiment Name: Zm_Drought_P Parameter: Age (day) Value: 10
  misc_feature: MA Experiment 20000479 PARAMETER Experiment Name: Zm_Drought_P Parameter: Organism Value: Zea mays
  misc_feature: MA Experiment 20000479 PARAMETER Experiment Name: Zm_Drought_P Parameter: Plant Line Value: 35A19
  misc_feature: MA Experiment 20000479 PARAMETER Experiment Name: Zm_Drought_P Parameter: Timepoint (hr) Value: 48
  misc_feature: MA Experiment 20000479 PARAMETER Experiment Name: Zm_Drought_P Parameter: Tissue Value: Aerial
  misc_feature: MA Experiment 20000479 PARAMETER Experiment Name: Zm_Drought_P Parameter: Treatment Value: Drought vs. No Drought
  misc_feature: MA Experiment ID: 20000480 Result: Up-regulated in Transcription
  misc_feature: MA Experiment 20000480 PARAMETER Experiment Name: Zm_Drought_P Parameter: Age (day) Value: 11
  misc_feature: MA Experiment 20000480 PARAMETER Experiment Name: Zm_Drought_P Parameter: Organism Value: Zea mays
  misc_feature: MA Experiment 20000480 PARAMETER Experiment Name: Zm_Drought_P Parameter: Plant Line Value: 35A19
  misc_feature: MA Experiment 20000480 PARAMETER Experiment Name: Zm_Drought_P Parameter: Timepoint (hr) Value: 72
  misc_feature: MA Experiment 20000480 PARAMETER Experiment Name: Zm_Drought_P Parameter: Tissue Value: Aerial
  misc_feature: MA Experiment 20000480 PARAMETER Experiment Name: Zm_Drought_P Parameter: Treatment Value: Drought vs. No Drought
  misc_feature: MA Experiment ID: 20000492 Result: Up-regulated in Transcription
  misc_feature: MA Experiment 20000492 PARAMETER Experiment Name: Zm_Hybrid_Seed_Dev_P Parameter: DAP Value: 12
  misc_feature: MA Experiment 20000492 PARAMETER Experiment Name: Zm_Hybrid_Seed_Dev_P Parameter: Organism Value: Zea mays
  misc_feature: MA Experiment 20000492 PARAMETER Experiment Name: Zm_Hybrid_Seed_Dev_P Parameter: Plant Line Value: 35A19
  misc_feature: MA Experiment 20000492 PARAMETER Experiment Name: Zm_Hybrid_Seed_Dev_P Parameter: Tissue Value: Fert Kernel vs. Unfert Floret
  misc_feature: MA Experiment ID: 20000535 Result: Up-regulated in Transcription
  misc_feature: MA Experiment 20000535 PARAMETER Experiment Name: Zm_Hybrid_Seed_Dev_P Parameter: DAP Value: 30 vs. 12
  misc_feature: MA Experiment 20000535 PARAMETER Experiment Name: Zm_Hybrid_Seed_Dev_P Parameter: Organism Value: Zea mays
  misc_feature: MA Experiment 20000535 PARAMETER Experiment Name: Zm_Hybrid_Seed_Dev_P Parameter: Plant Line Value: 35A19
  misc_feature: MA Experiment 20000535 PARAMETER Experiment Name: Zm_Hybrid_Seed_Dev_P Parameter: Tissue Value: Embryo vs. Unfert Floret
aaaaaaaatttagcggccaccgacgaccggccggccgtgcacccttcgcactactactgcgcccgcggacggcgtcagaggagcagcacccagcagcatggcctgcaccaggaggcagttgtggtgggcatgcctgctggcggcgtggtgctgcgccggcgccgccgcggccgcccagccgccggcggcggacgcggacccgctgcagagcaggtgccagggggactttgggaagctgacggactgcatggactacgcgacggggcacgcggcgtcgccctcgtccacctgctgcggcgacgccggcggcacgcagaaggcgcgcccggagtgcctctgctacatcatccagcaggtgcacgcggggcgcgaccaggtgcagtcgctcggcctgcgcttcgaccgcctcctggcgctccccgccgcctgcagcctccccaacgccaacgtctcgctctgcatcaacctgctgaacctgaagccgggctcgccagactacgcgctgttcgccaacgcctccaagatcacgccatcagccggaggcagcccggcgagcgacaccgccgccggcagcgccgttatcaggctccaggctggggtccgaggcagcgtcgcgctcgccgtggtctctgcgatcgtctcgtcagtcttctgatccgaccgatctcctcagaggactagaggagaagcagcggttcttacactccgtgtggattcgtcgttctcatgttgcgttccactcgtcgatgtctattttgtatttgtaccccacataaaaaaaatagatccagatgatacttgtttcccccgtccctgtggctttaactgtaacctcggatgtttgaattagctaattatgtataactctcatcgcgtc

SEQ ID NO: 7927 - protein, 226 aa, Zea mays subsp. mays
  peptide (1)..(226): Ceres Seq. ID no. 13493481
KKNLAATDDRPAVHPSHYYCARGRRQRSSTQQHGLHQEAVVVGMPAGGVVLRRRRRGRPAAGGGRGPAAEQVPGGLWEADGLHGLRDGARGVALVHLLRRRRRHAEGAPGVPLLHHPAGARGARPGAVARPALRPPPGAPRRLQPPQRQRLALHQPAEPEAGLARLRAVRQRLQDHAISRRQPGERHRRRQRRYQAPGWGPRQRRARRGLCDRLVSLLIRPISSED

SEQ ID NO: 7928 - protein, 185 aa, Zea mays subsp. mays
  peptide (1)..(185): Ceres Seq. ID no. 13493482
  misc_feature (40)..(121): Pfam Name: Protease inhibitor/seed storage/LTP family Pfam Description: Protease inhibitor/seed storage/LTP family
  misc_feature (22)..(182): Homolog of NCBI NO: 21553541 NR Description: lipid transfer protein, putative [Arabidopsis
  misc_feature (22)..(182): Homolog of NCBI NO: 15217777 NR Description: lipid transfer protein - related [Arabidopsis
  misc_feature (14)..(159): Homolog of NCBI NO: 28269449 NR Description: putative protease inhibitor [Oryza sativa
  misc_feature (11)..(184): Homolog of NCBI NO: 25553602 NR Description: OJ1656_E11.34 [Oryza sativa (japonica
  misc_feature (37)..(185): Homolog of NCBI NO: 25553595 NR Description: OJ1656_E11.26 [Oryza sativa (japonica
  misc_feature (13)..(160): Homolog of NCBI NO: 34394084 NR Description: lipid transfer protein-like [Oryza sativa
  misc_feature (14)..(182): Homolog of NCBI NO: 28269454 NR Description: putative protease inhibitor [Oryza sativa
  misc_feature (11)..(185): Homolog of NCBI NO: 25553588 NR Description: OJ1656_E11.14 [Oryza sativa (japonica
  misc_feature (40)..(132): Homolog of NCBI NO: 15229756 NR Description: protease inhibitor/seed storage/lipid transfer
  misc_feature (40)..(132): Homolog of NCBI NO: 21617892 NR Description: lipid-transfer protein-like protein [Arabidopsis
MACTRRQLWWACLLAAWCCAGAAAAAQPPAADADPLQSRCQGDFGKLTDCMDYATGHAASPSSTCCGDAGGTQKARPECLCYIIQQVHAGRDQVQSLGLRFDRLLALPAACSLPNANVSLCINLLNLKPGSPDYALFANASKITPSAGGSPASDTAAGSAVIRLQAGVRGSVALAVVSAIVSSVF

SEQ ID NO: 7929 - protein, 183 aa, Zea mays subsp. mays
  peptide (1)..(183): Ceres Seq. ID no. 13493483
MPAGGVVLRRRRRGRPAAGGGRGPAAEQVPGGLWEADGLHGLRDGARGVALVHLLRRRRRHAEGAPGVPLLHHPAGARGARPGAVARPALRPPPGAPRRLQPPQRQRLALHQPAEPEAGLARLRAVRQRLQDHAISRRQPGERHRRRQRRYQAPGWGPRQRRARRGLCDRLVSLLIRPISSED

SEQ ID NO: 7930 - DNA, 1067 bp, Zea mays subsp. mays
  misc_feature (1)..(1067): Ceres Seq. ID no. 12345390
  misc_feature: MA Experiment ID: 108504 Result: Up-regulated in Transcription
  misc_feature: MA Experiment 108504 PARAMETER Experiment Name: Zm_Drought_P Parameter: Age (day) Value: 8
  misc_feature: MA Experiment 108504 PARAMETER Experiment Name: Zm_Drought_P Parameter: Organism Value: Zea mays
  misc_feature: MA Experiment 108504 PARAMETER Experiment Name: Zm_Drought_P Parameter: Plant Line Value: 35A19
  misc_feature: MA Experiment 108504 PARAMETER Experiment Name: Zm_Drought_P Parameter: Timepoint (hr) Value: 12
  misc_feature: MA Experiment 108504 PARAMETER Experiment Name: Zm_Drought_P Parameter: Tissue Value: Aerial
  misc_feature: MA Experiment 108504 PARAMETER Experiment Name: Zm_Drought_P Parameter: Treatment Value: Drought vs. No Drought
  misc_feature: MA Experiment ID: 108515 Result: Up-regulated in Transcription
  misc_feature: MA Experiment 108515 PARAMETER Experiment Name: Zm_2mM_SA_P Parameter: Age (day) Value: 8
  misc_feature: MA Experiment 108515 PARAMETER Experiment Name: Zm_2mM_SA_P Parameter: Organism Value: Zea mays
  misc_feature: MA Experiment 108515 PARAMETER Experiment Name: Zm_2mM_SA_P Parameter: Plant Line Value: 35A19
  misc_feature: MA Experiment 108515 PARAMETER Experiment Name: Zm_2mM_SA_P Parameter: Timepoint (hr) Value: 12
  misc_feature: MA Experiment 108515 PARAMETER Experiment Name: Zm_2mM_SA_P Parameter: Tissue Value: Aerial
  misc_feature: MA Experiment 108515 PARAMETER Experiment Name: Zm_2mM_SA_P Parameter: Treatment Value: 2mM SA vs. No Treatment
  misc_feature: MA Experiment ID: 108522 Result: Up-regulated in Transcription
  misc_feature: MA Experiment 108522 PARAMETER Experiment Name: Zm_42deg_Heat_P Parameter: Age (day) Value: 8
  misc_feature: MA Experiment 108522 PARAMETER Experiment Name: Zm_42deg_Heat_P Parameter: Organism Value: Zea mays
  misc_feature: MA Experiment 108522 PARAMETER Experiment Name: Zm_42deg_Heat_P Parameter: Plant Line Value: 35A19
  misc_feature: MA Experiment 108522 PARAMETER Experiment Name: Zm_42deg_Heat_P Parameter: Temperature (deg C) Value: 42 vs. 22
  misc_feature: MA Experiment 108522 PARAMETER Experiment Name: Zm_42deg_Heat_P Parameter: Timepoint (hr) Value: 1
  misc_feature: MA Experiment 108522 PARAMETER Experiment Name: Zm_42deg_Heat_P Parameter: Tissue Value: Aerial
  misc_feature: MA Experiment ID: 108523 Result: Up-regulated in Transcription
  misc_feature: MA Experiment 108523 PARAMETER Experiment Name: Zm_42deg_Heat_P Parameter: Age (day) Value: 8
  misc_feature: MA Experiment 108523 PARAMETER Experiment Name: Zm_42deg_Heat_P Parameter: Organism Value: Zea mays
  misc_feature: MA Experiment 108523 PARAMETER Experiment Name: Zm_42deg_Heat_P Parameter: Plant Line Value: 35A19
  misc_feature: MA Experiment 108523 PARAMETER Experiment Name: Zm_42deg_Heat_P Parameter: Temperature (deg C) Value: 42 vs. 22
  misc_feature: MA Experiment 108523 PARAMETER Experiment Name: Zm_42deg_Heat_P Parameter: Timepoint (hr) Value: 6
  misc_feature: MA Experiment 108523 PARAMETER Experiment Name: Zm_42deg_Heat_P Parameter: Tissue Value: Aerial
  misc_feature: MA Experiment ID: 108527 Result: Up-regulated in Transcription
  misc_feature: MA Experiment 108527 PARAMETER Experiment Name: Zm_5mM_NO_P Parameter: Age (day) Value: 8
  misc_feature: MA Experiment 108527 PARAMETER Experiment Name: Zm_5mM_NO_P Parameter: Organism Value: Zea mays
  misc_feature: MA Experiment 108527 PARAMETER Experiment Name: Zm_5mM_NO_P Parameter: Plant Line Value: 35A19
  misc_feature: MA Experiment 108527 PARAMETER Experiment Name: Zm_5mM_NO_P Parameter: Timepoint (hr) Value: 6
  misc_feature: MA Experiment 108527 PARAMETER Experiment Name: Zm_5mM_NO_P Parameter: Tissue Value: Aerial
  misc_feature: MA Experiment 108527 PARAMETER Experiment Name: Zm_5mM_NO_P Parameter: Treatment Value: 5mM NO vs. No Treatment
  misc_feature: MA Experiment ID: 108533 Result: Up-regulated in Transcription
  misc_feature: MA Experiment 108533 PARAMETER Experiment Name: Zm_4deg_Cold_P Parameter: Age (hr) Value: 8
  misc_feature: MA Experiment 108533 PARAMETER Experiment Name: Zm_4deg_Cold_P Parameter: Organism Value: Zea mays
  misc_feature: MA Experiment 108533 PARAMETER Experiment Name: Zm_4deg_Cold_P Parameter: Plant Line Value: 35A19
  misc_feature: MA Experiment 108533 PARAMETER Experiment Name: Zm_4deg_Cold_P Parameter: Temperature (deg C) Value: 4 vs. 22
  misc_feature: MA Experiment 108533 PARAMETER Experiment Name: Zm_4deg_Cold_P Parameter: Timepoint (hr) Value: 1
  misc_feature: MA Experiment 108533 PARAMETER Experiment Name: Zm_4deg_Cold_P Parameter: Tissue Value: Aerial
  misc_feature: MA Experiment ID: 108534 Result: Up-regulated in Transcription
  misc_feature: MA Experiment 108534 PARAMETER Experiment Name: Zm_4deg_Cold_P Parameter: Age (hr) Value: 8
  misc_feature: MA Experiment 108534 PARAMETER Experiment Name: Zm_4deg_Cold_P Parameter: Organism Value: Zea mays
  misc_feature: MA Experiment 108534 PARAMETER Experiment Name: Zm_4deg_Cold_P Parameter: Plant Line Value: 35A19
  misc_feature: MA Experiment 108534 PARAMETER Experiment Name: Zm_4deg_Cold_P Parameter: Temperature (deg C) Value: 4 vs. 22
  misc_feature: MA Experiment 108534 PARAMETER Experiment Name: Zm_4deg_Cold_P Parameter: Timepoint (hr) Value: 6
  misc_feature: MA Experiment 108534 PARAMETER Experiment Name: Zm_4deg_Cold_P Parameter: Tissue Value: Aerial
  misc_feature: MA Experiment ID: 108535 Result: Down-regulated in Transcription
  misc_feature: MA Experiment 108535 PARAMETER Experiment Name: Zm_Meristem_P Parameter: Age (day) Value: 8
  misc_feature: MA Experiment 108535 PARAMETER Experiment Name: Zm_Meristem_P Parameter: Organism Value: Zea mays
  misc_feature: MA Experiment 108535 PARAMETER Experiment Name: Zm_Meristem_P Parameter: Plant Line Value: 35A19
  misc_feature: MA Experiment 108535 PARAMETER Experiment Name: Zm_Meristem_P Parameter: Tissue Value: Root Meristem vs. Above Root Meristem
  misc_feature: MA Experiment ID: 108542 Result: Up-regulated in Transcription
  misc_feature: MA Experiment 108542 PARAMETER Experiment Name: Zm_150mM_NaCl_P Parameter: Age (day) Value: 8
  misc_feature: MA Experiment 108542 PARAMETER Experiment Name: Zm_150mM_NaCl_P Parameter: Organism Value: Zea mays
  misc_feature: MA Experiment 108542 PARAMETER Experiment Name: Zm_150mM_NaCl_P Parameter: Plant Line Value: 35A19
  misc_feature: MA Experiment 108542 PARAMETER Experiment Name: Zm_150mM_NaCl_P Parameter: Timepoint (hr) Value: 6
  misc_feature: MA Experiment 108542 PARAMETER Experiment Name: Zm_150mM_NaCl_P Parameter: Tissue Value: Aerial
  misc_feature: MA Experiment 108542 PARAMETER Experiment Name: Zm_150mM_NaCl_P Parameter: Treatment Value: 150mM NaCl vs. No Treatment
  misc_feature: MA Experiment ID: 108544 Result: Down-regulated in Transcription
  misc_feature: MA Experiment ID: 108545 Result: Down-regulated in Transcription
  misc_feature: MA Experiment 108545 PARAMETER Experiment Name: Zm_Imbibed_Seeds_P Parameter: Age (day) Value: 3 vs. 2
  misc_feature: MA Experiment 108545 PARAMETER Experiment Name: Zm_Imbibed_Seeds_P Parameter: Organism Value: Zea mays
  misc_feature: MA Experiment 108545 PARAMETER Experiment Name: Zm_Imbibed_Seeds_P Parameter: Plant Line Value: 35A19
  misc_feature: MA Experiment 108545 PARAMETER Experiment Name: Zm_Imbibed_Seeds_P Parameter: Tissue Value: Aerial vs. Embryo
  misc_feature: MA Experiment ID: 108556 Result: Up-regulated in Transcription
  misc_feature: MA Experiment 108556 PARAMETER Experiment Name: Zm_Drought_P Parameter: Age (day) Value: 9
  misc_feature: MA Experiment 108556 PARAMETER Experiment Name: Zm_Drought_P Parameter: Organism Value: Zea mays
  misc_feature: MA Experiment 108556 PARAMETER Experiment Name: Zm_Drought_P Parameter: Plant Line Value: 35A19
  misc_feature: MA Experiment 108556 PARAMETER Experiment Name: Zm_Drought_P Parameter: Timepoint (hr) Value: 24
  misc_feature: MA Experiment 108556 PARAMETER Experiment Name: Zm_Drought_P Parameter: Tissue Value: Aerial
  misc_feature: MA Experiment 108556 PARAMETER Experiment Name: Zm_Drought_P Parameter: Treatment Value: Drought vs. No Drought
  misc_feature: MA Experiment ID: 108559 Result: Up-regulated in Transcription
  misc_feature: MA Experiment 108559 PARAMETER Experiment Name: Zm_5mM_NO_P Parameter: Age (day) Value: 8
  misc_feature: MA Experiment 108559 PARAMETER Experiment Name: Zm_5mM_NO_P Parameter: Organism Value: Zea mays
  misc_feature: MA Experiment 108559 PARAMETER Experiment Name: Zm_5mM_NO_P Parameter: Plant Line Value: 35A19
  misc_feature: MA Experiment 108559 PARAMETER Experiment Name: Zm_5mM_NO_P Parameter: Timepoint (hr) Value: 12
  misc_feature: MA Experiment 108559 PARAMETER Experiment Name: Zm_5mM_NO_P Parameter: Tissue Value: Aerial
  misc_feature: MA Experiment 108559 PARAMETER Experiment Name: Zm_5mM_NO_P Parameter: Treatment Value: 5mM NO vs. No Treatment
  misc_feature: MA Experiment ID: 108597 Result: Up-regulated in Transcription
  misc_feature: MA Experiment 108597 PARAMETER Experiment Name: Zm_100uM_ABA_P Parameter: Age (day) Value: 9
  misc_feature: MA Experiment 108597 PARAMETER Experiment Name: Zm_100uM_ABA_P Parameter: Organism Value: Zea mays
  misc_feature: MA Experiment 108597 PARAMETER Experiment Name: Zm_100uM_ABA_P Parameter: Plant Line Value: 35A19
  misc_feature: MA Experiment 108597 PARAMETER Experiment Name: Zm_100uM_ABA_P Parameter: Timepoint (hr) Value: 24
  misc_feature: MA Experiment 108597 PARAMETER Experiment Name: Zm_100uM_ABA_P Parameter: Tissue Value: Aerial
  misc_feature: MA Experiment 108597 PARAMETER Experiment Name: Zm_100uM_ABA_P Parameter: Treatment Value: 100uM ABA vs. No Treatment
  misc_feature: MA Experiment ID: 108688 Result: Down-regulated in Transcription
  misc_feature: MA Experiment 108688 PARAMETER Experiment Name: Zm_Embryos-Flowers__P Parameter: Tissue Value: Immature Flowers vs. Aerial+
  misc_feature: MA Experiment ID: 20000478 Result: Up-regulated in Transcription
  misc_feature: MA Experiment 20000478 PARAMETER Experiment Name: Zm_5mM_SA_P Parameter: Age (day) Value: 11
  misc_feature: MA Experiment 20000478 PARAMETER Experiment Name: Zm_5mM_SA_P Parameter: Organism Value: Zea mays
  misc_feature: MA Experiment 20000478 PARAMETER Experiment Name: Zm_5mM_SA_P Parameter: Plant Line Value: 35A19
  misc_feature: MA Experiment 20000478 PARAMETER Experiment Name: Zm_5mM_SA_P Parameter: Timepoint (hr) Value: 72
  misc_feature: MA Experiment 20000478 PARAMETER Experiment Name: Zm_5mM_SA_P Parameter: Tissue Value: Aerial
  misc_feature: MA Experiment 20000478 PARAMETER Experiment Name: Zm_5mM_SA_P Parameter: Treatment Value: 5mM SA vs. No Treatment
  misc_feature: MA Experiment ID: 20000480 Result: Down-regulated in Transcription
  misc_feature: MA Experiment 20000480 PARAMETER Experiment Name: Zm_Drought_P Parameter: Age (day) Value: 11
  misc_feature: MA Experiment 20000480 PARAMETER Experiment Name: Zm_Drought_P Parameter: Organism Value: Zea mays
  misc_feature: MA Experiment 20000480 PARAMETER Experiment Name: Zm_Drought_P Parameter: Plant Line Value: 35A19
  misc_feature: MA Experiment 20000480 PARAMETER Experiment Name: Zm_Drought_P Parameter: Timepoint (hr) Value: 72
  misc_feature: MA Experiment 20000480 PARAMETER Experiment Name: Zm_Drought_P Parameter: Tissue Value: Aerial
  misc_feature: MA Experiment 20000480 PARAMETER Experiment Name: Zm_Drought_P Parameter: Treatment Value: Drought vs. No Drought
  misc_feature: MA Experiment ID: 20000535 Result: Down-regulated in Transcription
  misc_feature: MA Experiment 20000535 PARAMETER Experiment Name: Zm_Hybrid_Seed_Dev_P Parameter: DAP Value: 30 vs. 12
  misc_feature: MA Experiment 20000535 PARAMETER Experiment Name: Zm_Hybrid_Seed_Dev_P Parameter: Organism Value: Zea mays
  misc_feature: MA Experiment 20000535 PARAMETER Experiment Name: Zm_Hybrid_Seed_Dev_P Parameter: Plant Line Value: 35A19
  misc_feature: MA Experiment 20000535 PARAMETER Experiment Name: Zm_Hybrid_Seed_Dev_P Parameter: Tissue Value: Embryo vs. Unfert Floret
tcgcattccccctcgatcggcctccctcccccaagatcctccactcgatcccaaacaaaccaacaaatccatccatcgcacatggacgcgttcttctcggcctcctccgcgtcggcgccctacggctacggcgccggcggatggagctacgactcgctcaagaacttccgccagatcacccctgccgtccagacccacctcaagctcgtctacctcaccctgtgcgcggcgctggcctcgtcggcggtgggcgcttacctgcacgtggtctggaacatcggcgggacgctgacaatgctcggttgcgtcggcagcatcgcctggctcttctcggtgcccgtctacgaggagaggaagaggtatgggctgctgatggcggctgccctcctggaaggcgcttcggtcggacccctcgtcaagctcgccgtggaatttgacccaagcatcctggtgacggcgttcgtggggactgccatcgcgttcgcgtgcttctccggcgcggccatggtggccaggcgcagggagtacctctacctgggcgggctgctctcgtcggggctctccatcctgctctggctgcagctcgccgcctccatcttcggccactccgcaaccagcttcatgttcgaggtctacttcgggctgctcatcttcctgggctacatggtgtacgacacgcaggagatcatcgagagggcgcaccgcggcgacatggaccacgtcaagcacgccctcaccctcttcaccgacttcgtggccgtcctcgtccgcgtcctcgtcatcatgctcaagaacgcggccgacaagtcggaggacaagaagaggaagaagaggtcgtgagcgtcgagaacggaagctctcccacatgcataggagtaactgccagggttccttcctggggtggaagtgtggaactgagcttgaatgttaagaagtgttcctttgttctcttcctctcttgatgactctgtaaatagctatgtcaatctggttaagtttggtttggttgcatgtgcctgtgttcgctgccctttggatagaatgcaaattaaagatgttgctattgc

SEQ ID NO: 7931 - protein, 279 aa, Zea mays subsp. mays
  peptide (1)..(279): Ceres Seq. ID no. 12345391
  misc_feature (57)..(266): Pfam Name: Uncharacterised protein family UPF0005 Pfam Description: Uncharacterised protein family UPF0005
  misc_feature (28)..(279): Homolog of NCBI NO: 12229685 NR Description: Bax inhibitor-1 (BI-1) (OsBI-1)
  misc_feature (28)..(278): Homolog of NCBI NO: 13940165 NR Description: BAX inhibitor 1 [Hordeum vulgare subsp. vulgare]
  misc_feature (28)..(279): Homolog of NCBI NO: 21593125 NR Description: Bax inhibitor-1 like [Arabidopsis thaliana]
  misc_feature (28)..(279): Homolog of NCBI NO: 14719274 NR Description: Bax inhibitor 1 [Brassica napus]
  misc_feature (28)..(279): Homolog of NCBI NO: 15238017 NR Description: Bax inhibitor-1 like; protein id: At5g47120.1, by cDNA: 36400., supported by cDNA: gi_11493974, supported by
  misc_feature (30)..(279): Homolog of NCBI NO: 14719276 NR Description: Bax inhibitor 1 [Nicotiana tabacum]
  misc_feature (32)..(276): Homolog of NCBI NO: 17981376 NR Description: bax inhibitor-like protein [Brassica oleracea]
  misc_feature (45)..(185): Homolog of NCBI NO: 27526517 NR Description: putative BAX inhibitor 1 [Hordeum vulgare subsp.
  misc_feature (48)..(275): Homolog of NCBI NO: 15236582 NR Description: Bax inhibitor-1-like protein; protein id:
  misc_feature (49)..(274): Homolog of NCBI NO: 21311961 NR Description: testis enhanced gene transcript; Bax inhibitor-1 musculus] >gi|12860242|dbj|BAB31892.1| unnamed protein product musculus] >gi|13542768|gb|AAH05588.1| RIKEN cDNA 5031406P05 gene
SHSPSIGLPPPRSSTRSQTNQQIHPSHMDAFFSASSASAPYGYGAGGWSYDSLKNFRQITPAVQTHLKLVYLTLCAALASSAVGAYLHVVWNIGGTLTMLGCVGSIAWLFSVPVYEERKRYGLLMAAALLEGASVGPLVKLAVEFDPSILVTAFVGTAIAFACFSGAAMVARRREYLYLGGLLSSGLSILLWLQLAASIFGHSATSFMFEVYFGLLIFLGYMVYDTQEIIERAHRGDMDHVKHALTLFTDFVAVLVRVLVIMLKNAADKSEDKKRKKRS

SEQ ID NO: 7932 - protein, 252 aa, Zea mays subsp. mays
  peptide (1)..(252): Ceres Seq. ID no. 12345392
  misc_feature (30)..(239): Pfam Name: Uncharacterised protein family UPF0005 Pfam Description: Uncharacterised protein family UPF0005
  misc_feature (1)..(252): Homolog of NCBI NO: 12229685 NR Description: Bax inhibitor-1 (BI-1) (OsBI-1)
  misc_feature (1)..(251): Homolog of NCBI NO: 13940165 NR Description: BAX inhibitor 1 [Hordeum vulgare subsp. vulgare]
  misc_feature (1)..(252): Homolog of NCBI NO: 21593125 NR Description: Bax inhibitor-1 like [Arabidopsis thaliana]
  misc_feature (1)..(252): Homolog of NCBI NO: 14719274 NR Description: Bax inhibitor 1 [Brassica napus]
  misc_feature (1)..(252): Homolog of NCBI NO: 15238017 NR Description: Bax inhibitor-1 like; protein id: At5g47120.1, by cDNA: 36400., supported by cDNA: gi_11493974, supported by
  misc_feature (3)..(252): Homolog of NCBI NO: 14719276 NR Description: Bax inhibitor 1 [Nicotiana tabacum]
  misc_feature (5)..(249): Homolog of NCBI NO: 17981376 NR Description: bax inhibitor-like protein [Brassica oleracea]
  misc_feature (18)..(158): Homolog of NCBI NO: 27526517 NR Description: putative BAX inhibitor 1 [Hordeum vulgare subsp.
  misc_feature (21)..(248): Homolog of NCBI NO: 15236582 NR Description: Bax inhibitor-1-like protein; protein id:
  misc_feature (22)..(247): Homolog of NCBI NO: 21311961 NR Description: testis enhanced gene transcript; Bax inhibitor-1 musculus] >gi|12860242|dbj|BAB31892.1| unnamed protein product musculus] >gi|13542768|gb|AAH05588.1| RIKEN cDNA 5031406P05 gene
MDAFFSASSASAPYGYGAGGWSYDSLKNFRQITPAVQTHLKLVYLTLCAALASSAVGAYLHVVWNIGGTLTMLGCVGSIAWLFSVPVYEERKRYGLLMAAALLEGASVGPLVKLAVEFDPSILVTAFVGTAIAFACFSGAAMVARRREYLYLGGLLSSGLSILLWLQLAASIFGHSATSFMFEVYFGLLIFLGYMVYDTQEIIERAHRGDMDHVKHALTLFTDFVAVLVRVLVIMLKNAADKSEDKKRKKRS

SEQ ID NO: 7933 - protein, 181 aa, Zea mays subsp. mays
  peptide (1)..(181): Ceres Seq. ID no. 12345393
  misc_feature (1)..(168): Pfam Name: Uncharacterised protein family UPF0005 Pfam Description: Uncharacterised protein family UPF0005
  misc_feature (1)..(181): Homolog of NCBI NO: 12229685 NR Description: Bax inhibitor-1 (BI-1) (OsBI-1)
  misc_feature (1)..(180): Homolog of NCBI NO: 13940165 NR Description: BAX inhibitor 1 [Hordeum vulgare subsp. vulgare]
  misc_feature (1)..(181): Homolog of NCBI NO: 21593125 NR Description: Bax inhibitor-1 like [Arabidopsis thaliana]
  misc_feature (1)..(181): Homolog of NCBI NO: 14719274 NR Description: Bax inhibitor 1 [Brassica napus]
  misc_feature (1)..(181): Homolog of NCBI NO: 15238017 NR Description: Bax inhibitor-1 like; protein id: At5g47120.1, by cDNA: 36400., supported by cDNA: gi_11493974, supported by
  misc_feature (1)..(181): Homolog of NCBI NO: 14719276 NR Description: Bax inhibitor 1 [Nicotiana tabacum]
  misc_feature (1)..(178): Homolog of NCBI NO: 17981376 NR Description: bax inhibitor-like protein [Brassica oleracea]
  misc_feature (1)..(87): Homolog of NCBI NO: 27526517 NR Description: putative BAX inhibitor 1 [Hordeum vulgare subsp.
  misc_feature (1)..(177): Homolog of NCBI NO: 15236582 NR Description: Bax inhibitor-1-like protein; protein id:
  misc_feature (1)..(176): Homolog of NCBI NO: 21311961 NR Description: testis enhanced gene transcript; Bax inhibitor-1 musculus] >gi|12860242|dbj|BAB31892.1| unnamed protein product musculus] >gi|13542768|gb|AAH05588.1| RIKEN cDNA 5031406P05 gene
MLGCVGSIAWLFSVPVYEERKRYGLLMAAALLEGASVGPLVKLAVEFDPSILVTAFVGTAIAFACFSGAAMVARRREYLYLGGLLSSGLSILLWLQLAASIFGHSATSFMFEVYFGLLIFLGYMVYDTQEIIERAHRGDMDHVKHALTLFTDFVAVLVRVLVIMLKNAADKSEDKKRKKRS

SEQ ID NO: 7934 - DNA, 528 bp, Zea mays subsp. mays
  misc_feature (1)..(528): Ceres Seq. ID no. 13564769
  misc_feature: MA Experiment ID: 108527 Result: Up-regulated in Transcription
  misc_feature: MA Experiment 108527 PARAMETER Experiment Name: Zm_5mM_NO_P Parameter: Age (day) Value: 8
  misc_feature: MA Experiment 108527 PARAMETER Experiment Name: Zm_5mM_NO_P Parameter: Organism Value: Zea mays
  misc_feature: MA Experiment 108527 PARAMETER Experiment Name: Zm_5mM_NO_P Parameter: Plant Line Value: 35A19
  misc_feature: MA Experiment 108527 PARAMETER Experiment Name: Zm_5mM_NO_P Parameter: Timepoint (hr) Value: 6
  misc_feature: MA Experiment 108527 PARAMETER Experiment Name: Zm_5mM_NO_P Parameter: Tissue Value: Aerial
  misc_feature: MA Experiment 108527 PARAMETER Experiment Name: Zm_5mM_NO_P Parameter: Treatment Value: 5mM NO vs. No Treatment
  misc_feature: Pfam Name: SH3_1 Pfam Description: SH3 domain
gtttctttttaggctgtcgaagtatcaagacggcagaacagggtgagggaatctactgggaatggcgatatggtatcaaaattggaagctgccgagtacaagcttgaagaactgaagtcaaacatggtgggattagggaaggaagctattgcagcaatgtcggctgttgaggctcagcagcaacggttgaccttacagcgtctcattgcactggttgaggctgagagaacttaccatcagagagttctggagatacttgacaaattggaagaagaaatggtgtctgagcgccaaaaaattgaagcacccccgactccagcagctgaaaaattatataccaccaccagcaccaccatcttatgatgaaattaatggagcatttgcatccacttctgttaacgagtcagtccaatctgtcgatttcttccttggagaggcccttgattcatttaatgctgaaagtgagtttgagcttaccttgtcagctggtgacattgtaattgtccgaaagatctcaagcaatggttg

SEQ ID NO: 7935 - protein, 97 aa, Zea mays subsp. mays
  peptide (1)..(97): Ceres Seq. ID no. 13564770
  misc_feature: Pfam Name: SH3_1 Pfam Description: SH3 domain
  misc_feature (1)..(86): Homolog of NCBI NO: 38344978 NR Description: OSJNBa0011L07.8 [Oryza sativa (japonica
  misc_feature (1)..(86): Homolog of NCBI NO: 37535998 NR Description: unknown protein [Oryza sativa (japonica
  misc_feature (1)..(85): Homolog of NCBI NO: 18418491 NR Description: SH3 domain-containing protein 2 [Arabidopsis
  misc_feature (1)..(93): Homolog of NCBI NO: 21928139 NR Description: AT4g18060/F15J5_30 [Arabidopsis thaliana]
  misc_feature (1)..(93): Homolog of NCBI NO: 22328762 NR Description: SH3 domain-containing protein 3 [Arabidopsis
  misc_feature (1)..(78): Homolog of NCBI NO: 34902022 NR Description: unknown protein [Oryza sativa (japonica
  misc_feature (1)..(81): Homolog of NCBI NO: 15221714 NR Description: SH3 domain-containing protein 1 [Arabidopsis
  misc_feature (1)..(57): Homolog of NCBI NO: 7485521 NR Description: hypothetical protein F15J5.30 - Arabidopsis >gi|5816992|emb|CAB53647.1| putative protein [Arabidopsis >gi|7268558|emb|CAB78808.1| putative protein [Arabidopsis
  misc_feature (1)..(83): Homolog of NCBI NO: 16974680 NR Description: SH3 domain-containing protein 3 [Arabidopsis
  misc_feature (1)..(87): Homolog of NCBI NO: 22093679 NR Description: putative SH3(Src homology) domain-containing
MVSKLEAAEYKLEELKSNMVGLGKEAIAAMSAVEAQQQRLTLQRLIALVEAERTYHQRVLEILDKLEEEMVSERQKIEAPPTPAAEKLYTTTSTTIL

SEQ ID NO: 7936 - protein, 79 aa, Zea mays subsp. mays
  peptide (1)..(79): Ceres Seq. ID no. 13564771
  misc_feature: Pfam Name: SH3_1 Pfam Description: SH3 domain
  misc_feature (1)..(68): Homolog of NCBI NO: 38344978 NR Description: OSJNBa0011L07.8 [Oryza sativa (japonica
  misc_feature (1)..(68): Homolog of NCBI NO: 37535998 NR Description: unknown protein [Oryza sativa (japonica
  misc_feature (1)..(67): Homolog of NCBI NO: 18418491 NR Description: SH3 domain-containing protein 2 [Arabidopsis
  misc_feature (1)..(75): Homolog of NCBI NO: 21928139 NR Description: AT4g18060/F15J5_30 [Arabidopsis thaliana]
  misc_feature (1)..(75): Homolog of NCBI NO: 22328762 NR Description: SH3 domain-containing protein 3 [Arabidopsis
  misc_feature (1)..(60): Homolog of NCBI NO: 34902022 NR Description: unknown protein [Oryza sativa (japonica
  misc_feature (1)..(63): Homolog of NCBI NO: 15221714 NR Description: SH3 domain-containing protein 1 [Arabidopsis
  misc_feature (1)..(39): Homolog of NCBI NO: 7485521 NR Description: hypothetical protein F15J5.30 - Arabidopsis >gi|5816992|emb|CAB53647.1| putative protein [Arabidopsis >gi|7268558|emb|CAB78808.1| putative protein [Arabidopsis
  misc_feature (1)..(65): Homolog of NCBI NO: 16974680 NR Description: SH3 domain-containing protein 3 [Arabidopsis
  misc_feature (1)..(69): Homolog of NCBI NO: 22093679 NR Description: putative SH3(Src homology) domain-containing
MVGLGKEAIAAMSAVEAQQQRLTLQRLIALVEAERTYHQRVLEILDKLEEEMVSERQKIEAPPTPAAEKLYTTTSTTIL

SEQ ID NO: 7937 - protein, 68 aa, Zea mays subsp. mays
  peptide (1)..(68): Ceres Seq. ID no. 13564772
  misc_feature: Pfam Name: SH3_1 Pfam Description: SH3 domain
  misc_feature (1)..(57): Homolog of NCBI NO: 38344978 NR Description: OSJNBa0011L07.8 [Oryza sativa (japonica
  misc_feature (1)..(57): Homolog of NCBI NO: 37535998 NR Description: unknown protein [Oryza sativa (japonica
  misc_feature (1)..(56): Homolog of NCBI NO: 18418491 NR Description: SH3 domain-containing protein 2 [Arabidopsis
  misc_feature (1)..(64): Homolog of NCBI NO: 21928139 NR Description: AT4g18060/F15J5_30 [Arabidopsis thaliana]
  misc_feature (1)..(64): Homolog of NCBI NO: 22328762 NR Description: SH3 domain-containing protein 3 [Arabidopsis
  misc_feature (1)..(49): Homolog of NCBI NO: 34902022 NR Description: unknown protein [Oryza sativa (japonica
  misc_feature (1)..(52): Homolog of NCBI NO: 15221714 NR Description: SH3 domain-containing protein 1 [Arabidopsis
  misc_feature (1)..(28): Homolog of NCBI NO: 7485521 NR Description: hypothetical protein F15J5.30 - Arabidopsis >gi|5816992|emb|CAB53647.1| putative protein [Arabidopsis >gi|7268558|emb|CAB78808.1| putative protein [Arabidopsis
  misc_feature (1)..(54): Homolog of NCBI NO: 16974680 NR Description: SH3 domain-containing protein 3 [Arabidopsis
  misc_feature (1)..(58): Homolog of NCBI NO: 22093679 NR Description: putative SH3(Src homology) domain-containing
MSAVEAQQQRLTLQRLIALVEAERTYHQRVLEILDKLEEEMVSERQKIEAPPTPAAEKLYTTTSTTIL

SEQ ID NO: 7938 - DNA, 1192 bp, Zea mays subsp. mays
  misc_feature (1)..(1192): Ceres Seq. ID no. 12376433
  misc_feature: MA Experiment ID: 108515 Result: Up-regulated in Transcription
  misc_feature: MA Experiment 108515 PARAMETER Experiment Name: Zm_2mM_SA_P Parameter: Age (day) Value: 8
  misc_feature: MA Experiment 108515 PARAMETER Experiment Name: Zm_2mM_SA_P Parameter: Organism Value: Zea mays
  misc_feature: MA Experiment 108515 PARAMETER Experiment Name: Zm_2mM_SA_P Parameter: Plant Line Value: 35A19
  misc_feature: MA Experiment 108515 PARAMETER Experiment Name: Zm_2mM_SA_P Parameter: Timepoint (hr) Value: 12
  misc_feature: MA Experiment 108515 PARAMETER Experiment Name: Zm_2mM_SA_P Parameter: Tissue Value: Aerial
  misc_feature: MA Experiment 108515 PARAMETER Experiment Name: Zm_2mM_SA_P Parameter: Treatment Value: 2mM SA vs. No Treatment
  misc_feature: MA Experiment ID: 108527 Result: Up-regulated in Transcription
  misc_feature: MA Experiment 108527 PARAMETER Experiment Name: Zm_5mM_NO_P Parameter: Age (day) Value: 8
  misc_feature: MA Experiment 108527 PARAMETER Experiment Name: Zm_5mM_NO_P Parameter: Organism Value: Zea mays
  misc_feature: MA Experiment 108527 PARAMETER Experiment Name: Zm_5mM_NO_P Parameter: Plant Line Value: 35A19
  misc_feature: MA Experiment 108527 PARAMETER Experiment Name: Zm_5mM_NO_P Parameter: Timepoint (hr) Value: 6
  misc_feature: MA Experiment 108527 PARAMETER Experiment Name: Zm_5mM_NO_P Parameter: Tissue Value: Aerial
  misc_feature: MA Experiment 108527 PARAMETER Experiment Name: Zm_5mM_NO_P Parameter: Treatment Value: 5mM NO vs. No Treatment
  misc_feature: MA Experiment ID: 108528 Result: Down-regulated in Transcription
  misc_feature: MA Experiment 108528 PARAMETER Experiment Name: Zm_Imbibed_Seeds_P Parameter: Age (day) Value: 5 vs. 2
  misc_feature: MA Experiment 108528 PARAMETER Experiment Name: Zm_Imbibed_Seeds_P Parameter: Organism Value: Zea mays
  misc_feature: MA Experiment 108528 PARAMETER Experiment Name: Zm_Imbibed_Seeds_P Parameter: Plant Line Value: 35A19
  misc_feature: MA Experiment 108528 PARAMETER Experiment Name: Zm_Imbibed_Seeds_P Parameter: Tissue Value: Aerial vs. Embryo
  misc_feature: MA Experiment ID: 108529 Result: Down-regulated in Transcription
  misc_feature: MA Experiment 108529 PARAMETER Experiment Name: Zm_Imbibed_Seeds_P Parameter: Age (day) Value: 5 vs. 2
  misc_feature: MA Experiment 108529 PARAMETER Experiment Name: Zm_Imbibed_Seeds_P Parameter: Organism Value: Zea mays
  misc_feature: MA Experiment 108529 PARAMETER Experiment Name: Zm_Imbibed_Seeds_P Parameter: Plant Line Value: 35A19
  misc_feature: MA Experiment 108529 PARAMETER Experiment Name: Zm_Imbibed_Seeds_P Parameter: Tissue Value: Roots vs. Embryo
  misc_feature: MA Experiment ID: 108530 Result: Down-regulated in Transcription
  misc_feature: MA Experiment 108530 PARAMETER Experiment Name: Zm_Imbibed_Seeds_P Parameter: Age (day) Value: 6 vs. 2
  misc_feature: MA Experiment 108530 PARAMETER Experiment Name: Zm_Imbibed_Seeds_P Parameter: Organism Value: Zea mays
  misc_feature: MA Experiment 108530 PARAMETER Experiment Name: Zm_Imbibed_Seeds_P Parameter: Plant Line Value: 35A19
  misc_feature: MA Experiment 108530 PARAMETER Experiment Name: Zm_Imbibed_Seeds_P Parameter: Tissue Value: Aerial vs. Embryo
  misc_feature: MA Experiment ID: 108543 Result: Down-regulated in Transcription
  misc_feature: MA Experiment ID: 20000478 Result: Down-regulated in Transcription
  misc_feature: MA Experiment 20000478 PARAMETER Experiment Name: Zm_5mM_SA_P Parameter: Age (day) Value: 11
  misc_feature: MA Experiment 20000478 PARAMETER Experiment Name: Zm_5mM_SA_P Parameter: Organism Value: Zea mays
  misc_feature: MA Experiment 20000478 PARAMETER Experiment Name: Zm_5mM_SA_P Parameter: Plant Line Value: 35A19
  misc_feature: MA Experiment 20000478 PARAMETER Experiment Name: Zm_5mM_SA_P Parameter: Timepoint (hr) Value: 72
  misc_feature: MA Experiment 20000478 PARAMETER Experiment Name: Zm_5mM_SA_P Parameter: Tissue Value: Aerial
  misc_feature: MA Experiment 20000478 PARAMETER Experiment Name: Zm_5mM_SA_P Parameter: Treatment Value: 5mM SA vs. No Treatment
  misc_feature: MA Experiment ID: 20000535 Result: Up-regulated in Transcription
  misc_feature: MA Experiment 20000535 PARAMETER Experiment Name: Zm_Hybrid_Seed_Dev_P Parameter: DAP Value: 30 vs. 12
  misc_feature: MA Experiment 20000535 PARAMETER Experiment Name: Zm_Hybrid_Seed_Dev_P Parameter: Organism Value: Zea mays
  misc_feature: MA Experiment 20000535 PARAMETER Experiment Name: Zm_Hybrid_Seed_Dev_P Parameter: Plant Line Value: 35A19
  misc_feature: MA Experiment 20000535 PARAMETER Experiment Name: Zm_Hybrid_Seed_Dev_P Parameter: Tissue Value: Embryo vs. Unfert Floret
gcacgagaccattacctagaacatcctaatcgaaaagtccctgcaccgacgccgcccgcccgcctccgtgcgctgcactgaatctgacagcgcccgtcctgcagcggccggcgaggaagagctctcggcgagagggcgagcgatggcggcggcaatgccggcgctgctgctggtggtggccacggcgatgatgttctcccccgccgccgcccgcattcccggcgtgtacggcggcggcggctggcagagcgcgcacgccacgttctacggcggcagcgacgcctcgggcaccatgggcggcgcctgcgggtacggcaacctgtacagccaggggtacggcgtgaacaacgcggcgctgagcacggcgctgttcaaccaggggctgagctgcggcgcgtgcttcgagatcaagtgcgaggaccagcccgggtggcggtggtgccgcccggggagcccctccatcctggtgacggccaccaacttctgcccgcccaactacgcgctgccctccgacgacggcggctggtgcaacccgccccgcccccacttcgacctcgccatgcccatgttcctccacatcgccgagtaccgcgccggcatcgtccccgtcacctaccgccgggtgccgtgccgcaagtccggcggcgtgcggttcaccatcaacggcttccggtacttcaacctggtgctgatcaccaacgtggccggcgcgggggacgtggtgcgcgcgagcgtgaaggcgtcgggcgccggggagtggatgcccatgtcgcggaactggggccagaactggcagtccagcgccatcctcgtcggccaggcgctctccttccgcgtcaccggcagcgaccgccgcacctccacctcctggaacgccgccccgcgggactggcgcttcggccagaccttcgagggcaagaacttcagggtctgagactctgagctcaggccgcgagtggcggcgagaagaagccagagctcaaggccttcttccgccgtactatatataccgtgattactgctgctagtagtcggtataaagcgcgtgttagggtggtgggaatgtacgtgaatgcccgtttagggtcacgccgtctcgccctggttcaagtactctctggaaaaaaaaggggagcctttttcttctgaacatgtgcggacaaaagggagataagtatggtgattggatgct

SEQ ID NO: 7939 - protein, 263 aa, Zea mays subsp. mays
  peptide (1)..(263): Ceres Seq. ID no. 12376434
  misc_feature (169)..(247): Pfam Name: Pollen allergen Pfam Description: Pollen allergen
  misc_feature (1)..(263): Homolog of NCBI NO: 34897422 NR Description: alpha-expansin [Oryza sativa (japonica
  misc_feature (3)..(263): Homolog of NCBI NO: 20502784 NR Description: expansin 11 precursor [Rumex palustris]
  misc_feature (3)..(263): Homolog of NCBI NO: 20502786 NR Description: expansin 12 precursor [Rumex palustris]
  misc_feature (1)..(263): Homolog of NCBI NO: 1076531 NR Description: pollen allergen homolog, hypothetical (clone - garden pea >gi|732905|emb|CAA59470.1| homology with pollen
  misc_feature (3)..(263): Homolog of NCBI NO: 20502782 NR Description: expansin 10 precursor [Rumex palustris]
  misc_feature (8)..(263): Homolog of NCBI NO: 29467509 NR Description: expansin [Pyrus communis]
  misc_feature (5)..(263): Homolog of NCBI NO: 16923359 NR Description: alpha-expansin 6 precursor [Cucumis sativus]
  misc_feature (8)..(263): Homolog of NCBI NO: 15225530 NR Description: expansin, putative; protein id: At2g39700.1, by cDNA: 17353., supported by cDNA: gi_15294171, supported by gi_17065213, supported by cDNA: gi_20259979 [Arabidopsis
  misc_feature (1)..(263): Homolog of NCBI NO: 21314549 NR Description: alpha-expansin precursor [Gossypium hirsutum]
  misc_feature (7)..(263): Homolog of NCBI NO: 38046726 NR Description: alpha-expansin 1 [Populus tremula x Populus
MAAAMPALLLVVATAMMFSPAAARIPGVYGGGGWQSAHATFYGGSDASGTMGGACGYGNLYSQGYGVNNAALSTALFNQGLSCGACFEIKCEDQPGWRWCRPGSPSILVTATNFCPPNYALPSDDGGWCNPPRPHFDLAMPMFLHIAEYRAGIVPVTYRRVPCRKSGGVRFTINGFRYFNLVLITNVAGAGDVVRASVKASGAGEWMPMSRNWGQNWQSSAILVGQALSFRVTGSDRRTSTSWNAAPRDWRFGQTFEGKNFRV

SEQ ID NO: 7940 - protein, 259 aa, Zea mays subsp. mays
  peptide (1)..(259): Ceres Seq. ID no. 12376435
  misc_feature (165)..(243): Pfam Name: Pollen allergen Pfam Description: Pollen allergen
  misc_feature (1)..(259): Homolog of NCBI NO: 34897422 NR Description: alpha-expansin [Oryza sativa (japonica
  misc_feature (1)..(259): Homolog of NCBI NO: 20502784 NR Description: expansin 11 precursor [Rumex palustris]
  misc_feature (1)..(259): Homolog of NCBI NO: 20502786 NR Description: expansin 12 precursor [Rumex palustris]
  misc_feature (1)..(259): Homolog of NCBI NO: 1076531 NR Description: pollen allergen homolog, hypothetical (clone - garden pea >gi|732905|emb|CAA59470.1| homology with pollen
  misc_feature (1)..(259): Homolog of NCBI NO: 20502782 NR Description: expansin 10 precursor [Rumex palustris]
  misc_feature (4)..(259): Homolog of NCBI NO: 29467509 NR Description: expansin [Pyrus communis]
  misc_feature (1)..(259): Homolog of NCBI NO: 16923359 NR Description: alpha-expansin 6 precursor [Cucumis sativus]
  misc_feature (4)..(259): Homolog of NCBI NO: 15225530 NR Description: expansin, putative; protein id: At2g39700.1, by cDNA: 17353., supported by cDNA: gi_15294171, supported by gi_17065213, supported by cDNA: gi_20259979 [Arabidopsis
  misc_feature (1)..(259): Homolog of NCBI NO: 21314549 NR Description: alpha-expansin precursor [Gossypium hirsutum]
  misc_feature (3)..(259): Homolog of NCBI NO: 38046726 NR Description: alpha-expansin 1 [Populus tremula x Populus
MPALLLVVATAMMFSPAAARIPGVYGGGGWQSAHATFYGGSDASGTMGGACGYGNLYSQGYGVNNAALSTALFNQGLSCGACFEIKCEDQPGWRWCRPGSPSILVTATNFCPPNYALPSDDGGWCNPPRPHFDLAMPMFLHIAEYRAGIVPVTYRRVPCRKSGGVRFTINGFRYFNLVLITNVAGAGDVVRASVKASGAGEWMPMSRNWGQNWQSSAILVGQALSFRVTGSDRRTSTSWNAAPRDWRFGQTFEGKNFRV

SEQ ID NO: 7941 - protein, 248 aa, Zea mays subsp. mays
  peptide (1)..(248): Ceres Seq. ID no. 12376436
  misc_feature (154)..(232): Pfam Name: Pollen allergen Pfam Description: Pollen allergen
  misc_feature (1)..(248): Homolog of NCBI NO: 34897422 NR Description: alpha-expansin [Oryza sativa (japonica
  misc_feature (1)..(248): Homolog of NCBI NO: 20502784 NR Description: expansin 11 precursor [Rumex palustris]
  misc_feature (1)..(248): Homolog of NCBI NO: 20502786 NR Description: expansin 12 precursor [Rumex palustris]
  misc_feature (1)..(248): Homolog of NCBI NO: 1076531 NR Description: pollen allergen homolog, hypothetical (clone - garden pea >gi|732905|emb|CAA59470.1| homology with pollen
  misc_feature (1)..(248): Homolog of NCBI NO: 20502782 NR Description: expansin 10 precursor [Rumex palustris]
  misc_feature (1)..(248): Homolog of NCBI NO: 29467509 NR Description: expansin [Pyrus communis]
  misc_feature (1)..(248): Homolog of NCBI NO: 16923359 NR Description: alpha-expansin 6 precursor [Cucumis sativus]
  misc_feature (1)..(248): Homolog of NCBI NO: 15225530 NR Description: expansin, putative; protein id: At2g39700.1, by cDNA: 17353., supported by cDNA: gi_15294171, supported by gi_17065213, supported by cDNA: gi_20259979 [Arabidopsis
  misc_feature (1)..(248): Homolog of NCBI NO: 21314549 NR Description: alpha-expansin precursor [Gossypium hirsutum]
  misc_feature (1)..(248): Homolog of NCBI NO: 38046726 NR Description: alpha-expansin 1 [Populus tremula x Populus
MMFSPAAARIPGVYGGGGWQSAHATFYGGSDASGTMGGACGYGNLYSQGYGVNNAALSTALFNQGLSCGACFEIKCEDQPGWRWCRPGSPSILVTATNFCPPNYALPSDDGGWCNPPRPHFDLAMPMFLHIAEYRAGIVPVTYRRVPCRKSGGVRFTINGFRYFNLVLITNVAGAGDVVRASVKASGAGEWMPMSRNWGQNWQSSAILVGQALSFRVTGSDRRTSTSWNAAPRDWRFGQTFEGKNFRV

SEQ ID NO: 7942 - DNA, 750 bp, Zea mays subsp. mays
  misc_feature (1)..(750): Ceres Seq. ID no. 12351001
  misc_feature: MA Experiment ID: 108543 Result: Up-regulated in Transcription
  misc_feature: MA Experiment ID: 108556 Result: Down-regulated in Transcription
  misc_feature: MA Experiment 108556 PARAMETER Experiment Name: Zm_Drought_P Parameter: Age (day) Value: 9
  misc_feature: MA Experiment 108556 PARAMETER Experiment Name: Zm_Drought_P Parameter: Organism Value: Zea mays
  misc_feature: MA Experiment 108556 PARAMETER Experiment Name: Zm_Drought_P Parameter: Plant Line Value: 35A19
  misc_feature: MA Experiment 108556 PARAMETER Experiment Name: Zm_Drought_P Parameter: Timepoint (hr) Value: 24
  misc_feature: MA Experiment 108556 PARAMETER Experiment Name: Zm_Drought_P Parameter: Tissue Value: Aerial
  misc_feature: MA Experiment 108556 PARAMETER Experiment Name: Zm_Drought_P Parameter: Treatment Value: Drought vs. No Drought
  misc_feature: MA Experiment ID: 20000480 Result: Down-regulated in Transcription
  misc_feature: MA Experiment 20000480 PARAMETER Experiment Name: Zm_Drought_P Parameter: Age (day) Value: 11
  misc_feature: MA Experiment 20000480 PARAMETER Experiment Name: Zm_Drought_P Parameter: Organism Value: Zea mays
  misc_feature: MA Experiment 20000480 PARAMETER Experiment Name: Zm_Drought_P Parameter: Plant Line Value: 35A19
  misc_feature: MA Experiment 20000480 PARAMETER Experiment Name: Zm_Drought_P Parameter: Timepoint (hr) Value: 72
  misc_feature: MA Experiment 20000480 PARAMETER Experiment Name: Zm_Drought_P Parameter: Tissue Value: Aerial
  misc_feature: MA Experiment 20000480 PARAMETER Experiment Name: Zm_Drought_P Parameter: Treatment Value: Drought vs. No Drought
  misc_feature: MA Experiment ID: 20000492 Result: Down-regulated in Transcription
  misc_feature: MA Experiment 20000492 PARAMETER Experiment Name: Zm_Hybrid_Seed_Dev_P Parameter: DAP Value: 12
  misc_feature: MA Experiment 20000492 PARAMETER Experiment Name: Zm_Hybrid_Seed_Dev_P Parameter: Organism Value: Zea mays
  misc_feature: MA Experiment 20000492 PARAMETER Experiment Name: Zm_Hybrid_Seed_Dev_P Parameter: Plant Line Value: 35A19
  misc_feature: MA Experiment 20000492 PARAMETER Experiment Name: Zm_Hybrid_Seed_Dev_P Parameter: Tissue Value: Fert Kernel vs. Unfert Floret
  misc_feature: MA Experiment ID: 20000535 Result: Down-regulated in Transcription
  misc_feature: MA Experiment 20000535 PARAMETER Experiment Name: Zm_Hybrid_Seed_Dev_P Parameter: DAP Value: 30 vs. 12
  misc_feature: MA Experiment 20000535 PARAMETER Experiment Name: Zm_Hybrid_Seed_Dev_P Parameter: Organism Value: Zea mays
  misc_feature: MA Experiment 20000535 PARAMETER Experiment Name: Zm_Hybrid_Seed_Dev_P Parameter: Plant Line Value: 35A19
  misc_feature: MA Experiment 20000535 PARAMETER Experiment Name: Zm_Hybrid_Seed_Dev_P Parameter: Tissue Value: Embryo vs. Unfert Floret
agggattaccttacattcttttgcttggggaacagggaggtgaagatggatggtgagtatgaaccttcaggtcgtccgcttgatgggacagactacgctcgggcgcagaatgcacgtcgcttcatgatctacgttcactctaagatgatgatagtcgacgacgaatacatcatcgttggatctgccaacatcaaccagcgctcaatggatgggggcagggactcggagatcgccatgggcgcgtaccagccgtgccacctgaacaccaaaggccaggtcgcccggggtcaggtccacggcttccggatgtcgctgtggtacgagcacctcggcatgctacacgacgatttcctcaacccgggaagcctggagtgtgttcggagggtaaaccagatggcagacaggtattgggacctctacgctggcgacagcctcgacgccgacctccctgggcacctgctcaggtacccagtcaccgtcacgaaggagggcacggtgacagagctcccgggggccaagttcttccccgacacacaggcgcttgtgcttggggcgctatcgaaactgcctcctattctcactacatagagaaaccttctgtactgttgccatgtgacgtttgcgggctgaattggttgaggtttttgctactccgtattatgctacaactggtagtgttattgtatggtttcttcctaataatagtatttatagttttggacttatctaaaatagtatttatatgtgtcc

SEQ ID NO: 7943 - protein, 195 aa, Zea mays subsp. mays
  peptide (1)..(195): Ceres Seq. ID no. 12351002
  misc_feature (41)..(68): Pfam Name: Phospholipase D. Active site motif Pfam Description: Phospholipase D. Active site motif
  misc_feature (1)..(194): Homolog of NCBI NO: 8699598 NR Description: phospholipase D [Oryza sativa]
  misc_feature (1)..(195): Homolog of NCBI NO: 4867805 NR Description: phospholipase D1 [Craterostigma plantagineum]
  misc_feature (1)..(195): Homolog of NCBI NO: 4867803 NR Description: phospholipase D2 [Craterostigma plantagineum]
  misc_feature (1)..(195): Homolog of NCBI NO: 8699600 NR Description: phospholipase D [Oryza sativa]
  misc_feature (1)..(195): Homolog of NCBI NO: 7488899 NR Description: phospholipase D (EC 3.1.4.4) - castor bean
  misc_feature (1)..(195): Homolog of NCBI NO: 15219031 NR Description: phospholipase D, putative; protein id: [Arabidopsis thaliana] >gi|13124454|sp|Q9SSQ9|PDA2_ARATH
  misc_feature (1)..(195): Homolog of NCBI NO: 2499710 NR Description: Phospholipase D alpha 1 precursor (PLD 1) (Choline
  misc_feature (1)..(195): Homolog of NCBI NO: 3914365 NR Description: Phospholipase D alpha 2 (PLD alpha 2) (Choline
  misc_feature (1)..(195): Homolog of NCBI NO: 13124446 NR Description: Phospholipase D alpha 2 precursor (PLD 2) (Choline
  misc_feature (1)..(195): Homolog of NCBI NO: 3914360 NR Description: Phospholipase D alpha 1 (PLD alpha 1) (Choline
RDYLTFFCLGNREVKMDGEYEPSGRPLDGTDYARAQNARRFMIYVHSKMMIVDDEYIIVGSANINQRSMDGGRDSEIAMGAYQPCHLNTKGQVARGQVHGFRMSLWYEHLGMLHDDFLNPGSLECVRRVNQMADRYWDLYAGDSLDADLPGHLLRYPVTVTKEGTVTELPGAKFFPDTQALVLGALSKLPPILTT

SEQ ID NO: 7944 - protein, 180 aa, Zea mays subsp. mays
  peptide (1)..(180): Ceres Seq. ID no. 12351003
  misc_feature (26)..(53): Pfam Name: Phospholipase D. Active site motif Pfam Description: Phospholipase D. Active site motif
  misc_feature (1)..(180): Homolog of NCBI NO: 3914365 NR Description: Phospholipase D alpha 2 (PLD alpha 2) (Choline
  misc_feature (1)..(180): Homolog of NCBI NO: 8699600 NR Description: phospholipase D [Oryza sativa]
  misc_feature (1)..(180): Homolog of NCBI NO: 2499710 NR Description: Phospholipase D alpha 1 precursor (PLD 1) (Choline
  misc_feature (1)..(180): Homolog of NCBI NO: 7488899 NR Description: phospholipase D (EC 3.1.4.4) - castor bean
  misc_feature (1)..(180): Homolog of NCBI NO: 15219031 NR Description: phospholipase D, putative; protein id: [Arabidopsis thaliana] >gi|13124454|sp|Q9SSQ9|PDA2_ARATH
  misc_feature (1)..(179): Homolog of NCBI NO: 8699598 NR Description: phospholipase D [Oryza sativa]
  misc_feature (1)..(180): Homolog of NCBI NO: 4867805 NR Description: phospholipase D1 [Craterostigma plantagineum]
  misc_feature (1)..(180): Homolog of NCBI NO: 4867803 NR Description: phospholipase D2 [Craterostigma plantagineum]
  misc_feature (1)..(180): Homolog of NCBI NO: 13124446 NR Description: Phospholipase D alpha 2 precursor (PLD 2) (Choline
  misc_feature (1)..(180): Homolog of NCBI NO: 3914360 NR Description: Phospholipase D alpha 1 (PLD alpha 1) (Choline
MDGEYEPSGRPLDGTDYARAQNARRFMIYVHSKMMIVDDEYIIVGSANINQRSMDGGRDSEIAMGAYQPCHLNTKGQVARGQVHGFRMSLWYEHLGMLHDDFLNPGSLECVRRVNQMADRYWDLYAGDSLDADLPGHLLRYPVTVTKEGTVTELPGAKFFPDTQALVLGALSKLPPILTT

SEQ ID NO: 7945 - protein, 154 aa, Zea mays subsp. mays
  peptide (1)..(154): Ceres Seq. ID no. 12351004
  misc_feature (1)..(27): Pfam Name: Phospholipase D. Active site motif Pfam Description: Phospholipase D. Active site motif
  misc_feature (1)..(154): Homolog of NCBI NO: 3914365 NR Description: Phospholipase D alpha 2 (PLD alpha 2) (Choline
  misc_feature (1)..(154): Homolog of NCBI NO: 8699600 NR Description: phospholipase D [Oryza sativa]
  misc_feature (1)..(154): Homolog of NCBI NO: 2499710 NR Description: Phospholipase D alpha 1 precursor (PLD 1) (Choline
  misc_feature (1)..(154): Homolog of NCBI NO: 7488899 NR Description: phospholipase D (EC 3.1.4.4) - castor bean
  misc_feature (1)..(154): Homolog of NCBI NO: 15219031 NR Description: phospholipase D, putative; protein id: [Arabidopsis thaliana] >gi|13124454|sp|Q9SSQ9|PDA2_ARATH
  misc_feature (1)..(153): Homolog of NCBI NO: 8699598 NR Description: phospholipase D [Oryza sativa]
  misc_feature (1)..(154): Homolog of NCBI NO: 4867805 NR Description: phospholipase D1 [Craterostigma plantagineum]
  misc_feature (1)..(154): Homolog of NCBI NO: 4867803 NR Description: phospholipase D2 [Craterostigma plantagineum]
  misc_feature (1)..(154): Homolog of NCBI NO: 13124446 NR Description: Phospholipase D alpha 2 precursor (PLD 2) (Choline
  misc_feature (1)..(154): Homolog of NCBI NO: 3914360 NR Description: Phospholipase D alpha 1 (PLD alpha 1) (Choline
MIYVHSKMMIVDDEYIIVGSANINQRSMDGGRDSEIAMGAYQPCHLNTKGQVARGQVHGFRMSLWYEHLGMLHDDFLNPGSLECVRRVNQMADRYWDLYAGDSLDADLPGHLLRYPVTVTKEGTVTELPGAKFFPDTQALVLGALSKLPPILTT

SEQ ID NO: 7946 - DNA, 1130 bp, Zea mays subsp. mays
  misc_feature (1)..(1130): Ceres Seq. ID no. 12388641
  misc_feature: MA Experiment ID: 108556 Result: Down-regulated in Transcription
  misc_feature: MA Experiment 108556 PARAMETER Experiment Name: Zm_Drought_P Parameter: Age (day) Value: 9
  misc_feature: MA Experiment 108556 PARAMETER Experiment Name: Zm_Drought_P Parameter: Organism Value: Zea mays
  misc_feature: MA Experiment 108556 PARAMETER Experiment Name: Zm_Drought_P Parameter: Plant Line Value: 35A19
  misc_feature: MA Experiment 108556 PARAMETER Experiment Name: Zm_Drought_P Parameter: Timepoint (hr) Value: 24
  misc_feature: MA Experiment 108556 PARAMETER Experiment Name: Zm_Drought_P Parameter: Tissue Value: Aerial
  misc_feature: MA Experiment 108556 PARAMETER Experiment Name: Zm_Drought_P Parameter: Treatment Value: Drought vs. No Drought
  misc_feature: MA Experiment ID: 20000478 Result: Down-regulated in Transcription
  misc_feature: MA Experiment 20000478 PARAMETER Experiment Name: Zm_5mM_SA_P Parameter: Age (day) Value: 11
  misc_feature: MA Experiment 20000478 PARAMETER Experiment Name: Zm_5mM_SA_P Parameter: Organism Value: Zea mays
  misc_feature: MA Experiment 20000478 PARAMETER Experiment Name: Zm_5mM_SA_P Parameter: Plant Line Value: 35A19
  misc_feature: MA Experiment 20000478 PARAMETER Experiment Name: Zm_5mM_SA_P Parameter: Timepoint (hr) Value: 72
  misc_feature: MA Experiment 20000478 PARAMETER Experiment Name: Zm_5mM_SA_P Parameter: Tissue Value: Aerial
  misc_feature: MA Experiment 20000478 PARAMETER Experiment Name: Zm_5mM_SA_P Parameter: Treatment Value: 5mM SA vs. No Treatment
  misc_feature: MA Experiment ID: 20000479 Result: Down-regulated in Transcription
  misc_feature: MA Experiment 20000479 PARAMETER Experiment Name: Zm_Drought_P Parameter: Age (day) Value: 10
  misc_feature: MA Experiment 20000479 PARAMETER Experiment Name: Zm_Drought_P Parameter: Organism Value: Zea mays
  misc_feature: MA Experiment 20000479 PARAMETER Experiment Name: Zm_Drought_P Parameter: Plant Line Value: 35A19
  misc_feature: MA Experiment 20000479 PARAMETER Experiment Name: Zm_Drought_P Parameter: Timepoint (hr) Value: 48
  misc_feature: MA Experiment 20000479 PARAMETER Experiment Name: Zm_Drought_P Parameter: Tissue Value: Aerial
  misc_feature: MA Experiment 20000479 PARAMETER Experiment Name: Zm_Drought_P Parameter: Treatment Value: Drought vs. No Drought
  misc_feature: MA Experiment ID: 20000480 Result: Down-regulated in Transcription
  misc_feature: MA Experiment 20000480 PARAMETER Experiment Name: Zm_Drought_P Parameter: Age (day) Value: 11
  misc_feature: MA Experiment 20000480 PARAMETER Experiment Name: Zm_Drought_P Parameter: Organism Value: Zea mays
  misc_feature: MA Experiment 20000480 PARAMETER Experiment Name: Zm_Drought_P Parameter: Plant Line Value: 35A19
  misc_feature: MA Experiment 20000480 PARAMETER Experiment Name: Zm_Drought_P Parameter: Timepoint (hr) Value: 72
  misc_feature: MA Experiment 20000480 PARAMETER Experiment Name: Zm_Drought_P Parameter: Tissue Value: Aerial
  misc_feature: MA Experiment 20000480 PARAMETER Experiment Name: Zm_Drought_P Parameter: Treatment Value: Drought vs. No Drought
aaatcttgttactgacaaactgaactttggggccatgaacatgtggtttttgctgaatccacctggggatgcaacaatccatgtggaaaatgttgatgacttcaaatggttaaactcttcttactgccctgttctgaagcagcttgagtctgcagccatgaaagaatattatttcaaggctgatcgtccgaaaacactctctgctggttcttctaatctgaagtatcgaaacccaaaatatttgtccatgctcaatcatctaagattttacctcccacaagtctatcccaagctgaataaaattcttttcctggatgatgatatagttgtccagagggacctaactggactctgggaggttgatcttaatggaaatgtaaatggagccgtggaaacatgtggagagagttttcaccgatttgataagtacctaaatttctcaaacccaaatattgctcagaattttgatcctaatgcatgtggttgggcttatggaatgaacatgtttgatctggaagaatggaagaagaaagacattactggaatttaccacaaatggcagaacatgaacgagaacaggctgctctggaaactggggacattgccaccagggcttctaactttttacaagctgacacaccctctggacaaatcatggcatgtgcttggcttagggtacaatccaaccattgagcgctcagagatagacaatgctgctgtcatccactacaatggtaacatgaagccctggctggaaattgcaatgataaagtatcggccttactggacaaagtacatcaattatcagcattcctacattcatggatgcaagatcagccaatagaaaccaccctcagatattcttctgtgatgaacattgaagttggatgggactcaaaatgaaatcagtataactatcacatgttctttattcgtgttatattagatttgttagttatcacgtgtatgtagtttcgtcgcccttttgtggtgctttctcccctagctcattgttggttcttgtccctttttgtcatgaaaagaatgatgagctctatgattctcatcagctgataaatgtaatgtctgaatttctgtcggtggcaaattaatgatcccattcaaacggc

SEQ ID NO: 7947 - protein, 280 aa, Zea mays subsp. mays
  peptide (1)..(280): Ceres Seq. ID no. 12388642
  misc_feature (1)..(280): Homolog of NCBI NO: 7271113 NR Description: 68 kDa protein [Cicer arietinum]
  misc_feature (1)..(280): Homolog of NCBI NO: 15233046 NR Description: putative protein; protein id: At3g61130.1, by cDNA: gi_14517361 [Arabidopsis thaliana]
  misc_feature (1)..(280): Homolog of NCBI NO: 7485958 NR Description: hypothetical protein F22I13.40 - Arabidopsis >gi|4539335|emb|CAB37483.1| putative protein [Arabidopsis >gi|7270811|emb|CAB80492.1| putative protein [Arabidopsis
  misc_feature (1)..(280): Homolog of NCBI NO: 30691875 NR Description: glycosyltransferase family 8 [Arabidopsis
  misc_feature (1)..(280): Homolog of NCBI NO: 37533460 NR Description: hypothetical protein [Oryza sativa (japonica group)] >gi|20279459|gb|AAM18739.1| hypothetical protein [Oryza
  misc_feature (1)..(279): Homolog of NCBI NO: 10177914 NR Description: emb|CAB71043.1~gene_id:MCA23.10~strong similarity
  misc_feature (1)..(279): Homolog of NCBI NO: 18422837 NR Description: putative protein; protein id: At5g47780.1, by cDNA: gi_15810326, supported by cDNA: gi_20259234 [Arabidopsis >gi|15810327|gb|AAL07051.1| unknown protein [Arabidopsis
  misc_feature (1)..(217): Homolog of NCBI NO: 14517362 NR Description: AT3g61130/T20K12_30 [Arabidopsis thaliana]
  misc_feature (1)..(279): Homolog of NCBI NO: 38423965 NR Description: putative glycosyltransferase [Oryza sativa
  misc_feature (1)..(276): Homolog of NCBI NO: 15230806 NR Description: glycosyl transferase, putative; protein id: supported by cDNA: gi_20466216 [Arabidopsis thaliana] Glycosyltransferase QUASIMODO1 >gi|9294170|dbj|BAB02072.1|
NLVTDKLNFGAMNMWFLLNPPGDATIHVENVDDFKWLNSSYCPVLKQLESAAMKEYYFKADRPKTLSAGSSNLKYRNPKYLSMLNHLRFYLPQVYPKLNKILFLDDDIVVQRDLTGLWEVDLNGNVNGAVETCGESFHRFDKYLNFSNPNIAQNFDPNACGWAYGMNMFDLEEWKKKDITGIYHKWQNMNENRLLWKLGTLPPGLLTFYKLTHPLDKSWHVLGLGYNPTIERSEIDNAAVIHYNGNMKPWLEIAMIKYRPYWTKYINYQHSYIHGCKISQ

SEQ ID NO: 7948 - protein, 269 aa, Zea mays subsp. mays
  peptide (1)..(269): Ceres Seq. ID no. 12388643
  misc_feature (1)..(269): Homolog of NCBI NO: 7271113 NR Description: 68 kDa protein [Cicer arietinum]
  misc_feature (1)..(269): Homolog of NCBI NO: 15233046 NR Description: putative protein; protein id: At3g61130.1, by cDNA: gi_14517361 [Arabidopsis thaliana]
  misc_feature (1)..(269): Homolog of NCBI NO: 7485958 NR Description: hypothetical protein F22I13.40 - Arabidopsis >gi|4539335|emb|CAB37483.1| putative protein [Arabidopsis >gi|7270811|emb|CAB80492.1| putative protein [Arabidopsis
  misc_feature (1)..(269): Homolog of NCBI NO: 30691875 NR Description: glycosyltransferase family 8 [Arabidopsis
  misc_feature (1)..(269): Homolog of NCBI NO: 37533460 NR Description: hypothetical protein [Oryza sativa (japonica group)] >gi|20279459|gb|AAM18739.1| hypothetical protein [Oryza
  misc_feature (1)..(268): Homolog of NCBI NO: 10177914 NR Description: emb|CAB71043.1~gene_id:MCA23.10~strong similarity
  misc_feature (1)..(268): Homolog of NCBI NO: 18422837 NR Description: putative protein; protein id: At5g47780.1, by cDNA: gi_15810326, supported by cDNA: gi_20259234 [Arabidopsis >gi|15810327|gb|AAL07051.1| unknown protein [Arabidopsis
  misc_feature (1)..(206): Homolog of NCBI NO: 14517362 NR Description: AT3g61130/T20K12_30 [Arabidopsis thaliana]
  misc_feature (1)..(268): Homolog of NCBI NO: 38423965 NR Description: putative glycosyltransferase [Oryza sativa
  misc_feature (1)..(265): Homolog of NCBI NO: 15230806 NR Description: glycosyl transferase, putative; protein id: supported by cDNA: gi_20466216 [Arabidopsis thaliana] Glycosyltransferase QUASIMODO1 >gi|9294170|dbj|BAB02072.1|
MNMWFLLNPPGDATIHVENVDDFKWLNSSYCPVLKQLESAAMKEYYFKADRPKTLSAGSSNLKYRNPKYLSMLNHLRFYLPQVYPKLNKILFLDDDIVVQRDLTGLWEVDLNGNVNGAVETCGESFHRFDKYLNFSNPNIAQNFDPNACGWAYGMNMFDLEEWKKKDITGIYHKWQNMNENRLLWKLGTLPPGLLTFYKLTHPLDKSWHVLGLGYNPTIERSEIDNAAVIHYNGNMKPWLEIAMIKYRPYWTKYINYQHSYIHGCKISQ

SEQ ID NO: 7949 - protein, 267 aa, Zea mays subsp. mays
  peptide (1)..(267): Ceres Seq. ID no. 12388644
  misc_feature (1)..(267): Homolog of NCBI NO: 7271113 NR Description: 68 kDa protein [Cicer arietinum]
  misc_feature (1)..(267): Homolog of NCBI NO: 15233046 NR Description: putative protein; protein id: At3g61130.1, by cDNA: gi_14517361 [Arabidopsis thaliana]
  misc_feature (1)..(267): Homolog of NCBI NO: 7485958 NR Description: hypothetical protein F22I13.40 - Arabidopsis >gi|4539335|emb|CAB37483.1| putative protein [Arabidopsis >gi|7270811|emb|CAB80492.1| putative protein [Arabidopsis
  misc_feature (1)..(267): Homolog of NCBI NO: 30691875 NR Description: glycosyltransferase family 8 [Arabidopsis
  misc_feature (1)..(267): Homolog of NCBI NO: 37533460 NR Description: hypothetical protein [Oryza sativa (japonica group)] >gi|20279459|gb|AAM18739.1| hypothetical protein [Oryza
  misc_feature (1)..(266): Homolog of NCBI NO: 10177914 NR Description: emb|CAB71043.1~gene_id:MCA23.10~strong similarity
  misc_feature (1)..(266): Homolog of NCBI NO: 18422837 NR Description: putative protein; protein id: At5g47780.1, by cDNA: gi_15810326, supported by cDNA: gi_20259234 [Arabidopsis >gi|15810327|gb|AAL07051.1| unknown protein [Arabidopsis
  misc_feature (1)..(204): Homolog of NCBI NO: 14517362 NR Description: AT3g61130/T20K12_30 [Arabidopsis thaliana]
  misc_feature (1)..(266): Homolog of NCBI NO: 38423965 NR Description: putative glycosyltransferase [Oryza sativa
  misc_feature (1)..(263): Homolog of NCBI NO: 15230806 NR Description: glycosyl transferase, putative; protein id: supported by cDNA: gi_20466216 [Arabidopsis thaliana] Glycosyltransferase QUASIMODO1 >gi|9294170|dbj|BAB02072.1|
MWFLLNPPGDATIHVENVDDFKWLNSSYCPVLKQLESAAMKEYYFKADRPKTLSAGSSNLKYRNPKYLSMLNHLRFYLPQVYPKLNKILFLDDDIVVQRDLTGLWEVDLNGNVNGAVETCGESFHRFDKYLNFSNPNIAQNFDPNACGWAYGMNMFDLEEWKKKDITGIYHKWQNMNENRLLWKLGTLPPGLLTFYKLTHPLDKSWHVLGLGYNPTIERSEIDNAAVIHYNGNMKPWLEIAMIKYRPYWTKYINYQHSYIHGCKISQ

SEQ ID NO: 7950 - DNA, 767 bp, Zea mays subsp. mays
  misc_feature (1)..(767): Ceres Seq. ID no. 12353983
  misc_feature: MA Experiment ID: 108515 Result: Down-regulated in Transcription
  misc_feature: MA Experiment 108515 PARAMETER Experiment Name: Zm_2mM_SA_P Parameter: Age (day) Value: 8
  misc_feature: MA Experiment 108515 PARAMETER Experiment Name: Zm_2mM_SA_P Parameter: Organism Value: Zea mays
  misc_feature: MA Experiment 108515 PARAMETER Experiment Name: Zm_2mM_SA_P Parameter: Plant Line Value: 35A19
  misc_feature: MA Experiment 108515 PARAMETER Experiment Name: Zm_2mM_SA_P Parameter: Timepoint (hr) Value: 12
  misc_feature: MA Experiment 108515 PARAMETER Experiment Name: Zm_2mM_SA_P Parameter: Tissue Value: Aerial
  misc_feature: MA Experiment 108515 PARAMETER Experiment Name: Zm_2mM_SA_P Parameter: Treatment Value: 2mM SA vs. No Treatment
  misc_feature: MA Experiment ID: 108528 Result: Up-regulated in Transcription
  misc_feature: MA Experiment 108528 PARAMETER Experiment Name: Zm_Imbibed_Seeds_P Parameter: Age (day) Value: 5 vs. 2
  misc_feature: MA Experiment 108528 PARAMETER Experiment Name: Zm_Imbibed_Seeds_P Parameter: Organism Value: Zea mays
  misc_feature: MA Experiment 108528 PARAMETER Experiment Name: Zm_Imbibed_Seeds_P Parameter: Plant Line Value: 35A19
  misc_feature: MA Experiment 108528 PARAMETER Experiment Name: Zm_Imbibed_Seeds_P Parameter: Tissue Value: Aerial vs. Embryo
  misc_feature: MA Experiment ID: 108529 Result: Down-regulated in Transcription
  misc_feature: MA Experiment 108529 PARAMETER Experiment Name: Zm_Imbibed_Seeds_P Parameter: Age (day) Value: 5 vs. 2
  misc_feature: MA Experiment 108529 PARAMETER Experiment Name: Zm_Imbibed_Seeds_P Parameter: Organism Value: Zea mays
  misc_feature: MA Experiment 108529 PARAMETER Experiment Name: Zm_Imbibed_Seeds_P Parameter: Plant Line Value: 35A19
  misc_feature: MA Experiment 108529 PARAMETER Experiment Name: Zm_Imbibed_Seeds_P Parameter: Tissue Value: Roots vs. Embryo
  misc_feature: MA Experiment ID: 108530 Result: Up-regulated in Transcription
  misc_feature: MA Experiment 108530 PARAMETER Experiment Name: Zm_Imbibed_Seeds_P Parameter: Age (day) Value: 6 vs. 2
  misc_feature: MA Experiment 108530 PARAMETER Experiment Name: Zm_Imbibed_Seeds_P Parameter: Organism Value: Zea mays
  misc_feature: MA Experiment 108530 PARAMETER Experiment Name: Zm_Imbibed_Seeds_P Parameter: Plant Line Value: 35A19
  misc_feature: MA Experiment 108530 PARAMETER Experiment Name: Zm_Imbibed_Seeds_P Parameter: Tissue Value: Aerial vs. Embryo
  misc_feature: MA Experiment ID: 108536 Result: Down-regulated in Transcription
  misc_feature: MA Experiment 108536 PARAMETER Experiment Name: Zm_Meristem_P Parameter: Age (day) Value: 8
  misc_feature: MA Experiment 108536 PARAMETER Experiment Name: Zm_Meristem_P Parameter: Organism Value: Zea mays
  misc_feature: MA Experiment 108536 PARAMETER Experiment Name: Zm_Meristem_P Parameter: Plant Line Value: 35A19
  misc_feature: MA Experiment 108536 PARAMETER Experiment Name: Zm_Meristem_P Parameter: Tissue Value: Shoot Meristem vs. Above Shoot Meristem
  misc_feature: MA Experiment ID: 108543 Result: Up-regulated in Transcription
  misc_feature: MA Experiment ID: 108545 Result: Up-regulated in Transcription
  misc_feature: MA Experiment 108545 PARAMETER Experiment Name: Zm_Imbibed_Seeds_P Parameter: Age (day) Value: 3 vs. 2
  misc_feature: MA Experiment 108545 PARAMETER Experiment Name: Zm_Imbibed_Seeds_P Parameter: Organism Value: Zea mays
  misc_feature: MA Experiment 108545 PARAMETER Experiment Name: Zm_Imbibed_Seeds_P Parameter: Plant Line Value: 35A19
  misc_feature: MA Experiment 108545 PARAMETER Experiment Name: Zm_Imbibed_Seeds_P Parameter: Tissue Value: Aerial vs. Embryo
  misc_feature: MA Experiment ID: 108546 Result: Down-regulated in Transcription
  misc_feature: MA Experiment 108546 PARAMETER Experiment Name: Zm_Imbibed_Seeds_P Parameter: Age (day) Value: 3 vs. 2
  misc_feature: MA Experiment 108546 PARAMETER Experiment Name: Zm_Imbibed_Seeds_P Parameter: Organism Value: Zea mays
  misc_feature: MA Experiment 108546 PARAMETER Experiment Name: Zm_Imbibed_Seeds_P Parameter: Plant Line Value: 35A19
  misc_feature: MA Experiment 108546 PARAMETER Experiment Name: Zm_Imbibed_Seeds_P Parameter: Tissue Value: Roots vs. Embryo
  misc_feature: MA Experiment ID: 108547 Result: Up-regulated in Transcription
  misc_feature: MA Experiment 108547 PARAMETER Experiment Name: Zm_Imbibed_Seeds_P Parameter: Age (day) Value: 4 vs. 2
  misc_feature: MA Experiment 108547 PARAMETER Experiment Name: Zm_Imbibed_Seeds_P Parameter: Organism Value: Zea mays
  misc_feature: MA Experiment 108547 PARAMETER Experiment Name: Zm_Imbibed_Seeds_P Parameter: Plant Line Value: 35A19
  misc_feature: MA Experiment 108547 PARAMETER Experiment Name: Zm_Imbibed_Seeds_P Parameter: Tissue Value: Aerial vs. Embryo
  misc_feature: MA Experiment ID: 108687 Result: Down-regulated in Transcription
  misc_feature: MA Experiment 108687 PARAMETER Experiment Name: Zm_Embryos-Flowers__P Parameter: Tissue Value: Embryo vs. Aerial+
  misc_feature: MA Experiment ID: 20000492 Result: Down-regulated in Transcription
  misc_feature: MA Experiment 20000492 PARAMETER Experiment Name: Zm_Hybrid_Seed_Dev_P Parameter: DAP Value: 12
  misc_feature: MA Experiment 20000492 PARAMETER Experiment Name: Zm_Hybrid_Seed_Dev_P Parameter: Organism Value: Zea mays
  misc_feature: MA Experiment 20000492 PARAMETER Experiment Name: Zm_Hybrid_Seed_Dev_P Parameter: Plant Line Value: 35A19
  misc_feature: MA Experiment 20000492 PARAMETER Experiment Name: Zm_Hybrid_Seed_Dev_P Parameter: Tissue Value: Fert Kernel vs. Unfert Floret
  misc_feature: MA Experiment ID: 20000626 Result: Down-regulated in Transcription
  misc_feature: MA Experiment 20000626 PARAMETER Experiment Name: Zm_Herbicide-Treatments_P Parameter: Timepoint (hr) Value: 12
  misc_feature: MA Experiment 20000626 PARAMETER Experiment Name: Zm_Herbicide-Treatments_P Parameter: Tissue Value: Aerial
  misc_feature: MA Experiment 20000626 PARAMETER Experiment Name: Zm_Herbicide-Treatments_P Parameter: Treatment Value: Roundup vs. No Treatment
aataacggagacgaagagagcagaagcgaagagcagcggcgcaaaggaaagggagccatgctcgcctcgccggcgctcgccggcgcccactccttcgcggcgtccgtgtatggaaacatcctcgtcccctcgcctcccgtccccgcgccggcacgtcgcgcggcgctgtccgtcgtcgccaaggtcaaggtggccactccccaggacgaccgcatcgcccgccacgtccgcctccgcaagaaggtaagtggcaccactgagaggccgaggttgagtgttttccgctcaaacaaacatctgtacgctcaagtcatcgacgacacaaagcaatgtactctggcttcagcttcaaccatgcacaaatctctctccaaggaatttgaatactcagctgggccaacgatcgaaatagcacaaaagatcggtgaggtgattgccaagtcttgcttggagaaagggatcaacaaggttgtcttcgaccgaggtggtttcctctaccatggccgcataaaggctctcgctgattctgccagggagcacgggcttgaattctgagtcgtccaggcgtttgttcatatctccaggatcacctgtaatcttcttttttttttctctccatatgccgaacagattgtagtcactcgccttgttctgcatggtgcaaagccatggccactcgttgaccatgtcacgttttttttccatttcgtaagagtcttgtgttctgacgtttatgaggacatatcatgtgcaatcactcattttgg

SEQ ID NO: 7951 - protein, 184 aa, Zea mays subsp. mays
  peptide (1)..(184): Ceres Seq. ID no. 12353984
  misc_feature (66)..(184): Pfam Name: Ribosomal L18p/L5e family Pfam Description: Ribosomal L18p/L5e family
  misc_feature (20)..(184): Homolog of NCBI NO: 34897318 NR Description: putative ribosomal protein L18 [Oryza sativa]
  misc_feature (57)..(184): Homolog of NCBI NO: 15221153 NR Description: ribosomal protein L18, putative; protein id: supported by cDNA: gi_12484208 [Arabidopsis thaliana] hypothetical protein F11A17.10 [imported] ESTs gb|AI993387,
  misc_feature (71)..(184): Homolog of NCBI NO: 132724 NR Description: 50S RIBOSOMAL PROTEIN L18 >gi|71259|pir||R5BS8F
  misc_feature (71)..(184): Homolog of NCBI NO: 143423 NR Description: ribosomal protein L18
  misc_feature (71)..(184): Homolog of NCBI NO: 1172978 NR Description: 50S ribosomal protein L18
  misc_feature (71)..(184): Homolog of NCBI NO: 16077200 NR Description: ribosomal protein L18 [Bacillus subtilis]
  misc_feature (62)..(184): Homolog of NCBI NO: 15644232 NR Description: ribosomal protein L18 [Thermotoga maritima]
  misc_feature (66)..(184): Homolog of NCBI NO: 23042783 NR Description: hypothetical protein [Trichodesmium erythraeum
  misc_feature (62)..(184): Homolog of NCBI NO: 3980238 NR Description: ribosomal protein L18 [Thermotoga maritima]
  misc_feature (71)..(184): Homolog of NCBI NO: 21398084 NR Description: Ribosomal_L18p, Ribosomal L18p/L5e family
NNGDEESRSEEQRRKGKGAMLASPALAGAHSFAASVYGNILVPSPPVPAPARRAALSVVAKVKVATPQDDRIARHVRLRKKVSGTTERPRLSVFRSNKHLYAQVIDDTKQCTLASASTMHKSLSKEFEYSAGPTIEIAQKIGEVIAKSCLEKGINKVVFDRGGFLYHGRIKALADSAREHGLEF

SEQ ID NO: 7952 - protein, 165 aa, Zea mays subsp. mays
  peptide (1)..(165): Ceres Seq. ID no. 12353985
  misc_feature (47)..(165): Pfam Name: Ribosomal L18p/L5e family Pfam Description: Ribosomal L18p/L5e family
  misc_feature (1)..(165): Homolog of NCBI NO: 34897318 NR Description: putative ribosomal protein L18 [Oryza sativa]
  misc_feature (38)..(165): Homolog of NCBI NO: 15221153 NR Description: ribosomal protein L18, putative; protein id: supported by cDNA: gi_12484208 [Arabidopsis thaliana] hypothetical protein F11A17.10 [imported] ESTs gb|AI993387,
  misc_feature (52)..(165): Homolog of NCBI NO: 132724 NR Description: 50S RIBOSOMAL PROTEIN L18 >gi|71259|pir||R5BS8F
  misc_feature (52)..(165): Homolog of NCBI NO: 143423 NR Description: ribosomal protein L18
  misc_feature (52)..(165): Homolog of NCBI NO: 1172978 NR Description: 50S ribosomal protein L18
  misc_feature (52)..(165): Homolog of NCBI NO: 16077200 NR Description: ribosomal protein L18 [Bacillus subtilis]
  misc_feature (43)..(165): Homolog of NCBI NO: 15644232 NR Description: ribosomal protein L18 [Thermotoga maritima]
  misc_feature (47)..(165): Homolog of NCBI NO: 23042783 NR Description: hypothetical protein [Trichodesmium erythraeum
  misc_feature (43)..(165): Homolog of NCBI NO: 3980238 NR Description: ribosomal protein L18 [Thermotoga maritima]
  misc_feature (52)..(165): Homolog of NCBI NO: 21398084 NR Description: Ribosomal_L18p, Ribosomal L18p/L5e family
MLASPALAGAHSFAASVYGNILVPSPPVPAPARRAALSVVAKVKVATPQDDRIARHVRLRKKVSGTTERPRLSVFRSNKHLYAQVIDDTKQCTLASASTMHKSLSKEFEYSAGPTIEIAQKIGEVIAKSCLEKGINKVVFDRGGFLYHGRIKALADSAREHGLEF

SEQ ID NO: 7953 - DNA, 847 bp, Zea mays subsp. mays
  misc_feature (1)..(847): Ceres Seq. ID no. 12344815
  misc_feature: MA Experiment ID: 108534 Result: Up-regulated in Transcription
  misc_feature: MA Experiment 108534 PARAMETER Experiment Name: Zm_4deg_Cold_P Parameter: Age (hr) Value: 8
  misc_feature: MA Experiment 108534 PARAMETER Experiment Name: Zm_4deg_Cold_P Parameter: Organism Value: Zea mays
  misc_feature: MA Experiment 108534 PARAMETER Experiment Name: Zm_4deg_Cold_P Parameter: Plant Line Value: 35A19
  misc_feature: MA Experiment 108534 PARAMETER Experiment Name: Zm_4deg_Cold_P Parameter: Temperature (deg C) Value: 4 vs. 22
  misc_feature: MA Experiment 108534 PARAMETER Experiment Name: Zm_4deg_Cold_P Parameter: Timepoint (hr) Value: 6
  misc_feature: MA Experiment 108534 PARAMETER Experiment Name: Zm_4deg_Cold_P Parameter: Tissue Value: Aerial
  misc_feature: MA Experiment ID: 20000535 Result: Down-regulated in Transcription
  misc_feature: MA Experiment 20000535 PARAMETER Experiment Name: Zm_Hybrid_Seed_Dev_P Parameter: DAP Value: 30 vs. 12
  misc_feature: MA Experiment 20000535 PARAMETER Experiment Name: Zm_Hybrid_Seed_Dev_P Parameter: Organism Value: Zea mays
  misc_feature: MA Experiment 20000535 PARAMETER Experiment Name: Zm_Hybrid_Seed_Dev_P Parameter: Plant Line Value: 35A19
  misc_feature: MA Experiment 20000535 PARAMETER Experiment Name: Zm_Hybrid_Seed_Dev_P Parameter: Tissue Value: Embryo vs. Unfert Floret
  misc_feature: MA Experiment ID: 20000629 Result: Down-regulated in Transcription
  misc_feature: MA Experiment 20000629 PARAMETER Experiment Name: Zm_Herbicide-Treatments_P Parameter: Timepoint (hr) Value: 12
  misc_feature: MA Experiment 20000629 PARAMETER Experiment Name: Zm_Herbicide-Treatments_P Parameter: Tissue Value: Aerial
  misc_feature: MA Experiment 20000629 PARAMETER Experiment Name: Zm_Herbicide-Treatments_P Parameter: Treatment Value: Trimec vs. No Treatment
agagcttgcaaacaccaccagcgaaaacgtcgtggccagccatcccggtgtcgtctcgcgttctacagcctctgcatcccgcgttctacagccaccgctgtcgtcgccgtcctagactcctagatccgtcagcttaacgagctccattccttcgaggccagccatcccggtgtctcagcagcggcggcggcggcgtcgagctcttgctttctgtgggaggacgcatggcgatgtctgcggggcgtgggctcttggtcctcttcttctctgccgccgtagtggctgagctcgcctctgccgcgaacggtcctttcctgtccgatagcgtcttccagtcgagcgccggatctacagggaggagcttgctgcaggtcaagaatagttgccctgtgaactttgagttccaaaactacacaatcatcacaagcaagtgcaaaggaccgaagtttccagccagccaatgctgtgccgcactcaaggaattcgcgtgcccttttaacaattacctcaatgacgagagcaatgaatgtgcatcgacaatgttcagctacatcaacctctatggcaagtatccaccaggtctgttttccagcgagtgcaaagaaggcaagatggggctttcttgcgcagatgtcccccggaaggacagttccactgcaaacagtggttatcgcgcccaaagcagcttgcttgcgttgattaatgtcttgagtgtgatagcagcgttgttctactgaactacagctccattcatttcccacaaagatggtgtgttacaactgttgaggcttgagttgcaccttttggtgcttatggctatgggttggcttcctgattctttcttttg

SEQ ID NO: 7954 - protein, 170 aa, Zea mays subsp. mays
  peptide (1)..(170): Ceres Seq. ID no. 12344816
  misc_feature (12)..(169): Homolog of NCBI NO: 15241141 NR Description: putative protein; protein id: At5g56170.1
  misc_feature (1)..(165): Homolog of NCBI NO: 3868853 NR Description: GPI-anchored protein [Vigna radiata]
  misc_feature (27)..(169): Homolog of NCBI NO: 30681101 NR Description: expressed protein [Arabidopsis thaliana]
  misc_feature (22)..(162): Homolog of NCBI NO: 15235244 NR Description: putative GPI-anchored protein; protein id:
  misc_feature (50)..(169): Homolog of NCBI NO: 25337807 NR Description: hypothetical protein At2g20700 [imported] - thaliana >gi|4454478|gb|AAD20925.1| hypothetical protein
  misc_feature (50)..(162): Homolog of NCBI NO: 38603910 NR Description: At4g28280 [Arabidopsis thaliana]
  misc_feature (9)..(134): Homolog of NCBI NO: 10241671 NR Description: hypothetical protein [Oryza sativa (indica
  misc_feature (15)..(134): Homolog of NCBI NO: 38345028 NR Description: OSJNBa0029H02.12 [Oryza sativa (japonica
  misc_feature (20)..(134): Homolog of NCBI NO: 10241672 NR Description: hypothetical protein [Oryza sativa (indica
  misc_feature (20)..(134): Homolog of NCBI NO: 38345027 NR Description: OSJNBa0029H02.11 [Oryza sativa (japonica
MAMSAGRGLLVLFFSAAVVAELASAANGPFLSDSVFQSSAGSTGRSLLQVKNSCPVNFEFQNYTIITSKCKGPKFPASQCCAALKEFACPFNNYLNDESNECASTMFSYINLYGKYPPGLFSSECKEGKMGLSCADVPRKDSSTANSGYRAQSSLLALINVLSVIAALFY

SEQ ID NO: 7955 - protein, 168 aa, Zea mays subsp. mays
  peptide (1)..(168): Ceres Seq. ID no. 12344817
  misc_feature (10)..(167): Homolog of NCBI NO: 15241141 NR Description: putative protein; protein id: At5g56170.1
  misc_feature (1)..(163): Homolog of NCBI NO: 3868853 NR Description: GPI-anchored protein [Vigna radiata]
  misc_feature (25)..(167): Homolog of NCBI NO: 30681101 NR Description: expressed protein [Arabidopsis thaliana]
  misc_feature (20)..(160): Homolog of NCBI NO: 15235244 NR Description: putative GPI-anchored protein; protein id:
  misc_feature (48)..(167): Homolog of NCBI NO: 25337807 NR Description: hypothetical protein At2g20700 [imported] - thaliana >gi|4454478|gb|AAD20925.1| hypothetical protein
  misc_feature (48)..(160): Homolog of NCBI NO: 38603910 NR Description: At4g28280 [Arabidopsis thaliana]
  misc_feature (7)..(132): Homolog of NCBI NO: 10241671 NR Description: hypothetical protein [Oryza sativa (indica
  misc_feature (13)..(132): Homolog of NCBI NO: 38345028 NR Description: OSJNBa0029H02.12 [Oryza sativa (japonica
  misc_feature (18)..(132): Homolog of NCBI NO: 10241672 NR Description: hypothetical protein [Oryza sativa (indica
  misc_feature (18)..(132): Homolog of NCBI NO: 38345027 NR Description: OSJNBa0029H02.11 [Oryza sativa (japonica
MSAGRGLLVLFFSAAVVAELASAANGPFLSDSVFQSSAGSTGRSLLQVKNSCPVNFEFQNYTIITSKCKGPKFPASQCCAALKEFACPFNNYLNDESNECASTMFSYINLYGKYPPGLFSSECKEGKMGLSCADVPRKDSSTANSGYRAQSSLLALINVLSVIAALFY

SEQ ID NO: 7956 - DNA, 720 bp, Zea mays subsp. mays
  misc_feature (1)..(720): Ceres Seq. ID no. 12402889
  misc_feature: MA Experiment ID: 108527 Result: Up-regulated in Transcription
  misc_feature: MA Experiment 108527 PARAMETER Experiment Name: Zm_5mM_NO_P Parameter: Age (day) Value: 8
  misc_feature: MA Experiment 108527 PARAMETER Experiment Name: Zm_5mM_NO_P Parameter: Organism Value: Zea mays
  misc_feature: MA Experiment 108527 PARAMETER Experiment Name: Zm_5mM_NO_P Parameter: Plant Line Value: 35A19
  misc_feature: MA Experiment 108527 PARAMETER Experiment Name: Zm_5mM_NO_P Parameter: Timepoint (hr) Value: 6
  misc_feature: MA Experiment 108527 PARAMETER Experiment Name: Zm_5mM_NO_P Parameter: Tissue Value: Aerial
  misc_feature: MA Experiment 108527 PARAMETER Experiment Name: Zm_5mM_NO_P Parameter: Treatment Value: 5mM NO vs. No Treatment
  misc_feature: MA Experiment ID: 108536 Result: Down-regulated in Transcription
  misc_feature: MA Experiment 108536 PARAMETER Experiment Name: Zm_Meristem_P Parameter: Age (day) Value: 8
  misc_feature: MA Experiment 108536 PARAMETER Experiment Name: Zm_Meristem_P Parameter: Organism Value: Zea mays
  misc_feature: MA Experiment 108536 PARAMETER Experiment Name: Zm_Meristem_P Parameter: Plant Line Value: 35A19
  misc_feature: MA Experiment 108536 PARAMETER Experiment Name: Zm_Meristem_P Parameter: Tissue Value: Shoot Meristem vs. Above Shoot Meristem
  misc_feature: MA Experiment ID: 108542 Result: Up-regulated in Transcription
  misc_feature: MA Experiment 108542 PARAMETER Experiment Name: Zm_150mM_NaCl_P Parameter: Age (day) Value: 8
  misc_feature: MA Experiment 108542 PARAMETER Experiment Name: Zm_150mM_NaCl_P Parameter: Organism Value: Zea mays
  misc_feature: MA Experiment 108542 PARAMETER Experiment Name: Zm_150mM_NaCl_P Parameter: Plant Line Value: 35A19
  misc_feature: MA Experiment 108542 PARAMETER Experiment Name: Zm_150mM_NaCl_P Parameter: Timepoint (hr) Value: 6
  misc_feature: MA Experiment 108542 PARAMETER Experiment Name: Zm_150mM_NaCl_P Parameter: Tissue Value: Aerial
  misc_feature: MA Experiment 108542 PARAMETER Experiment Name: Zm_150mM_NaCl_P Parameter: Treatment Value: 150mM NaCl vs. No Treatment
  misc_feature: MA Experiment ID: 108543 Result: Up-regulated in Transcription
  misc_feature: MA Experiment ID: 108544 Result: Up-regulated in Transcription
  misc_feature: MA Experiment ID: 108547 Result: Down-regulated in Transcription
  misc_feature: MA Experiment 108547 PARAMETER Experiment Name: Zm_Imbibed_Seeds_P Parameter: Age (day) Value: 4 vs. 2
  misc_feature: MA Experiment 108547 PARAMETER Experiment Name: Zm_Imbibed_Seeds_P Parameter: Organism Value: Zea mays
  misc_feature: MA Experiment 108547 PARAMETER Experiment Name: Zm_Imbibed_Seeds_P Parameter: Plant Line Value: 35A19
  misc_feature: MA Experiment 108547 PARAMETER Experiment Name: Zm_Imbibed_Seeds_P Parameter: Tissue Value: Aerial vs. Embryo
  misc_feature: MA Experiment ID: 108597 Result: Up-regulated in Transcription
  misc_feature: MA Experiment 108597 PARAMETER Experiment Name: Zm_100uM_ABA_P Parameter: Age (day) Value: 9
  misc_feature: MA Experiment 108597 PARAMETER Experiment Name: Zm_100uM_ABA_P Parameter: Organism Value: Zea mays
  misc_feature: MA Experiment 108597 PARAMETER Experiment Name: Zm_100uM_ABA_P Parameter: Plant Line Value: 35A19
  misc_feature: MA Experiment 108597 PARAMETER Experiment Name: Zm_100uM_ABA_P Parameter: Timepoint (hr) Value: 24
  misc_feature: MA Experiment 108597 PARAMETER Experiment Name: Zm_100uM_ABA_P Parameter: Tissue Value: Aerial
  misc_feature: MA Experiment 108597 PARAMETER Experiment Name: Zm_100uM_ABA_P Parameter: Treatment Value: 100uM ABA vs. No Treatment
  misc_feature: MA Experiment ID: 108687 Result: Up-regulated in Transcription
  misc_feature: MA Experiment 108687 PARAMETER Experiment Name: Zm_Embryos-Flowers__P Parameter: Tissue Value: Embryo vs. Aerial+
  misc_feature: MA Experiment ID: 20000488 Result: Down-regulated in Transcription
  misc_feature: MA Experiment 20000488 PARAMETER Experiment Name: Zm_50mM_NH4NO3_L_to_H_P Parameter: Organism Value: Zea mays
  misc_feature: MA Experiment 20000488 PARAMETER Experiment Name: Zm_50mM_NH4NO3_L_to_H_P Parameter: Timepoint (hr) Value: 8
  misc_feature: MA Experiment 20000488 PARAMETER Experiment Name: Zm_50mM_NH4NO3_L_to_H_P Parameter: Tissue Value: Leaves
  misc_feature: MA Experiment 20000488 PARAMETER Experiment Name: Zm_50mM_NH4NO3_L_to_H_P Parameter: Treatment Value: 50mM NH4NO3 vs. 100mM Mannitol
  misc_feature: MA Experiment ID: 20000535 Result: Up-regulated in Transcription
  misc_feature: MA Experiment 20000535 PARAMETER Experiment Name: Zm_Hybrid_Seed_Dev_P Parameter: DAP Value: 30 vs. 12
  misc_feature: MA Experiment 20000535 PARAMETER Experiment Name: Zm_Hybrid_Seed_Dev_P Parameter: Organism Value: Zea mays
  misc_feature: MA Experiment 20000535 PARAMETER Experiment Name: Zm_Hybrid_Seed_Dev_P Parameter: Plant Line Value: 35A19
  misc_feature: MA Experiment 20000535 PARAMETER Experiment Name: Zm_Hybrid_Seed_Dev_P Parameter: Tissue Value: Embryo vs. Unfert Floret
ctcctgttcccgtccaaagtgtggcgttgtcacttgttgtcaggctaccggaccaaactgcgtgctccggcctccgtgagaggagagagggtagagccagaggagttgggcgcgcagcaggatgagcggggaggaggccgacggctccaagccccaaggaggcggtgtacactacggcaccttccaggggccgcccagctacccgcccccgcgcccgccgccgagcctctccgcccaccaccgcggcgactaccaggccgttcccgctcgagattacgaggcaggtgtgcggggacgtagccatgatcgacttccctgttgtggcattggttttggatggttcctgttcatagtcggtttcttccttggtgccattccctggtacgttggagcctttctgctgtgctgttccagagttgattacagggagaaaccaggttatgtcgcatgtgttgcagcggctatcctcgctacaattgctgttatcattggggcggcagctggaactcatgttctttgattttttttagcttacaaggctatcctcccaaactagcccttactgttatcatttgggcggcagctggaagtggaagtggaactcatgttttttttagcttacattgtattgtcattgtacatacatacagtagtacatggtgtccatgtgtcgaagaaatcgtgcaatcaacatcgtaatggatgtctgttctgcattcg

SEQ ID NO: 7957 - protein, 132 aa, Zea mays subsp. mays
  peptide (1)..(132): Ceres Seq. ID no. 12402890
  misc_feature (18)..(128): Homolog of NCBI NO: 18394436 NR Description: expressed protein; protein id: At1g17080.1, by cDNA: gi_15010587, supported by cDNA: gi_20453322 [Arabidopsis
  misc_feature (25)..(131): Homolog of NCBI NO: 21554011 NR Description: unknown [Arabidopsis thaliana]
  misc_feature (25)..(131): Homolog of NCBI NO: 18404524 NR Description: expressed protein; protein id: At1g53560.1, by cDNA: 19263., supported by cDNA: gi_20466665 [Arabidopsis >gi|25372875|pir||F96575 hypothetical protein F22G10.10
  misc_feature (21)..(131): Homolog of NCBI NO: 18400450 NR Description: Expressed protein; protein id: At3g14595.1,
  misc_feature (21)..(131): Homolog of NCBI NO: 21554784 NR Description: unknown [Arabidopsis thaliana]
  misc_feature (14)..(131): Homolog of NCBI NO: 18397305 NR Description: 60S ribosomal protein L18A, putative; protein id:
  misc_feature (14)..(131): Homolog of NCBI NO: 21593837 NR Description: 60S ribosomal protein L18A, putative [Arabidopsis
  misc_feature (14)..(113): Homolog of NCBI NO: 25518134 NR Description: probable 60S ribosomal protein L18A - Arabidopsis >gi|12324168|gb|AAG52055.1|AC022455_9 60S ribosomal protein L18A,
MSGEEADGSKPQGGGVHYGTFQGPPSYPPPRPPPSLSAHHRGDYQAVPARDYEAGVRGRSHDRLPCCGIGFGWFLFIVGFFLGAIPWYVGAFLLCCSRVDYREKPGYVACVAAAILATIAVIIGAAAGTHVL

SEQ ID NO: 7958 - protein, 99 aa, Zea mays subsp. mays
  peptide (1)..(99): Ceres Seq. ID no. 12402891
LLFPSKVWRCHLLSGYRTKLRAPASVRGERVEPEELGAQQDERGGGRRLQAPRRRCTLRHLPGAAQLPAPAPAAEPLRPPPRRLPGRSRSRLRGRCAGT

SEQ ID NO: 7959 - protein, 83 aa, Zea mays subsp. mays
  peptide (1)..(83): Ceres Seq. ID no. 12402892
MCCSGYPRYNCCYHWGGSWNSCSLIFFSLQGYPPKLALTVIIWAAAGSGSGTHVFFSLHCIVIVHTYSSTWCPCVEEIVQSTS

SEQ ID NO: 7960 - DNA, 946 bp, Zea mays subsp. mays
  misc_feature (1)..(946): Ceres Seq. ID no. 13493291
  misc_feature: MA Experiment ID: 20000492 Result: Up-regulated in Transcription
  misc_feature: MA Experiment 20000492 PARAMETER Experiment Name: Zm_Hybrid_Seed_Dev_P Parameter: DAP Value: 12
  misc_feature: MA Experiment 20000492 PARAMETER Experiment Name: Zm_Hybrid_Seed_Dev_P Parameter: Organism Value: Zea mays
  misc_feature: MA Experiment 20000492 PARAMETER Experiment Name: Zm_Hybrid_Seed_Dev_P Parameter: Plant Line Value: 35A19
  misc_feature: MA Experiment 20000492 PARAMETER Experiment Name: Zm_Hybrid_Seed_Dev_P Parameter: Tissue Value: Fert Kernel vs. Unfert Floret
aaggcccagatcaaaagaaaagagcagcggagcggagcatgctcttcctccggtgccagcctcgcgtctcgtccccgtccgcatccgcgtccgcgccgccttttcgtccccgcgtcggcgtcgcggctccactgggcgtacgcgtcaccggcggaaggcgagggcaggcggtggtcgcgatggcgtccgccgacgcgcgcttggcggggattgcctcctccatccgcgtcatccccgacttccccaagccagggatcatgttccaggacatcacgacactgctgctcgaccccaaggcgttgacaccatcgacgtcttcgttgagcggtacaaggaccaagggatcaccgtagttgctggtgtggaagctagagggttcatttttggtcctcctatcgctctagccatcagtgcgaaatttgtacctttgaggaagcctaagaagttgccaggcgaggtgatctccgaagaatattctctggaatacggaactgacaagatagagatgcatgttggagctgtacaggccaacgatcgggctcttgtagtcgatgatcttattgccaccggtggaacactctgtgcagctgtcaaacttattgaacgtgttggagcaaaggttgttgagtgtgcttgcgtcattgaattggcagaactgaagggccgagacaaacttggggacaggccagtttttgttcttgtcgaagcagatgcttgagcggaacttgggacttctcttctcagtgagttagagttggtgctgttgatgctacctctctgtcaacaacaaagtttcccatgttggctatattcttgctgacacgtaataaagtttcattccaaattgtgatcccctgaatgatttgtcaatgtagacatgattgctggtccttgtatactgtggcttattattcacatcaattaaggataatcctgattggagctc

SEQ ID NO: 7961 - protein, 238 aa, Zea mays subsp. mays
  peptide (1)..(238): Ceres Seq. ID no. 13493292
  misc_feature (97)..(237): Homolog of NCBI NO: 2499932 NR Description: Adenine phosphoribosyltransferase 1 (APRT)
  misc_feature (97)..(237): Homolog of NCBI NO: 9711921 NR Description: Adenine phosphoribosyltransferase [Hordeum
  misc_feature (101)..(238): Homolog of NCBI NO: 32492063 NR Description: adenine phosphoribosyltransferase [Brassica napus]
  misc_feature (101)..(238): Homolog of NCBI NO: 18396344 NR Description: adenine phosphoribosyltransferase 1, APRT thaliana] >gi|21536559|gb|AAM60891.1| adenine
  misc_feature (101)..(238): Homolog of NCBI NO: 30689934 NR Description: adenine phosphoribosyltransferase 1, APRT thaliana] >gi|399046|sp|P31166|APT1_ARATH Adenine
  misc_feature (149)..(238): Homolog of NCBI NO: 25286872 NR Description: protein F17L21.24 [imported] - Arabidopsis >gi|9802535|gb|AAF99737.1|AC004557_16 F17L21.24 [Arabidopsis
  misc_feature (101)..(150): Homolog of NCBI NO: 25286872 NR Description: protein F17L21.24 [imported] - Arabidopsis >gi|9802535|gb|AAF99737.1|AC004557_16 F17L21.24 [Arabidopsis
  misc_feature (101)..(235): Homolog of NCBI NO: 15235709 NR Description: adenine phosphoribosyltransferase (EC 2.4.2.7) -
  misc_feature (101)..(235): Homolog of NCBI NO: 21536749 NR Description: adenine phosphoribosyltransferase (EC
  misc_feature (101)..(235): Homolog of NCBI NO: 15234553 NR Description: adenine phosphoribosyltransferase -related thaliana] >gi|7433935|pir||T07636 adenine
RPRSKEKSSGAEHALPPVPASRLVPVRIRVRAAFSSPRRRRGSTGRTRHRRKARAGGGRDGVRRRALGGDCLLHPRHPRLPQARDHVPGHHDTAARPQGVDTIDVFVERYKDQGITVVAGVEARGFIFGPPIALAISAKFVPLRKPKKLPGEVISEEYSLEYGTDKIEMHVGAVQANDRALVVDDLIATGGTLCAAVKLIERVGAKVVECACVIELAELKGRDKLGDRPVFVLVEADA

SEQ ID NO: 7962 - DNA, 567 bp, Zea mays subsp. mays
  misc_feature (1)..(567): Ceres Seq. ID no. 13491118
  misc_feature: MA Experiment ID: 108528 Result: Up-regulated in Transcription
  misc_feature: MA Experiment 108528 PARAMETER Experiment Name: Zm_Imbibed_Seeds_P Parameter: Age (day) Value: 5 vs. 2
  misc_feature: MA Experiment 108528 PARAMETER Experiment Name: Zm_Imbibed_Seeds_P Parameter: Organism Value: Zea mays
  misc_feature: MA Experiment 108528 PARAMETER Experiment Name: Zm_Imbibed_Seeds_P Parameter: Plant Line Value: 35A19
  misc_feature: MA Experiment 108528 PARAMETER Experiment Name: Zm_Imbibed_Seeds_P Parameter: Tissue Value: Aerial vs. Embryo
  misc_feature: MA Experiment ID: 108529 Result: Down-regulated in Transcription
  misc_feature: MA Experiment 108529 PARAMETER Experiment Name: Zm_Imbibed_Seeds_P Parameter: Age (day) Value: 5 vs. 2
  misc_feature: MA Experiment 108529 PARAMETER Experiment Name: Zm_Imbibed_Seeds_P Parameter: Organism Value: Zea mays
  misc_feature: MA Experiment 108529 PARAMETER Experiment Name: Zm_Imbibed_Seeds_P Parameter: Plant Line Value: 35A19
  misc_feature: MA Experiment 108529 PARAMETER Experiment Name: Zm_Imbibed_Seeds_P Parameter: Tissue Value: Roots vs. Embryo
  misc_feature: MA Experiment ID: 108530 Result: Up-regulated in Transcription
  misc_feature: MA Experiment 108530 PARAMETER Experiment Name: Zm_Imbibed_Seeds_P Parameter: Age (day) Value: 6 vs. 2
  misc_feature: MA Experiment 108530 PARAMETER Experiment Name: Zm_Imbibed_Seeds_P Parameter: Organism Value: Zea mays
  misc_feature: MA Experiment 108530 PARAMETER Experiment Name: Zm_Imbibed_Seeds_P Parameter: Plant Line Value: 35A19
  misc_feature: MA Experiment 108530 PARAMETER Experiment Name: Zm_Imbibed_Seeds_P Parameter: Tissue Value: Aerial vs. Embryo
  misc_feature: MA Experiment ID: 108544 Result: Down-regulated in Transcription
  misc_feature: MA Experiment ID: 108545 Result: Up-regulated in Transcription
  misc_feature: MA Experiment 108545 PARAMETER Experiment Name: Zm_Imbibed_Seeds_P Parameter: Age (day) Value: 3 vs. 2
  misc_feature: MA Experiment 108545 PARAMETER Experiment Name: Zm_Imbibed_Seeds_P Parameter: Organism Value: Zea mays
  misc_feature: MA Experiment 108545 PARAMETER Experiment Name: Zm_Imbibed_Seeds_P Parameter: Plant Line Value: 35A19
  misc_feature: MA Experiment 108545 PARAMETER Experiment Name: Zm_Imbibed_Seeds_P Parameter: Tissue Value: Aerial vs. Embryo
  misc_feature: MA Experiment ID: 108546 Result: Down-regulated in Transcription
  misc_feature: MA Experiment 108546 PARAMETER Experiment Name: Zm_Imbibed_Seeds_P Parameter: Age (day) Value: 3 vs. 2
  misc_feature: MA Experiment 108546 PARAMETER Experiment Name: Zm_Imbibed_Seeds_P Parameter: Organism Value: Zea mays
  misc_feature: MA Experiment 108546 PARAMETER Experiment Name: Zm_Imbibed_Seeds_P Parameter: Plant Line Value: 35A19
  misc_feature: MA Experiment 108546 PARAMETER Experiment Name: Zm_Imbibed_Seeds_P Parameter: Tissue Value: Roots vs. Embryo
  misc_feature: MA Experiment ID: 108547 Result: Up-regulated in Transcription
  misc_feature: MA Experiment 108547 PARAMETER Experiment Name: Zm_Imbibed_Seeds_P Parameter: Age (day) Value: 4 vs. 2
  misc_feature: MA Experiment 108547 PARAMETER Experiment Name: Zm_Imbibed_Seeds_P Parameter: Organism Value: Zea mays
  misc_feature: MA Experiment 108547 PARAMETER Experiment Name: Zm_Imbibed_Seeds_P Parameter: Plant Line Value: 35A19
  misc_feature: MA Experiment 108547 PARAMETER Experiment Name: Zm_Imbibed_Seeds_P Parameter: Tissue Value: Aerial vs. Embryo
  misc_feature: MA Experiment ID: 108687 Result: Down-regulated in Transcription
  misc_feature: MA Experiment 108687 PARAMETER Experiment Name: Zm_Embryos-Flowers__P Parameter: Tissue Value: Embryo vs. Aerial+
  misc_feature: MA Experiment ID: 108689 Result: Down-regulated in Transcription
  misc_feature: MA Experiment 108689 PARAMETER Experiment Name: Zm_Drought_Roots_P Parameter: Age (day) Value: 9
  misc_feature: MA Experiment 108689 PARAMETER Experiment Name: Zm_Drought_Roots_P Parameter: Organism Value: Zea mays
  misc_feature: MA Experiment 108689 PARAMETER Experiment Name: Zm_Drought_Roots_P Parameter: Plant Line Value: 35A19
  misc_feature: MA Experiment 108689 PARAMETER Experiment Name: Zm_Drought_Roots_P Parameter: Timepoint (hr) Value: 24
  misc_feature: MA Experiment 108689 PARAMETER Experiment Name: Zm_Drought_Roots_P Parameter: Tissue Value: Roots
  misc_feature: MA Experiment 108689 PARAMETER Experiment Name: Zm_Drought_Roots_P Parameter: Treatment Value: Drought vs. No Drought
  misc_feature: MA Experiment ID: 20000535 Result: Down-regulated in Transcription
  misc_feature: MA Experiment 20000535 PARAMETER Experiment Name: Zm_Hybrid_Seed_Dev_P Parameter: DAP Value: 30 vs. 12
  misc_feature: MA Experiment 20000535 PARAMETER Experiment Name: Zm_Hybrid_Seed_Dev_P Parameter: Organism Value: Zea mays
  misc_feature: MA Experiment 20000535 PARAMETER Experiment Name: Zm_Hybrid_Seed_Dev_P Parameter: Plant Line Value: 35A19
  misc_feature: MA Experiment 20000535 PARAMETER Experiment Name: Zm_Hybrid_Seed_Dev_P Parameter: Tissue Value: Embryo vs. Unfert Floret
  misc_feature: MA Experiment ID: 20000626 Result: Down-regulated in Transcription
  misc_feature: MA Experiment 20000626 PARAMETER Experiment Name: Zm_Herbicide-Treatments_P Parameter: Timepoint (hr) Value: 12
  misc_feature: MA Experiment 20000626 PARAMETER Experiment Name: Zm_Herbicide-Treatments_P Parameter: Tissue Value: Aerial
  misc_feature: MA Experiment 20000626 PARAMETER Experiment Name: Zm_Herbicide-Treatments_P Parameter: Treatment Value: Roundup vs. No Treatment
gccatctgcaaacctacttctatactttcaggaggatgtatctgtggtagatcattggcttgtcagtggcacgcattatgctagaactagcgaggagtggctaaaacgtatggacaagagcatcacttcagtaaggctgatcttcgaggaaacttatgggaaggaatcgactaccaaatggatagcttattggcggacgttcttcatctcggtagctgaactttttggatacaacaatggagatgaatggatggttgcccattacttgttccgaaagaagtagaggctactgcttggaagtacccaatcaaaaatcaatgttttcagtaattttgtcatgtacactgacgaacaactccttttctggcacgtagttgtatctcgtaccgacttcgtagtggtttcaaaaacaaaatctggaatccctgttgtgaaatttcatcttggacagcgcctgcatatgctttgcagagttacgctaattcttgcaactatgccttcagatgtttgtagagttaggctcattcttgaaagaaaacaaaggattgtttttttagataataatgg

SEQ ID NO: 7963 - protein, 93 aa, Zea mays subsp. mays
  peptide (1)..(93): Ceres Seq. ID no. 13491119
  misc_feature (1)..(92): Pfam Name: Cyclopropane-fatty-acyl-phospholipid synthase Pfam Description: Cyclopropane-fatty-acyl-phospholipid synthase
  misc_feature (1)..(93): Homolog of NCBI NO: 18418151 NR Description: expressed protein [Arabidopsis thaliana]
  misc_feature (1)..(93): Homolog of NCBI NO: 26451688 NR Description: unknown protein [Arabidopsis thaliana]
  misc_feature (1)..(93): Homolog of NCBI NO: 21593795 NR Description: coclaurine N-methyltransferase [Arabidopsis
  misc_feature (1)..(93): Homolog of NCBI NO: 30689611 NR Description: expressed protein [Arabidopsis thaliana]
  misc_feature (1)..(93): Homolog of NCBI NO: 7486450 NR Description: hypothetical protein F4I10.50 - Arabidopsis >gi|4455326|emb|CAB36786.1| putative protein [Arabidopsis >gi|7270259|emb|CAB80029.1| putative protein [Arabidopsis
  misc_feature (1)..(86): Homolog of NCBI NO: 8698899 NR Description: putative protein [Pyrus pyrifolia]
  misc_feature (1)..(93): Homolog of NCBI NO: 16754879 NR Description: coclaurine N-methyltransferase [Coptis japonica]
  misc_feature (2)..(93): Homolog of NCBI NO: 33413898 NR Description: S-adenosyl-L-methionine:coclaurine
  misc_feature (1)..(93): Homolog of NCBI NO: 39997416 NR Description: cyclopropane-fatty-acyl-phospholipid synthase,
  misc_feature (1)..(93): Homolog of NCBI NO: 22988437 NR Description: hypothetical protein [Burkholderia fungorum]
PSANLLLYFQEDVSVVDHWLVSGTHYARTSEEWLKRMDKSITSVRLIFEETYGKESTTKWIAYWRTFFISVAELFGYNNGDEWMVAHYLFRKK

SEQ ID NO: 7964 - protein, 76 aa, Zea mays subsp. mays
  peptide (1)..(76): Ceres Seq. ID no. 13491120
MYTDEQLLFWHVVVSRTDFVVVSKTKSGIPVVKFHLGQRLHMLCRVTLILATMPSDVCRVRLILERKQRIVFLDNN

SEQ ID NO: 7965 - protein, 57 aa, Zea mays subsp. mays
  peptide (1)..(57): Ceres Seq. ID no. 13491121
  misc_feature (1)..(56): Pfam Name: Cyclopropane-fatty-acyl-phospholipid synthase Pfam Description: Cyclopropane-fatty-acyl-phospholipid synthase
  misc_feature (1)..(57): Homolog of NCBI NO: 18418151 NR Description: expressed protein [Arabidopsis thaliana]
  misc_feature (1)..(57): Homolog of NCBI NO: 26451688 NR Description: unknown protein [Arabidopsis thaliana]
  misc_feature (1)..(57): Homolog of NCBI NO: 21593795 NR Description: coclaurine N-methyltransferase [Arabidopsis
  misc_feature (1)..(57): Homolog of NCBI NO: 30689611 NR Description: expressed protein [Arabidopsis thaliana]
  misc_feature (1)..(57): Homolog of NCBI NO: 7486450 NR Description: hypothetical protein F4I10.50 - Arabidopsis >gi|4455326|emb|CAB36786.1| putative protein [Arabidopsis >gi|7270259|emb|CAB80029.1| putative protein [Arabidopsis
  misc_feature (1)..(50): Homolog of NCBI NO: 8698899 NR Description: putative protein [Pyrus pyrifolia]
  misc_feature (1)..(57): Homolog of NCBI NO: 16754879 NR Description: coclaurine N-methyltransferase [Coptis japonica]
  misc_feature (1)..(57): Homolog of NCBI NO: 33413898 NR Description: S-adenosyl-L-methionine:coclaurine
  misc_feature (1)..(57): Homolog of NCBI NO: 39997416 NR Description: cyclopropane-fatty-acyl-phospholipid synthase,
  misc_feature (1)..(57): Homolog of NCBI NO: 22988437 NR Description: hypothetical protein [Burkholderia fungorum]
MDKSITSVRLIFEETYGKESTTKWIAYWRTFFISVAELFGYNNGDEWMVAHYLFRKK

SEQ ID NO: 7966 - DNA, 919 bp, Zea mays subsp. mays; identical to SEQ ID NO: 4468
  misc_feature (1)..(919): Ceres Seq. ID no. 12412873
  misc_feature: MA Experiment ID: 108527 Result: Up-regulated in Transcription
  misc_feature: MA Experiment 108527 PARAMETER Experiment Name: Zm_5mM_NO_P Parameter: Age (day) Value: 8
  misc_feature: MA Experiment 108527 PARAMETER Experiment Name: Zm_5mM_NO_P Parameter: Organism Value: Zea mays
  misc_feature: MA Experiment 108527 PARAMETER Experiment Name: Zm_5mM_NO_P Parameter: Plant Line Value: 35A19
  misc_feature: MA Experiment 108527 PARAMETER Experiment Name: Zm_5mM_NO_P Parameter: Timepoint (hr) Value: 6
  misc_feature: MA Experiment 108527 PARAMETER Experiment Name: Zm_5mM_NO_P Parameter: Tissue Value: Aerial
  misc_feature: MA Experiment 108527 PARAMETER Experiment Name: Zm_5mM_NO_P Parameter: Treatment Value: 5mM NO vs. No Treatment
  misc_feature: MA Experiment ID: 108544 Result: Down-regulated in Transcription
  misc_feature: MA Experiment ID: 20000626 Result: Up-regulated in Transcription
  misc_feature: MA Experiment 20000626 PARAMETER Experiment Name: Zm_Herbicide-Treatments_P Parameter: Timepoint (hr) Value: 12
  misc_feature: MA Experiment 20000626 PARAMETER Experiment Name: Zm_Herbicide-Treatments_P Parameter: Tissue Value: Aerial
  misc_feature: MA Experiment 20000626 PARAMETER Experiment Name: Zm_Herbicide-Treatments_P Parameter: Treatment Value: Roundup vs. No Treatment

SEQ ID NO: 7967 - protein, 209 aa, Zea mays subsp. mays; identical to SEQ ID NO: 4469
  peptide (1)..(209): Ceres Seq. ID no. 12412874
  misc_feature (1)..(55): Pfam Name: RNA recognition motif. (a.k.a. RRM, RBD, or RNP domain) Pfam Description: RNA recognition motif. (a.k.a. RRM, RBD, or RNP
  misc_feature (1)..(209): Homolog of NCBI NO: 15220241 NR Description: RNA binding protein 47 (RBP47), putative; protein At1g47500.1 [Arabidopsis thaliana] >gi|25386564|pir||C96515
  misc_feature (1)..(202): Homolog of NCBI NO: 15594035 NR Description: nucleic acid binding protein [Nicotiana tabacum]
  misc_feature (1)..(209): Homolog of NCBI NO: 15220233 NR Description: RNA binding protein 47 (RBP47), putative; protein At1g47490.1, supported by cDNA: gi_12744992, supported by cDNA: supported by cDNA: gi_17065623 [Arabidopsis thaliana] 3 PF|00076
  misc_feature (67)..(209): Homolog of NCBI NO: 7489196 NR Description: RNA binding protein homolog - common tobacco >gi|2708532|gb|AAB92518.1| putative RNA binding protein
  misc_feature (67)..(209): Homolog of NCBI NO: 9663769 NR Description: RNA Binding Protein 47 [Nicotiana plumbaginifolia]
  misc_feature (1)..(81): Homolog of NCBI NO: 7489196 NR Description: RNA binding protein homolog - common tobacco >gi|2708532|gb|AAB92518.1| putative RNA binding protein
  misc_feature (1)..(81): Homolog of NCBI NO: 9663769 NR Description: RNA Binding Protein 47 [Nicotiana plumbaginifolia]
  misc_feature (67)..(209): Homolog of NCBI NO: 7489112 NR Description: DNA binding protein ACBF - common tobacco
  misc_feature (1)..(81): Homolog of NCBI NO: 7489112 NR Description: DNA binding protein ACBF - common tobacco
  misc_feature (67)..(209): Homolog of NCBI NO: 40804404 NR Description: DNA-binding protein [Lycopersicon esculentum]

SEQ ID NO: 7968 - protein, 170 aa, Zea mays subsp. mays; identical to SEQ ID NO: 4470
  peptide (1)..(170): Ceres Seq. ID no. 12412875
  misc_feature (1)..(170): Homolog of NCBI NO: 15220241 NR Description: RNA binding protein 47 (RBP47), putative; protein At1g47500.1 [Arabidopsis thaliana] >gi|25386564|pir||C96515
  misc_feature (1)..(163): Homolog of NCBI NO: 15594035 NR Description: nucleic acid binding protein [Nicotiana tabacum]
  misc_feature (1)..(170): Homolog of NCBI NO: 15220233 NR Description: RNA binding protein 47 (RBP47), putative; protein At1g47490.1, supported by cDNA: gi_12744992, supported by cDNA: supported by cDNA: gi_17065623 [Arabidopsis thaliana] 3 PF|00076
  misc_feature (28)..(170): Homolog of NCBI NO: 7489196 NR Description: RNA binding protein homolog - common tobacco >gi|2708532|gb|AAB92518.1| putative RNA binding protein
  misc_feature (28)..(170): Homolog of NCBI NO: 9663769 NR Description: RNA Binding Protein 47 [Nicotiana plumbaginifolia]
  misc_feature (1)..(42): Homolog of NCBI NO: 7489196 NR Description: RNA binding protein homolog - common tobacco >gi|2708532|gb|AAB92518.1| putative RNA binding protein
  misc_feature (1)..(42): Homolog of NCBI NO: 9663769 NR Description: RNA Binding Protein 47 [Nicotiana plumbaginifolia]
  misc_feature (28)..(170): Homolog of NCBI NO: 7489112 NR Description: DNA binding protein ACBF - common tobacco
  misc_feature (1)..(42): Homolog of NCBI NO: 7489112 NR Description: DNA binding protein ACBF - common tobacco
  misc_feature (28)..(170): Homolog of NCBI NO: 40804404 NR Description: DNA-binding protein [Lycopersicon esculentum]

SEQ ID NO: 7969 - protein, 167 aa, Zea mays subsp. mays; identical to SEQ ID NO: 4471
  peptide (1)..(167): Ceres Seq. ID no. 12412876
  misc_feature (1)..(167): Homolog of NCBI NO: 15220241 NR Description: RNA binding protein 47 (RBP47), putative; protein At1g47500.1 [Arabidopsis thaliana] >gi|25386564|pir||C96515
  misc_feature (1)..(160): Homolog of NCBI NO: 15594035 NR Description: nucleic acid binding protein [Nicotiana tabacum]
  misc_feature (1)..(167): Homolog of NCBI NO: 15220233 NR Description: RNA binding protein 47 (RBP47), putative; protein At1g47490.1, supported by cDNA: gi_12744992, supported by cDNA: supported by cDNA: gi_17065623 [Arabidopsis thaliana] 3 PF|00076
  misc_feature (25)..(167): Homolog of NCBI NO: 7489196 NR Description: RNA binding protein homolog - common tobacco >gi|2708532|gb|AAB92518.1| putative RNA binding protein
  misc_feature (25)..(167): Homolog of NCBI NO: 9663769 NR Description: RNA Binding Protein 47 [Nicotiana plumbaginifolia]
  misc_feature (1)..(39): Homolog of NCBI NO: 7489196 NR Description: RNA binding protein homolog - common tobacco >gi|2708532|gb|AAB92518.1| putative RNA binding protein
  misc_feature (1)..(39): Homolog of NCBI NO: 9663769 NR Description: RNA Binding Protein 47 [Nicotiana plumbaginifolia]
  misc_feature (25)..(167): Homolog of NCBI NO: 7489112 NR Description: DNA binding protein ACBF - common tobacco
  misc_feature (1)..(39): Homolog of NCBI NO: 7489112 NR Description: DNA binding protein ACBF - common tobacco
  misc_feature (25)..(167): Homolog of NCBI NO: 40804404 NR Description: DNA-binding protein [Lycopersicon esculentum]

SEQ ID NO: 7970 - DNA, 1125 bp, Zea mays subsp. mays
  misc_feature (1)..(1125): Ceres Seq. ID no. 12353975
  misc_feature: MA Experiment ID: 108544 Result: Up-regulated in Transcription
  misc_feature: MA Experiment ID: 108689 Result: Down-regulated in Transcription
  misc_feature: MA Experiment 108689 PARAMETER Experiment Name: Zm_Drought_Roots_P Parameter: Age (day) Value: 9
  misc_feature: MA Experiment 108689 PARAMETER Experiment Name: Zm_Drought_Roots_P Parameter: Organism Value: Zea mays
  misc_feature: MA Experiment 108689 PARAMETER Experiment Name: Zm_Drought_Roots_P Parameter: Plant Line Value: 35A19
  misc_feature: MA Experiment 108689 PARAMETER Experiment Name: Zm_Drought_Roots_P Parameter: Timepoint (hr) Value: 24
  misc_feature: MA Experiment 108689 PARAMETER Experiment Name: Zm_Drought_Roots_P Parameter: Tissue Value: Roots
  misc_feature: MA Experiment 108689 PARAMETER Experiment Name: Zm_Drought_Roots_P Parameter: Treatment Value: Drought vs. No Drought
acttgtttccagcatacgtagctagtgcaactgcaagctccggatcctcctcatatcagctataaattaaaaggtcgtgacaggtgaggccgcgccgcgaggaaccgcgtcgaccttgtcgtcgatgttggcttgcaaggcgagcccgagccggccgtgcgtcgtcccccttgtttgcctgctggtggtggcggccgcagtcgtcgtcgtcgctgcctcggcgccgccggcggaggcggcgttcgacgacaactacgtggcgcagtggggtagagatggttatcaccttgtcgtccggggcacggaggcgaatgtcaccatggaccagagctctggtgccgggttccggtccaagtccacgtacggctcagggttcttccacatgaggatgaagctgccctccgggtacacggccggcgtcgtcacgaccttctacctcatctcgcagccggaggatgggagccgcgacgaggtggacttggagttcctgggcgacaaggccggcgtgcccatcaccctccagaccaacgtcttcgtcgacggccgcggcgacagggagcagcggacgcgcctctggttcgaccccgccgccgacttccacgactacaagatcctctggaacccataccagctcgtgatgttcgtggacgacacgccggtccgggtgctgaggaacctgacgggcgccgtgccggggtacccgttcccggggaagcagacgatgctgatccgcgcgagcgtgtgggacggctccgactgggccacggacggcggccggaccaaggtggactggtccaggggccccttcaccgccggctaccggggcttcgacgtcgacggctgcgccaacaacgggagcgacgcgtgccaatcgcccgacctatggtggaacgccgccgagtaccggaacatcaccgcggagcagcgggcggcgtacgaggacgtgaagaggagttacatgaactacgactactgcgccgataaggccaggtttaacagcaccaccgtacccattgaatgcaactacgcttgagaagccagttaggagtggcggcgttgtatatcaacggtttatatatatatattatatatatatacacacacacgaaaaagatatgtcttctc

SEQ ID NO: 7971 - protein, 302 aa, Zea mays subsp. mays
  peptide (1)..(302): Ceres Seq. ID no. 12353976
  misc_feature (40)..(224): Pfam Name: Glycosyl hydrolases family 16 Pfam Description: Glycosyl hydrolases family 16
  misc_feature (40)..(299): Homolog of NCBI NO: 15230246 NR Description: xyloglucan endotransglycosylase, putative; id: At3g25050.1 [Arabidopsis thaliana]
  misc_feature (36)..(301): Homolog of NCBI NO: 22328589 NR Description: xyloglucan endotransglycosylase, putative;
  misc_feature (36)..(301): Homolog of NCBI NO: 38605518 NR Description: Putative xyloglucan
  misc_feature (18)..(301): Homolog of NCBI NO: 15235587 NR Description: xyloglucan endotransglycosylase, putative;
  misc_feature (19)..(299): Homolog of NCBI NO: 38605539 NR Description: Probable xyloglucan
  misc_feature (19)..(299): Homolog of NCBI NO: 1885310 NR Description: Endoxyloglucan transferase (EXT) [Hordeum vulgare
  misc_feature (17)..(299): Homolog of NCBI NO: 15240733 NR Description: xyloglucan endotransglycosylase (EXGT-A4); id: At5g13870.1 [Arabidopsis thaliana] endoxyloglucan transferase [Arabidopsis thaliana]
  misc_feature (20)..(299): Homolog of NCBI NO: 27228078 NR Description: xyloglucan endotransglycosylase precursor
  misc_feature (18)..(299): Homolog of NCBI NO: 38605156 NR Description: Xyloglucan endotransglucosylase/hydrolase protein
  misc_feature (16)..(299): Homolog of NCBI NO: 15225605 NR Description: xyloglucan endotransglycosylase (ext/EXGT-A1); id: At2g06850.1, supported by cDNA: 15276., supported by cDNA:
MLACKASPSRPCVVPLVCLLVVAAAVVVVAASAPPAEAAFDDNYVAQWGRDGYHLVVRGTEANVTMDQSSGAGFRSKSTYGSGFFHMRMKLPSGYTAGVVTTFYLISQPEDGSRDEVDLEFLGDKAGVPITLQTNVFVDGRGDREQRTRLWFDPAADFHDYKILWNPYQLVMFVDDTPVRVLRNLTGAVPGYPFPGKQTMLIRASVWDGSDWATDGGRTKVDWSRGPFTAGYRGFDVDGCANNGSDACQSPDLWWNAAEYRNITAEQRAAYEDVKRSYMNYDYCADKARFNSTTVPIECNYA

SEQ ID NO: 7972 - protein, 237 aa, Zea mays subsp. mays
  peptide (1)..(237): Ceres Seq. ID no. 12353977
  misc_feature (1)..(159): Pfam Name: Glycosyl hydrolases family 16 Pfam Description: Glycosyl hydrolases family 16
  misc_feature (1)..(234): Homolog of NCBI NO: 15230246 NR Description: xyloglucan endotransglycosylase, putative; id: At3g25050.1 [Arabidopsis thaliana]
  misc_feature (1)..(236): Homolog of NCBI NO: 22328589 NR Description: xyloglucan endotransglycosylase, putative;
  misc_feature (1)..(236): Homolog of NCBI NO: 38605518 NR Description: Putative xyloglucan
  misc_feature (1)..(236): Homolog of NCBI NO: 15235587 NR Description: xyloglucan endotransglycosylase, putative;
  misc_feature (1)..(234): Homolog of NCBI NO: 38605539 NR Description: Probable xyloglucan
  misc_feature (1)..(234): Homolog of NCBI NO: 1885310 NR Description: Endoxyloglucan transferase (EXT) [Hordeum vulgare
  misc_feature (1)..(234): Homolog of NCBI NO: 15240733 NR Description: xyloglucan endotransglycosylase (EXGT-A4); id: At5g13870.1 [Arabidopsis thaliana] endoxyloglucan transferase [Arabidopsis thaliana]
  misc_feature (1)..(234): Homolog of NCBI NO: 27228078 NR Description: xyloglucan endotransglycosylase precursor
  misc_feature (1)..(234): Homolog of NCBI NO: 38605156 NR Description: Xyloglucan endotransglucosylase/hydrolase protein
  misc_feature (1)..(234): Homolog of NCBI NO: 15225605 NR Description: xyloglucan endotransglycosylase (ext/EXGT-A1); id: At2g06850.1, supported by cDNA: 15276., supported by cDNA:
MDQSSGAGFRSKSTYGSGFFHMRMKLPSGYTAGVVTTFYLISQPEDGSRDEVDLEFLGDKAGVPITLQTNVFVDGRGDREQRTRLWFDPAADFHDYKILWNPYQLVMFVDDTPVRVLRNLTGAVPGYPFPGKQTMLIRASVWDGSDWATDGGRTKVDWSRGPFTAGYRGFDVDGCANNGSDACQSPDLWWNAAEYRNITAEQRAAYEDVKRSYMNYDYCADKARFNSTTVPIECNYA

SEQ ID NO: 7973 - protein, 216 aa, Zea mays subsp. mays
  peptide (1)..(216): Ceres Seq. ID no. 12353978
  misc_feature (1)..(138): Pfam Name: Glycosyl hydrolases family 16 Pfam Description: Glycosyl hydrolases family 16
  misc_feature (1)..(213): Homolog of NCBI NO: 15230246 NR Description: xyloglucan endotransglycosylase, putative; id: At3g25050.1 [Arabidopsis thaliana]
  misc_feature (1)..(215): Homolog of NCBI NO: 22328589 NR Description: xyloglucan endotransglycosylase, putative;
  misc_feature (1)..(215): Homolog of NCBI NO: 38605518 NR Description: Putative xyloglucan
  misc_feature (1)..(215): Homolog of NCBI NO: 15235587 NR Description: xyloglucan endotransglycosylase, putative;
  misc_feature (1)..(213): Homolog of NCBI NO: 38605539 NR Description: Probable xyloglucan
  misc_feature (1)..(213): Homolog of NCBI NO: 1885310 NR Description: Endoxyloglucan transferase (EXT) [Hordeum vulgare
  misc_feature (1)..(213): Homolog of NCBI NO: 15240733 NR Description: xyloglucan endotransglycosylase (EXGT-A4); id: At5g13870.1 [Arabidopsis thaliana] endoxyloglucan transferase [Arabidopsis thaliana]
  misc_feature (1)..(213): Homolog of NCBI NO: 27228078 NR Description: xyloglucan endotransglycosylase precursor
  misc_feature (1)..(213): Homolog of NCBI NO: 38605156 NR Description: Xyloglucan endotransglucosylase/hydrolase protein
  misc_feature (1)..(213): Homolog of NCBI NO: 15225605 NR Description: xyloglucan endotransglycosylase (ext/EXGT-A1); id: At2g06850.1, supported by cDNA: 15276., supported by cDNA:
MRMKLPSGYTAGVVTTFYLISQPEDGSRDEVDLEFLGDKAGVPITLQTNVFVDGRGDREQRTRLWFDPAADFHDYKILWNPYQLVMFVDDTPVRVLRNLTGAVPGYPFPGKQTMLIRASVWDGSDWATDGGRTKVDWSRGPFTAGYRGFDVDGCANNGSDACQSPDLWWNAAEYRNITAEQRAAYEDVKRSYMNYDYCADKARFNSTTVPIECNYA

SEQ ID NO: 7974 - DNA, 1023 bp, Zea mays subsp. mays
  misc_feature (1)..(1023): Ceres Seq. ID no. 12340874
  misc_feature: MA Experiment ID: 108528 Result: Up-regulated in Transcription
  misc_feature: MA Experiment 108528 PARAMETER Experiment Name: Zm_Imbibed_Seeds_P Parameter: Age (day) Value: 5 vs. 2
  misc_feature: MA Experiment 108528 PARAMETER Experiment Name: Zm_Imbibed_Seeds_P Parameter: Organism Value: Zea mays
  misc_feature: MA Experiment 108528 PARAMETER Experiment Name: Zm_Imbibed_Seeds_P Parameter: Plant Line Value: 35A19
  misc_feature: MA Experiment 108528 PARAMETER Experiment Name: Zm_Imbibed_Seeds_P Parameter: Tissue Value: Aerial vs. Embryo
  misc_feature: MA Experiment ID: 108530 Result: Up-regulated in Transcription
  misc_feature: MA Experiment 108530 PARAMETER Experiment Name: Zm_Imbibed_Seeds_P Parameter: Age (day) Value: 6 vs. 2
  misc_feature: MA Experiment 108530 PARAMETER Experiment Name: Zm_Imbibed_Seeds_P Parameter: Organism Value: Zea mays
  misc_feature: MA Experiment 108530 PARAMETER Experiment Name: Zm_Imbibed_Seeds_P Parameter: Plant Line Value: 35A19
  misc_feature: MA Experiment 108530 PARAMETER Experiment Name: Zm_Imbibed_Seeds_P Parameter: Tissue Value: Aerial vs. Embryo
  misc_feature: MA Experiment ID: 108688 Result: Down-regulated in Transcription
  misc_feature: MA Experiment 108688 PARAMETER Experiment Name: Zm_Embryos-Flowers__P Parameter: Tissue Value: Immature Flowers vs. Aerial+
atttgcctatttccggtgcaggcagtctggcagagcgagcaggcaggcaactgggccagagtcagacaggcctgcccgccacgccgtcccgacggccatggcccgacccttctcttccccacacatcccgtcttcatcctgggtgactcgccgccctcctccctggacctcctcaccgtccgtctccaccacgagaactagcgcctcgtctattaccgcgtgcagaccgcgccgcagggcagtcgcgccggcggcctccctccacctcggcccgggggagatcgccgagctcgcgcgcaacaaggttttgattgcggcgacagtggcgagcgcgatcgggcagctgtccaagcccttcacctcggtcaagaatgggggcgtcggcgccggccttgacctcaggaccgtcttccgctccggagggatgccctccacccactccgcgagtgttgttgcagttgctacttcgcttgggctagaaagggggtttgcagactccatatttggaatgtcagtggtgtttgcagcaattgtaatgtatgatgctcagggagtaagaagagaagtgggcaaccacgccaagatcttgaacaggttttggatcctcaaagagaaggtacctctggagtattctgaagtggacatggcagctcctgggtttgtttcggtcaccgaggaagcgagctccaacgcgagcccctccttgaagcgcggttctagcaccgaatcaccaagggtgaatgggctccgtgggtcagagcctgagctgacagagctgaagcaggcttgcgtagaggaggattaccggttgagtgaatctgttggccacacggagcttcaggtcacagtcggcgccctgttgggttttgctgtaagcttagcagtgtatgcaacactgtaacggaccttttcatatcacgtccttgattgattacacatttacacttttttttacacagaaacaatacatgcggtttattgttcccaccgtttaaatcagaaatgcctatgctagctcgtttc

SEQ ID NO: 7975 - protein, 299 aa, Zea mays subsp. mays
  peptide (1)..(299): Ceres Seq. ID no. 12340875
  misc_feature (95)..(248): Pfam Name: Divergent PAP2 family Pfam Description: Divergent PAP2 family
  misc_feature (60)..(248): Homolog of NCBI NO: 18399713 NR Description: Expressed protein; protein id: At3g12685.1, by cDNA: gi_15810238, supported by cDNA: gi_20465354 [Arabidopsis >gi|15810239|gb|AAL07237.1| unknown protein [Arabidopsis
  misc_feature (60)..(248): Homolog of NCBI NO: 11994410 NR Description: emb|CAB71107.1~gene_id:MBK21.6~similar to unknown
  misc_feature (94)..(198): Homolog of NCBI NO: 22297563 NR Description: ORF_ID:tll0019~hypothetical protein
  misc_feature (96)..(198): Homolog of NCBI NO: 15672981 NR Description: conserved hypothetical protein [Lactococcus subsp. lactis] >gi|25303764|pir||G86749 conserved hypothetical
  misc_feature (100)..(208): Homolog of NCBI NO: 29150195 NR Description: putative protein [Oryza sativa (indica
  misc_feature (100)..(208): Homolog of NCBI NO: 38344227 NR Description: OJ991113_30.3 [Oryza sativa (japonica
  misc_feature (80)..(197): Homolog of NCBI NO: 11357463 NR Description: hypothetical protein F15G16.160 - Arabidopsis >gi|6850868|emb|CAB71107.1| putative protein [Arabidopsis
  misc_feature (93)..(198): Homolog of NCBI NO: 17227710 NR Description: hypothetical protein [Nostoc sp. PCC 7120]
  misc_feature (100)..(210): Homolog of NCBI NO: 7486375 NR Description: hypothetical protein F3I6.29 - Arabidopsis >gi|2829889|gb|AAC00597.1| Hypothetical protein [Arabidopsis
  misc_feature (100)..(210): Homolog of NCBI NO: 9743358 NR Description: F21J9.1 [Arabidopsis thaliana]
FAYFRCRQSGRASRQATGPESDRPARHAVPTAMARPFSSPHIPSSSWVTRRPPPWTSSPSVSTTRTSASSITACRPRRRAVAPAASLHLGPGEIAELARNKVLIAATVASAIGQLSKPFTSVKNGGVGAGLDLRTVFRSGGMPSTHSASVVAVATSLGLERGFADSIFGMSVVFAAIVMYDAQGVRREVGNHAKILNRFWILKEKVPLEYSEVDMAAPGFVSVTEEASSNASPSLKRGSSTESPRVNGLRGSEPELTELKQACVEEDYRLSESVGHTELQVTVGALLGFAVSLAVYATL

SEQ ID NO: 7976 - protein, 267 aa, Zea mays subsp. mays
  peptide (1)..(267): Ceres Seq. ID no. 12340876
  misc_feature (63)..(216): Pfam Name: Divergent PAP2 family Pfam Description: Divergent PAP2 family
  misc_feature (28)..(216): Homolog of NCBI NO: 18399713 NR Description: Expressed protein; protein id: At3g12685.1, by cDNA: gi_15810238, supported by cDNA: gi_20465354 [Arabidopsis >gi|15810239|gb|AAL07237.1| unknown protein [Arabidopsis
  misc_feature (28)..(216): Homolog of NCBI NO: 11994410 NR Description: emb|CAB71107.1~gene_id:MBK21.6~similar to unknown
  misc_feature (62)..(166): Homolog of NCBI NO: 22297563 NR Description: ORF_ID:tll0019~hypothetical protein
  misc_feature (64)..(166): Homolog of NCBI NO: 15672981 NR Description: conserved hypothetical protein [Lactococcus subsp. lactis] >gi|25303764|pir||G86749 conserved hypothetical
  misc_feature (68)..(176): Homolog of NCBI NO: 29150195 NR Description: putative protein [Oryza sativa (indica
  misc_feature (68)..(176): Homolog of NCBI NO: 38344227 NR Description: OJ991113_30.3 [Oryza sativa (japonica
  misc_feature (48)..(165): Homolog of NCBI NO: 11357463 NR Description: hypothetical protein F15G16.160 - Arabidopsis >gi|6850868|emb|CAB71107.1| putative protein [Arabidopsis
  misc_feature (61)..(166): Homolog of NCBI NO: 17227710 NR Description: hypothetical protein [Nostoc sp. PCC 7120]
  misc_feature (68)..(178): Homolog of NCBI NO: 7486375 NR Description: hypothetical protein F3I6.29 - Arabidopsis >gi|2829889|gb|AAC00597.1| Hypothetical protein [Arabidopsis
  misc_feature (68)..(178): Homolog of NCBI NO: 9743358 NR Description: F21J9.1 [Arabidopsis thaliana]
MARPFSSPHIPSSSWVTRRPPPWTSSPSVSTTRTSASSITACRPRRRAVAPAASLHLGPGEIAELARNKVLIAATVASAIGQLSKPFTSVKNGGVGAGLDLRTVFRSGGMPSTHSASVVAVATSLGLERGFADSIFGMSVVFAAIVMYDAQGVRREVGNHAKILNRFWILKEKVPLEYSEVDMAAPGFVSVTEEASSNASPSLKRGSSTESPRVNGLRGSEPELTELKQACVEEDYRLSESVGHTELQVTVGALLGFAVSLAVYATL

SEQ ID NO: 7977 - protein, 158 aa, Zea mays subsp. mays
  peptide (1)..(158): Ceres Seq. ID no. 12340877
  misc_feature (1)..(107): Pfam Name: Divergent PAP2 family Pfam Description: Divergent PAP2 family
  misc_feature (1)..(67): Homolog of NCBI NO: 29150195 NR Description: putative protein [Oryza sativa (indica
  misc_feature (1)..(67): Homolog of NCBI NO: 38344227 NR Description: OJ991113_30.3 [Oryza sativa (japonica
  misc_feature (1)..(56): Homolog of NCBI NO: 11357463 NR Description: hypothetical protein F15G16.160 - Arabidopsis >gi|6850868|emb|CAB71107.1| putative protein [Arabidopsis
  misc_feature (1)..(107): Homolog of NCBI NO: 18399713 NR Description: Expressed protein; protein id: At3g12685.1, by cDNA: gi_15810238, supported by cDNA: gi_20465354 [Arabidopsis >gi|15810239|gb|AAL07237.1| unknown protein [Arabidopsis
  misc_feature (1)..(57): Homolog of NCBI NO: 22297563 NR Description: ORF_ID:tll0019~hypothetical protein
  misc_feature (1)..(57): Homolog of NCBI NO: 15672981 NR Description: conserved hypothetical protein [Lactococcus subsp. lactis] >gi|25303764|pir||G86749 conserved hypothetical
  misc_feature (1)..(107): Homolog of NCBI NO: 11994410 NR Description: emb|CAB71107.1~gene_id:MBK21.6~similar to unknown
  misc_feature (1)..(57): Homolog of NCBI NO: 17227710 NR Description: hypothetical protein [Nostoc sp. PCC 7120]
  misc_feature (1)..(69): Homolog of NCBI NO: 7486375 NR Description: hypothetical protein F3I6.29 - Arabidopsis >gi|2829889|gb|AAC00597.1| Hypothetical protein [Arabidopsis
  misc_feature (1)..(69): Homolog of NCBI NO: 9743358 NR Description: F21J9.1 [Arabidopsis thaliana]
MPSTHSASVVAVATSLGLERGFADSIFGMSVVFAAIVMYDAQGVRREVGNHAKILNRFWILKEKVPLEYSEVDMAAPGFVSVTEEASSNASPSLKRGSSTESPRVNGLRGSEPELTELKQACVEEDYRLSESVGHTELQVTVGALLGFAVSLAVYATL

SEQ ID NO: 7978 - DNA, 943 bp, Zea mays subsp. mays
  misc_feature (1)..(943): Ceres Seq. ID no. 12403364
  misc_feature: MA Experiment ID: 108535 Result: Up-regulated in Transcription
  misc_feature: MA Experiment 108535 PARAMETER Experiment Name: Zm_Meristem_P Parameter: Age (day) Value: 8
  misc_feature: MA Experiment 108535 PARAMETER Experiment Name: Zm_Meristem_P Parameter: Organism Value: Zea mays
  misc_feature: MA Experiment 108535 PARAMETER Experiment Name: Zm_Meristem_P Parameter: Plant Line Value: 35A19
  misc_feature: MA Experiment 108535 PARAMETER Experiment Name: Zm_Meristem_P Parameter: Tissue Value: Root Meristem vs. Above Root Meristem
  misc_feature: MA Experiment ID: 108543 Result: Up-regulated in Transcription
  misc_feature: MA Experiment ID: 20000477 Result: Down-regulated in Transcription
  misc_feature: MA Experiment 20000477 PARAMETER Experiment Name: Zm_5mM_SA_P Parameter: Age (day) Value: 10
  misc_feature: MA Experiment 20000477 PARAMETER Experiment Name: Zm_5mM_SA_P Parameter: Organism Value: Zea mays
  misc_feature: MA Experiment 20000477 PARAMETER Experiment Name: Zm_5mM_SA_P Parameter: Plant Line Value: 35A19
  misc_feature: MA Experiment 20000477 PARAMETER Experiment Name: Zm_5mM_SA_P Parameter: Timepoint (hr) Value: 48
  misc_feature: MA Experiment 20000477 PARAMETER Experiment Name: Zm_5mM_SA_P Parameter: Tissue Value: Aerial
  misc_feature: MA Experiment 20000477 PARAMETER Experiment Name: Zm_5mM_SA_P Parameter: Treatment Value: 5mM SA vs. No Treatment
  misc_feature: MA Experiment ID: 20000478 Result: Down-regulated in Transcription
  misc_feature: MA Experiment 20000478 PARAMETER Experiment Name: Zm_5mM_SA_P Parameter: Age (day) Value: 11
  misc_feature: MA Experiment 20000478 PARAMETER Experiment Name: Zm_5mM_SA_P Parameter: Organism Value: Zea mays
  misc_feature: MA Experiment 20000478 PARAMETER Experiment Name: Zm_5mM_SA_P Parameter: Plant Line Value: 35A19
  misc_feature: MA Experiment 20000478 PARAMETER Experiment Name: Zm_5mM_SA_P Parameter: Timepoint (hr) Value: 72
  misc_feature: MA Experiment 20000478 PARAMETER Experiment Name: Zm_5mM_SA_P Parameter: Tissue Value: Aerial
  misc_feature: MA Experiment 20000478 PARAMETER Experiment Name: Zm_5mM_SA_P Parameter: Treatment Value: 5mM SA vs. No Treatment
  misc_feature: MA Experiment ID: 20000479 Result: Down-regulated in Transcription
  misc_feature: MA Experiment 20000479 PARAMETER Experiment Name: Zm_Drought_P Parameter: Age (day) Value: 10
  misc_feature: MA Experiment 20000479 PARAMETER Experiment Name: Zm_Drought_P Parameter: Organism Value: Zea mays
  misc_feature: MA Experiment 20000479 PARAMETER Experiment Name: Zm_Drought_P Parameter: Plant Line Value: 35A19
  misc_feature: MA Experiment 20000479 PARAMETER Experiment Name: Zm_Drought_P Parameter: Timepoint (hr) Value: 48
  misc_feature: MA Experiment 20000479 PARAMETER Experiment Name: Zm_Drought_P Parameter: Tissue Value: Aerial
  misc_feature: MA Experiment 20000479 PARAMETER Experiment Name: Zm_Drought_P Parameter: Treatment Value: Drought vs. No Drought
  misc_feature: MA Experiment ID: 20000488 Result: Down-regulated in Transcription
  misc_feature: MA Experiment 20000488 PARAMETER Experiment Name: Zm_50mM_NH4NO3_L_to_H_P Parameter: Organism Value: Zea mays
  misc_feature: MA Experiment 20000488 PARAMETER Experiment Name: Zm_50mM_NH4NO3_L_to_H_P Parameter: Timepoint (hr) Value: 8
  misc_feature: MA Experiment 20000488 PARAMETER Experiment Name: Zm_50mM_NH4NO3_L_to_H_P Parameter: Tissue Value: Leaves
  misc_feature: MA Experiment 20000488 PARAMETER Experiment Name: Zm_50mM_NH4NO3_L_to_H_P Parameter: Treatment Value: 50mM NH4NO3 vs. 100mM Mannitol
  misc_feature: MA Experiment ID: 20000533 Result: Down-regulated in Transcription
  misc_feature: MA Experiment 20000533 PARAMETER Experiment Name: Zm_0.001percent_MeJA_P Parameter: Age (day) Value: 11
  misc_feature: MA Experiment 20000533 PARAMETER Experiment Name: Zm_0.001percent_MeJA_P Parameter: Organism Value: Zea mays
  misc_feature: MA Experiment 20000533 PARAMETER Experiment Name: Zm_0.001percent_MeJA_P Parameter: Plant Line Value: 35A19
  misc_feature: MA Experiment 20000533 PARAMETER Experiment Name: Zm_0.001percent_MeJA_P Parameter: Timepoint (hr) Value: 72
  misc_feature: MA Experiment 20000533 PARAMETER Experiment Name: Zm_0.001percent_MeJA_P Parameter: Tissue Value: Aerial
  misc_feature: MA Experiment 20000533 PARAMETER Experiment Name: Zm_0.001percent_MeJA_P Parameter: Treatment Value: 0.001percent MeJA vs. No Treatment
  misc_feature: MA Experiment ID: 20000626 Result: Down-regulated in Transcription
  misc_feature: MA Experiment 20000626 PARAMETER Experiment Name: Zm_Herbicide-Treatments_P Parameter: Timepoint (hr) Value: 12
  misc_feature: MA Experiment 20000626 PARAMETER Experiment Name: Zm_Herbicide-Treatments_P Parameter: Tissue Value: Aerial
  misc_feature: MA Experiment 20000626 PARAMETER Experiment Name: Zm_Herbicide-Treatments_P Parameter: Treatment Value: Roundup vs. No Treatment
ggttggaggctagagcttgcaaacaccaccagcgaagacgtcgtggcgcgcatgtgggcggtctctgcaccccgcgtcccaccgccaccgctactgtcgtagtcctagatccgacagcctcacgagctacattccctcgaggccggccttcccggtgtctcagcagcggcggcgcatggcgatggctgcggggcgtgggctcttggccctcttctcggtcgtcgtagtggctgggctcacctctgcggcaaatggtcctttcctgtccgatagcgtcttccagccgagcgccggatctacagggaggagcttactgcaggccaataacagttgccccgtgaactttgagttccaaaactacacaatcatcacaagcaagtgcaaagggccaaagtttccagccggcccatgctgtgccgcactcaaggagttcgcgtgcccttactatacgtacctcaatgacgagagcaacgactgtgcatcgacaatgttcagctacatcaacctgtatggcaagtatccaccgggcctgttctccagcgagtgcaaagaaggcaagcaggggctctcttgcgcagatgtcctcgagagagacagtgccactgcaagcagtggtcatcacgctcaaatcagcttgcttgcgttgattactttcttgagtgtggtagtagcgttgttccactgaactatatatgcattctcccaaatatggtgtgttacaactaatgaggtttgaattgcaccttttggtgctcatggtgggattctaggttcttcctttttgtgtgtaaagtctcacataatgttattcatggcctattgcatactctttttaattcaatttaatatggcagcgggtctgattaaggctatgactagtagatcgtccgtatgaccgtacaaaaatattgtttacattatagactattgttttacattgtgt

SEQ ID NO: 7979 - protein, 169 aa, Zea mays subsp. mays
  peptide (1)..(169): Ceres Seq. ID no. 12403365
  misc_feature (11)..(168): Homolog of NCBI NO: 15241141 NR Description: putative protein; protein id: At5g56170.1
  misc_feature (10)..(168): Homolog of NCBI NO: 3868853 NR Description: GPI-anchored protein [Vigna radiata]
  misc_feature (9)..(169): Homolog of NCBI NO: 15235244 NR Description: putative GPI-anchored protein; protein id:
  misc_feature (9)..(168): Homolog of NCBI NO: 30681101 NR Description: expressed protein [Arabidopsis thaliana]
  misc_feature (52)..(168): Homolog of NCBI NO: 25337807 NR Description: hypothetical protein At2g20700 [imported] - thaliana >gi|4454478|gb|AAD20925.1| hypothetical protein
  misc_feature (52)..(169): Homolog of NCBI NO: 38603910 NR Description: At4g28280 [Arabidopsis thaliana]
  misc_feature (30)..(133): Homolog of NCBI NO: 10241672 NR Description: hypothetical protein [Oryza sativa (indica
  misc_feature (9)..(133): Homolog of NCBI NO: 38345028 NR Description: OSJNBa0029H02.12 [Oryza sativa (japonica
  misc_feature (14)..(133): Homolog of NCBI NO: 10241671 NR Description: hypothetical protein [Oryza sativa (indica
  misc_feature (30)..(133): Homolog of NCBI NO: 38345027 NR Description: OSJNBa0029H02.11 [Oryza sativa (japonica
MAMAAGRGLLALFSVVVVAGLTSAANGPFLSDSVFQPSAGSTGRSLLQANNSCPVNFEFQNYTIITSKCKGPKFPAGPCCAALKEFACPYYTYLNDESNDCASTMFSYINLYGKYPPGLFSSECKEGKQGLSCADVLERDSATASSGHHAQISLLALITFLSVVVALFH

SEQ ID NO: 7980 - protein, 167 aa, Zea mays subsp. mays
  peptide (1)..(167): Ceres Seq. ID no. 12403366
  misc_feature (9)..(166): Homolog of NCBI NO: 15241141 NR Description: putative protein; protein id: At5g56170.1
  misc_feature (8)..(166): Homolog of NCBI NO: 3868853 NR Description: GPI-anchored protein [Vigna radiata]
  misc_feature (7)..(167): Homolog of NCBI NO: 15235244 NR Description: putative GPI-anchored protein; protein id:
  misc_feature (7)..(166): Homolog of NCBI NO: 30681101 NR Description: expressed protein [Arabidopsis thaliana]
  misc_feature (50)..(166): Homolog of NCBI NO: 25337807 NR Description: hypothetical protein At2g20700 [imported] - thaliana >gi|4454478|gb|AAD20925.1| hypothetical protein
  misc_feature (50)..(167): Homolog of NCBI NO: 38603910 NR Description: At4g28280 [Arabidopsis thaliana]
  misc_feature (28)..(131): Homolog of NCBI NO: 10241672 NR Description: hypothetical protein [Oryza sativa (indica
  misc_feature (7)..(131): Homolog of NCBI NO: 38345028 NR Description: OSJNBa0029H02.12 [Oryza sativa (japonica
  misc_feature (12)..(131): Homolog of NCBI NO: 10241671 NR Description: hypothetical protein [Oryza sativa (indica
  misc_feature (28)..(131): Homolog of NCBI NO: 38345027 NR Description: OSJNBa0029H02.11 [Oryza sativa (japonica
MAAGRGLLALFSVVVVAGLTSAANGPFLSDSVFQPSAGSTGRSLLQANNSCPVNFEFQNYTIITSKCKGPKFPAGPCCAALKEFACPYYTYLNDESNDCASTMFSYINLYGKYPPGLFSSECKEGKQGLSCADVLERDSATASSGHHAQISLLALITFLSVVVALFH

SEQ ID NO: 7981 - DNA, 874 bp, Zea mays subsp. mays
  misc_feature (1)..(874): Ceres Seq. ID no. 12353951
  misc_feature: MA Experiment ID: 108536 Result: Up-regulated in Transcription
  misc_feature: MA Experiment 108536 PARAMETER Experiment Name: Zm_Meristem_P Parameter: Age (day) Value: 8
  misc_feature: MA Experiment 108536 PARAMETER Experiment Name: Zm_Meristem_P Parameter: Organism Value: Zea mays
  misc_feature: MA Experiment 108536 PARAMETER Experiment Name: Zm_Meristem_P Parameter: Plant Line Value: 35A19
  misc_feature: MA Experiment 108536 PARAMETER Experiment Name: Zm_Meristem_P Parameter: Tissue Value: Shoot Meristem vs. Above Shoot Meristem
  misc_feature: MA Experiment ID: 108543 Result: Down-regulated in Transcription
gcaatttcgtttgaaacagttcagttctcacaaaaaaaagagaaagccctgaagtttcatggattcaagaatttccatctgcggtggcgcctgcgggtacggcgacctggacatcttcaggtacgggcgctacacgacggggctgagcgcggcgctgttcgggcgcggcggcgcctgcggcggctgctacgagctgcggtgcgtcaaccacatccagtggtgcctccggggcagccccacggtggtggtgacggcgacggacttctgcccggccaacatgggcctcgccgacgacgacgccggcggctggtgcaacttcccgcgggagcacctcgagctgtcggaggcctcgttcctccgcgtcgccaaggccaaggccggcatcgtgccgggtgcagttccggagggtgagctgcgacagggccggcggcatggcggttcaccatcaccggtagcgcccacttcctgcaggtgctcatcaccaacgtggcggcggacggcgaggtggcggccgtgaaggtgaaggggtcgaggacggggtggatcccgatggggcggaactggggccagaactggcagtgcgacgccgacctccgcgcccagccgccttccgggaggccagcttcggccacgccacgctagacatcaagaaccggacgcacgcctactactcgtggcaccgcaaccatgacggcgcgaaggtcgtcgctgacggcgtctggttcaccaacaggtactggatgcccaccgacgacgacacaaactgacgatcaccgccgcagagggaacaaattactgatagatcagcgtagcacgttcctgagctagccccgccccctttatgttctccaattcagtaatgcaatgcgttttt

SEQ ID NO: 7982 - protein, 152 aa, Zea mays subsp. mays
  peptide (1)..(152): Ceres Seq. ID no. 12353952
  misc_feature (2)..(126): Homolog of NCBI NO: 15233735 NR Description: expansin, putative; protein id: At4g38210.1, by cDNA: 32072. [Arabidopsis thaliana]
  misc_feature (9)..(111): Homolog of NCBI NO: 16517043 NR Description: alpha-expansin [Oryza sativa]
  misc_feature (1)..(113): Homolog of NCBI NO: 14193759 NR Description: alpha-expansin 5 [Zea mays]
  misc_feature (9)..(111): Homolog of NCBI NO: 21314543 NR Description: alpha-expansin precursor [Gossypium hirsutum]
  misc_feature (9)..(113): Homolog of NCBI NO: 14193751 NR Description: alpha-expansin [Zea mays]
  misc_feature (9)..(111): Homolog of NCBI NO: 7484721 NR Description: expansin - upland cotton
  misc_feature (9)..(111): Homolog of NCBI NO: 30841322 NR Description: expansin [Gossypium hirsutum]
  misc_feature (9)..(111): Homolog of NCBI NO: 7489470 NR Description: expansin - rice >gi|1815681|gb|AAB81662.1|
  misc_feature (9)..(111): Homolog of NCBI NO: 15225530 NR Description: expansin, putative; protein id: At2g39700.1, by cDNA: 17353., supported by cDNA: gi_15294171, supported by gi_17065213, supported by cDNA: gi_20259979 [Arabidopsis
  misc_feature (9)..(111): Homolog of NCBI NO: 16517029 NR Description: alpha-expansin [Oryza sativa]
MDSRISICGGACGYGDLDIFRYGRYTTGLSAALFGRGGACGGCYELRCVNHIQWCLRGSPTVVVTATDFCPANMGLADDDAGGWCNFPREHLELSEASFLRVAKAKAGIVPGAVPEGELRQGRRHGGSPSPVAPTSCRCSSPTWRRTARWRP

SEQ ID NO: 7983 - protein, 136 aa, Zea mays subsp. mays
  peptide (1)..(136): Ceres Seq. ID no. 12353953
  misc_feature (111)..(136): Homolog of NCBI NO: 14193753 NR Description: alpha-expansin 2 [Zea mays]
AISFETVQFSQKKEKALKFHGFKNFHLRWRLRVRRPGHLQVRALHDGAERGAVRARRRLRRLLRAAVRQPHPVVPPGQPHGGGDGDGLLPGQHGPRRRRRRRLVQLPAGAPRAVGGLVPPRRQGQGRHRAGCSSGG

SEQ ID NO: 7984 - protein, 79 aa, Zea mays subsp. mays
  peptide (1)..(79): Ceres Seq. ID no. 12353954
  misc_feature (1)..(53): Homolog of NCBI NO: 15233735 NR Description: expansin, putative; protein id: At4g38210.1, by cDNA: 32072. [Arabidopsis thaliana]
  misc_feature (1)..(38): Homolog of NCBI NO: 16517043 NR Description: alpha-expansin [Oryza sativa]
  misc_feature (1)..(40): Homolog of NCBI NO: 14193759 NR Description: alpha-expansin 5 [Zea mays]
  misc_feature (1)..(38): Homolog of NCBI NO: 21314543 NR Description: alpha-expansin precursor [Gossypium hirsutum]
  misc_feature (1)..(40): Homolog of NCBI NO: 14193751 NR Description: alpha-expansin [Zea mays]
  misc_feature (1)..(38): Homolog of NCBI NO: 7484721 NR Description: expansin - upland cotton
  misc_feature (1)..(38): Homolog of NCBI NO: 30841322 NR Description: expansin [Gossypium hirsutum]
  misc_feature (1)..(38): Homolog of NCBI NO: 7489470 NR Description: expansin - rice >gi|1815681|gb|AAB81662.1|
  misc_feature (1)..(38): Homolog of NCBI NO: 16517029 NR Description: alpha-expansin [Oryza sativa]
  misc_feature (1)..(38): Homolog of NCBI NO: 15225530 NR Description: expansin, putative; protein id: At2g39700.1, by cDNA: 17353., supported by cDNA: gi_15294171, supported by gi_17065213, supported by cDNA: gi_20259979 [Arabidopsis
MGLADDDAGGWCNFPREHLELSEASFLRVAKAKAGIVPGAVPEGELRQGRRHGGSPSPVAPTSCRCSSPTWRRTARWRP

SEQ ID NO: 7985 - DNA, 1980 bp, Zea mays subsp. mays
  misc_feature (1)..(1980): Ceres Seq. ID no. 13567373
  misc_feature: MA Experiment ID: 108544 Result: Up-regulated in Transcription
ctcacgggcggcggctcgcgtgtcccgccagctagccgcacactttcctctctttcagtttcgcttcgcagacttcgcttgcgcttcacccaaccttaaccgcaacggttcccgtgcggagtttttattatgaatgaatgaatacgaattcagagcacgagcgccgttgattggccgctactagtactaccagctaggccactgctcctctgctacccgctaacctcgcgccggagtcgtcgcccacgatggcctaccgatccgcagtgctcttgcccgccctcctactggccgtcgccgtcgtcgtggcctccgccgccgccggggacgggaggtggcgggaggagcaggcgcgggaccgggtgccgcgggtgccggggcaggccttcaacaccagcttcgcgcagtacgccgggtacgtgaccgtcagcgagcagcgcggcgctgcgctcttctactggttctttgaggccgagaaggacccggggtccaagcccctcgtgctctggctcaacggagggcctggatgctcgtccattgcttttggacttggagaagaagtaggacctttccatgttaacgcagatgggaagggggtccatgtcaatccttattcttggaacaaagttgcaaatttactgttccttgattcacctgttggtgttggttactcatattcaaacacctctgatgatgctttaaaaaatggggatgcaagaactgccacggattcattggcattcttactgaagtggcttgaacgctttcctcaatacaaggaacgcgaattttatttgacaggggagagttatgctggtcactatgttcctcaactggctcaagccataaaaaggcaccatgaggctactggtgacaaatcaattaatctaaagggctatatggtagggaatgctctcactgatgatttccatgaccactatggaatatttcaattcatgtggactactggcctgatctctgatcaaacatacaagctgctgaatgttttctgtgactacgagtccttcgtgcattcgtctccacagtgtgataagattatggatattgctagcactgaagctggaaacattgattcatatagcatcttcacacctacatgtcatgcatcttttgcctcttcaaagaacaaagtgatgaaaaggctacattctgctggaaaaatgggagaacagtatgatccatgcactgagaagcattcaactgtatacttcaatctagctgaggttcagaaggcacttcatgttaatacagtcattggaaaatcaaaatgggagacttgcagtgaagctgttaatactcattggggggattgcgaaagatctgtgctgcatatctatcatgaacttatacagtatggcctccgtatatgggtgttcagtggagatacagatgcagtgattccagtgacttcaactagatacagcatcgatgctctcaagcttccaacaataactccatggcatgcttggtacgacgatgacggtgaggtcggtggatggacccaagggtacaggggactcaattttgtgaccgtgaggggagcaggtcacgaagtccctcttcatcgacccaaacaggccctcacgctaatcaaatcgttcttgactgggagcccaatgcctgtgcaatccagcacacacagcaacatgtaatccgtgttgttgcaactgattcacgagatgaatgaacatcccgaagcacccaagtcagccagttgtccaacccggcttgttctgcaacttgctgtagttgtttatgtatcagagctaccggtgccggttaccgcagcagccgtgcttttgtcggccctgttggtgcttgttgcagtaccagttatcccctaaggcaggggacagaaactgcggaatagtttttgtttgcattgacgtgacagcactgtaatcttaaacatcgtaccatagtcctttctatgacaaaggtgtggtttctgatgtctgc

SEQ ID NO: 7986 - protein, 474 aa, Zea mays subsp. mays
  peptide (1)..(474): Ceres Seq. ID no. 13567374
  misc_feature (43)..(461): Pfam Name: Serine carboxypeptidase Pfam Description: Serine carboxypeptidase
  misc_feature (39)..(474): Homolog of NCBI NO: 2493494 NR Description: Serine carboxypeptidase II-2 precursor (CP-MII.2)
  misc_feature (4)..(473): Homolog of NCBI NO: 18417667 NR Description: serine carboxypeptidase -related [Arabidopsis >gi|15293049|gb|AAK93635.1| putative serine carboxypeptidase II thaliana] >gi|22136958|gb|AAM91708.1| putative serine
  misc_feature (5)..(474): Homolog of NCBI NO: 34895992 NR Description: putative carboxypeptidase D [Oryza sativa
  misc_feature (1)..(467): Homolog of NCBI NO: 34908012 NR Description: putative carboxypeptidase D [Oryza sativa
  misc_feature (12)..(466): Homolog of NCBI NO: 15231911 NR Description: serine carboxypeptidase -related [Arabidopsis >gi|6648211|gb|AAF21209.1|AC013483_33 putative serine
  misc_feature (1)..(465): Homolog of NCBI NO: 7428204 NR Description: carboxypeptidase D (EC 3.4.16.6) precursor -
  misc_feature (1)..(465): Homolog of NCBI NO: 20455471 NR Description: Serine carboxypeptidase II precursor
  misc_feature (31)..(466): Homolog of NCBI NO: 15227493 NR Description: serine carboxypeptidase -related [Arabidopsis
  misc_feature (13)..(465): Homolog of NCBI NO: 13877871 NR Description: putative serine carboxypeptidase II [Arabidopsis
  misc_feature (13)..(465): Homolog of NCBI NO: 15234795 NR Description: serine carboxypeptidase -related [Arabidopsis
MAYRSAVLLPALLLAVAVVVASAAAGDGRWREEQARDRVPRVPGQAFNTSFAQYAGYVTVSEQRGAALFYWFFEAEKDPGSKPLVLWLNGGPGCSSIAFGLGEEVGPFHVNADGKGVHVNPYSWNKVANLLFLDSPVGVGYSYSNTSDDALKNGDARTATDSLAFLLKWLERFPQYKEREFYLTGESYAGHYVPQLAQAIKRHHEATGDKSINLKGYMVGNALTDDFHDHYGIFQFMWTTGLISDQTYKLLNVFCDYESFVHSSPQCDKIMDIASTEAGNIDSYSIFTPTCHASFASSKNKVMKRLHSAGKMGEQYDPCTEKHSTVYFNLAEVQKALHVNTVIGKSKWETCSEAVNTHWGDCERSVLHIYHELIQYGLRIWVFSGDTDAVIPVTSTRYSIDALKLPTITPWHAWYDDDGEVGGWTQGYRGLNFVTVRGAGHEVPLHRPKQALTLIKSFLTGSPMPVQSSTHSNM

SEQ ID NO: 7987 - protein, 257 aa, Zea mays subsp. mays
  peptide (1)..(257): Ceres Seq. ID no. 13567375
  misc_feature (1)..(244): Pfam Name: Serine carboxypeptidase Pfam Description: Serine carboxypeptidase
  misc_feature (1)..(257): Homolog of NCBI NO: 2493494 NR Description: Serine carboxypeptidase II-2 precursor (CP-MII.2)
  misc_feature (1)..(256): Homolog of NCBI NO: 18417667 NR Description: serine carboxypeptidase -related [Arabidopsis >gi|15293049|gb|AAK93635.1| putative serine carboxypeptidase II thaliana] >gi|22136958|gb|AAM91708.1| putative serine
  misc_feature (1)..(257): Homolog of NCBI NO: 34895992 NR Description: putative carboxypeptidase D [Oryza sativa
  misc_feature (1)..(250): Homolog of NCBI NO: 34908012 NR Description: putative carboxypeptidase D [Oryza sativa
  misc_feature (1)..(249): Homolog of NCBI NO: 15231911 NR Description: serine carboxypeptidase -related [Arabidopsis >gi|6648211|gb|AAF21209.1|AC013483_33 putative serine
  misc_feature (1)..(248): Homolog of NCBI NO: 7428204 NR Description: carboxypeptidase D (EC 3.4.16.6) precursor -
  misc_feature (1)..(248): Homolog of NCBI NO: 20455471 NR Description: Serine carboxypeptidase II precursor
  misc_feature (1)..(249): Homolog of NCBI NO: 15227493 NR Description: serine carboxypeptidase -related [Arabidopsis
  misc_feature (1)..(248): Homolog of NCBI NO: 13877871 NR Description: putative serine carboxypeptidase II [Arabidopsis
  misc_feature (1)..(248): Homolog of NCBI NO: 15234795 NR Description: serine carboxypeptidase -related [Arabidopsis
MVGNALTDDFHDHYGIFQFMWTTGLISDQTYKLLNVFCDYESFVHSSPQCDKIMDIASTEAGNIDSYSIFTPTCHASFASSKNKVMKRLHSAGKMGEQYDPCTEKHSTVYFNLAEVQKALHVNTVIGKSKWETCSEAVNTHWGDCERSVLHIYHELIQYGLRIWVFSGDTDAVIPVTSTRYSIDALKLPTITPWHAWYDDDGEVGGWTQGYRGLNFVTVRGAGHEVPLHRPKQALTLIKSFLTGSPMPVQSSTHSNM

SEQ ID NO: 7988 - protein, 238 aa, Zea mays subsp. mays
  peptide (1)..(238): Ceres Seq. ID no. 13567376
  misc_feature (1)..(225): Pfam Name: Serine carboxypeptidase Pfam Description: Serine carboxypeptidase
  misc_feature (1)..(238): Homolog of NCBI NO: 2493494 NR Description: Serine carboxypeptidase II-2 precursor (CP-MII.2)
  misc_feature (1)..(237): Homolog of NCBI NO: 18417667 NR Description: serine carboxypeptidase -related [Arabidopsis >gi|15293049|gb|AAK93635.1| putative serine carboxypeptidase II thaliana] >gi|22136958|gb|AAM91708.1| putative serine
  misc_feature (1)..(238): Homolog of NCBI NO: 34895992 NR Description: putative carboxypeptidase D [Oryza sativa
  misc_feature (1)..(231): Homolog of NCBI NO: 34908012 NR Description: putative carboxypeptidase D [Oryza sativa
  misc_feature (1)..(230): Homolog of NCBI NO: 15231911 NR Description: serine carboxypeptidase -related [Arabidopsis >gi|6648211|gb|AAF21209.1|AC013483_33 putative serine
  misc_feature (1)..(229): Homolog of NCBI NO: 7428204 NR Description: carboxypeptidase D (EC 3.4.16.6) precursor -
  misc_feature (1)..(229): Homolog of NCBI NO: 20455471 NR Description: Serine carboxypeptidase II precursor
  misc_feature (1)..(230): Homolog of NCBI NO: 15227493 NR Description: serine carboxypeptidase -related [Arabidopsis
  misc_feature (1)..(229): Homolog of NCBI NO: 13877871 NR Description: putative serine carboxypeptidase II [Arabidopsis
  misc_feature (1)..(229): Homolog of NCBI NO: 15234795 NR Description: serine carboxypeptidase -related [Arabidopsis
MWTTGLISDQTYKLLNVFCDYESFVHSSPQCDKIMDIASTEAGNIDSYSIFTPTCHASFASSKNKVMKRLHSAGKMGEQYDPCTEKHSTVYFNLAEVQKALHVNTVIGKSKWETCSEAVNTHWGDCERSVLHIYHELIQYGLRIWVFSGDTDAVIPVTSTRYSIDALKLPTITPWHAWYDDDGEVGGWTQGYRGLNFVTVRGAGHEVPLHRPKQALTLIKSFLTGSPMPVQSSTHSNM

SEQ ID NO: 7989 - DNA, 897 bp, Zea mays subsp. mays
  misc_feature (1)..(897): Ceres Seq. ID no. 12343263
  misc_feature: MA Experiment ID: 108547 Result: Up-regulated in Transcription
  misc_feature: MA Experiment 108547 PARAMETER Experiment Name: Zm_Imbibed_Seeds_P Parameter: Age (day) Value: 4 vs. 2
  misc_feature: MA Experiment 108547 PARAMETER Experiment Name: Zm_Imbibed_Seeds_P Parameter: Organism Value: Zea mays
  misc_feature: MA Experiment 108547 PARAMETER Experiment Name: Zm_Imbibed_Seeds_P Parameter: Plant Line Value: 35A19
  misc_feature: MA Experiment 108547 PARAMETER Experiment Name: Zm_Imbibed_Seeds_P Parameter: Tissue Value: Aerial vs. Embryo
  misc_feature: MA Experiment ID: 108556 Result: Down-regulated in Transcription
  misc_feature: MA Experiment 108556 PARAMETER Experiment Name: Zm_Drought_P Parameter: Age (day) Value: 9
  misc_feature: MA Experiment 108556 PARAMETER Experiment Name: Zm_Drought_P Parameter: Organism Value: Zea mays
  misc_feature: MA Experiment 108556 PARAMETER Experiment Name: Zm_Drought_P Parameter: Plant Line Value: 35A19
  misc_feature: MA Experiment 108556 PARAMETER Experiment Name: Zm_Drought_P Parameter: Timepoint (hr) Value: 24
  misc_feature: MA Experiment 108556 PARAMETER Experiment Name: Zm_Drought_P Parameter: Tissue Value: Aerial
  misc_feature: MA Experiment 108556 PARAMETER Experiment Name: Zm_Drought_P Parameter: Treatment Value: Drought vs. No Drought
  misc_feature: MA Experiment ID: 20000492 Result: Up-regulated in Transcription
  misc_feature: MA Experiment 20000492 PARAMETER Experiment Name: Zm_Hybrid_Seed_Dev_P Parameter: DAP Value: 12
  misc_feature: MA Experiment 20000492 PARAMETER Experiment Name: Zm_Hybrid_Seed_Dev_P Parameter: Organism Value: Zea mays
  misc_feature: MA Experiment 20000492 PARAMETER Experiment Name: Zm_Hybrid_Seed_Dev_P Parameter: Plant Line Value: 35A19
  misc_feature: MA Experiment 20000492 PARAMETER Experiment Name: Zm_Hybrid_Seed_Dev_P Parameter: Tissue Value: Fert Kernel vs. Unfert Floret
acccacccatcacacgacaaaatccctcaccctcgtgagtcctgacgtcctcgcccgtgctcgcagttggtagggttctagccatggcgtggagcgccgccgccgtctccaggttcgcagccgcctccccacccgcggcacccatctccgtcaggcttggagccgccgcttctcgctcgtccctgtccttctccagtgggcgccgacgccccgtggccgcgtccctctcgacctctgccaccgctgtaaaggaggctgttcagacagagaaggcaccaccagcactaggcccttattctcaggccatcaaagcaaataatcttgtgtttgtttctggagttcttggcttgaatcccgagaccaggaagtttatctctgaaaatgttgaggagcaaactgagcaggttatgaaaaacatgggcgagatattaaaagctagtggtgctaactattcttcagttgtgaagacaacgatcatgttggctgatctgcaggatttcaataaagtaaacgagatctatggcaaatatttcccggtgccagcacctgcacgatcaacctaccaagtggcggcgctgccactgaatgcccggattgagattgagtgcatcgctgctctctaatcagatcatccaaccactcattaaatcatcaataagcacccaggaatttgtggtagaggtacctgtaccagttcagtgtctgaaaactgcgggtaacaaacctttgtgtcccggataagtgatgtgtgtgtgtgtgtgagtgaacagtgcatctagtaggagaattgttgcgtggtttgttacttggattcttcgctctttagacaagaagtaccatggcatcaacatcaatagcctactgttttcttcccaataagaatgaattggcttcccc

SEQ ID NO: 7990 - protein, 179 aa, Zea mays subsp. mays
  peptide (1)..(179): Ceres Seq. ID no. 12343264
  misc_feature (61)..(179): Pfam Name: Endoribonuclease L-PSP Pfam Description: Endoribonuclease L-PSP
  misc_feature (1)..(179): Homolog of NCBI NO: 23617012 NR Description: putative translational inhibitor protein [Oryza
  misc_feature (1)..(179): Homolog of NCBI NO: 29420485 NR Description: translation-inhibitor protein [Gentiana triflora]
  misc_feature (21)..(179): Homolog of NCBI NO: 15231137 NR Description: translational inhibitor protein, putative; id: At3g20390.1, supported by cDNA: 20767., supported by cDNA: supported by cDNA: gi_16974536 [Arabidopsis thaliana]
  misc_feature (41)..(179): Homolog of NCBI NO: 9294558 NR Description: contains similarity to protein translation
  misc_feature (16)..(177): Homolog of NCBI NO: 39579795 NR Description: Hypothetical protein CBG24261 [Caenorhabditis
  misc_feature (51)..(177): Homolog of NCBI NO: 31616050 NR Description: Chain A, Crystal Structure Of A Human P14.5, A Inhibitor Reveals Different Mode Of Ligand Binding Near The Residues Of The YjgfUK114 PROTEIN FAMILY >gi|31616051|pdb|1ONI|B
  misc_feature (52)..(177): Homolog of NCBI NO: 5032215 NR Description: translational inhibitor protein p14.5 [Homo >gi|1717975|sp|P52758|UK14_HUMAN 14.5 kDa translational inhibitor (p14.5) (UK114 antigen homolog) >gi|1177435|emb|CAA64670.1| p14.5
  misc_feature (52)..(177): Homolog of NCBI NO: 30584193 NR Description: Homo sapiens translational inhibitor protein
  misc_feature (16)..(177): Homolog of NCBI NO: 25148891 NR Description: YjgF family precursor [Caenorhabditis elegans]
  misc_feature (48)..(177): Homolog of NCBI NO: 25148896 NR Description: YjgF family (15.2 kD) [Caenorhabditis elegans]
MAWSAAAVSRFAAASPPAAPISVRLGAAASRSSLSFSSGRRRPVAASLSTSATAVKEAVQTEKAPPALGPYSQAIKANNLVFVSGVLGLNPETRKFISENVEEQTEQVMKNMGEILKASGANYSSVVKTTIMLADLQDFNKVNEIYGKYFPVPAPARSTYQVAALPLNARIEIECIAAL

SEQ ID NO: 7991 - DNA, 868 bp, Zea mays subsp. mays
  misc_feature (1)..(868): Ceres Seq. ID no. 12402305
  misc_feature: MA Experiment ID: 108522 Result: Up-regulated in Transcription
  misc_feature: MA Experiment 108522 PARAMETER Experiment Name: Zm_42deg_Heat_P Parameter: Age (day) Value: 8
  misc_feature: MA Experiment 108522 PARAMETER Experiment Name: Zm_42deg_Heat_P Parameter: Organism Value: Zea mays
  misc_feature: MA Experiment 108522 PARAMETER Experiment Name: Zm_42deg_Heat_P Parameter: Plant Line Value: 35A19
  misc_feature: MA Experiment 108522 PARAMETER Experiment Name: Zm_42deg_Heat_P Parameter: Temperature (deg C) Value: 42 vs. 22
  misc_feature: MA Experiment 108522 PARAMETER Experiment Name: Zm_42deg_Heat_P Parameter: Timepoint (hr) Value: 1
  misc_feature: MA Experiment 108522 PARAMETER Experiment Name: Zm_42deg_Heat_P Parameter: Tissue Value: Aerial
  misc_feature: MA Experiment ID: 108523 Result: Up-regulated in Transcription
  misc_feature: MA Experiment 108523 PARAMETER Experiment Name: Zm_42deg_Heat_P Parameter: Age (day) Value: 8
  misc_feature: MA Experiment 108523 PARAMETER Experiment Name: Zm_42deg_Heat_P Parameter: Organism Value: Zea mays
  misc_feature: MA Experiment 108523 PARAMETER Experiment Name: Zm_42deg_Heat_P Parameter: Plant Line Value: 35A19
  misc_feature: MA Experiment 108523 PARAMETER Experiment Name: Zm_42deg_Heat_P Parameter: Temperature (deg C) Value: 42 vs. 22
  misc_feature: MA Experiment 108523 PARAMETER Experiment Name: Zm_42deg_Heat_P Parameter: Timepoint (hr) Value: 6
  misc_feature: MA Experiment 108523 PARAMETER Experiment Name: Zm_42deg_Heat_P Parameter: Tissue Value: Aerial
  misc_feature: MA Experiment ID: 108526 Result: Up-regulated in Transcription
  misc_feature: MA Experiment 108526 PARAMETER Experiment Name: Zm_5mM_NO_P Parameter: Age (day) Value: 8
  misc_feature: MA Experiment 108526 PARAMETER Experiment Name: Zm_5mM_NO_P Parameter: Organism Value: Zea mays
  misc_feature: MA Experiment 108526 PARAMETER Experiment Name: Zm_5mM_NO_P Parameter: Plant Line Value: 35A19
  misc_feature: MA Experiment 108526 PARAMETER Experiment Name: Zm_5mM_NO_P Parameter: Timepoint (hr) Value: 1
  misc_feature: MA Experiment 108526 PARAMETER Experiment Name: Zm_5mM_NO_P Parameter: Tissue Value: Aerial
  misc_feature: MA Experiment 108526 PARAMETER Experiment Name: Zm_5mM_NO_P Parameter: Treatment Value: 5mM NO vs. No Treatment
  misc_feature: MA Experiment ID: 108527 Result: Up-regulated in Transcription
  misc_feature: MA Experiment 108527 PARAMETER Experiment Name: Zm_5mM_NO_P Parameter: Age (day) Value: 8
  misc_feature: MA Experiment 108527 PARAMETER Experiment Name: Zm_5mM_NO_P Parameter: Organism Value: Zea mays
  misc_feature: MA Experiment 108527 PARAMETER Experiment Name: Zm_5mM_NO_P Parameter: Plant Line Value: 35A19
  misc_feature: MA Experiment 108527 PARAMETER Experiment Name: Zm_5mM_NO_P Parameter: Timepoint (hr) Value: 6
  misc_feature: MA Experiment 108527 PARAMETER Experiment Name: Zm_5mM_NO_P Parameter: Tissue Value: Aerial
  misc_feature: MA Experiment 108527 PARAMETER Experiment Name: Zm_5mM_NO_P Parameter: Treatment Value: 5mM NO vs. No Treatment
  misc_feature: MA Experiment ID: 108528 Result: Up-regulated in Transcription
  misc_feature: MA Experiment 108528 PARAMETER Experiment Name: Zm_Imbibed_Seeds_P Parameter: Age (day) Value: 5 vs. 2
  misc_feature: MA Experiment 108528 PARAMETER Experiment Name: Zm_Imbibed_Seeds_P Parameter: Organism Value: Zea mays
  misc_feature: MA Experiment 108528 PARAMETER Experiment Name: Zm_Imbibed_Seeds_P Parameter: Plant Line Value: 35A19
  misc_feature: MA Experiment 108528 PARAMETER Experiment Name: Zm_Imbibed_Seeds_P Parameter: Tissue Value: Aerial vs. Embryo
  misc_feature: MA Experiment ID: 108529 Result: Up-regulated in Transcription
  misc_feature: MA Experiment 108529 PARAMETER Experiment Name: Zm_Imbibed_Seeds_P Parameter: Age (day) Value: 5 vs. 2
  misc_feature: MA Experiment 108529 PARAMETER Experiment Name: Zm_Imbibed_Seeds_P Parameter: Organism Value: Zea mays
  misc_feature: MA Experiment 108529 PARAMETER Experiment Name: Zm_Imbibed_Seeds_P Parameter: Plant Line Value: 35A19
  misc_feature: MA Experiment 108529 PARAMETER Experiment Name: Zm_Imbibed_Seeds_P Parameter: Tissue Value: Roots vs. Embryo
  misc_feature: MA Experiment ID: 108530 Result: Up-regulated in Transcription
  misc_feature: MA Experiment 108530 PARAMETER Experiment Name: Zm_Imbibed_Seeds_P Parameter: Age (day) Value: 6 vs. 2
  misc_feature: MA Experiment 108530 PARAMETER Experiment Name: Zm_Imbibed_Seeds_P Parameter: Organism Value: Zea mays
  misc_feature: MA Experiment 108530 PARAMETER Experiment Name: Zm_Imbibed_Seeds_P Parameter: Plant Line Value: 35A19
  misc_feature: MA Experiment 108530 PARAMETER Experiment Name: Zm_Imbibed_Seeds_P Parameter: Tissue Value: Aerial vs. Embryo
  misc_feature: MA Experiment ID: 108534 Result: Up-regulated in Transcription
  misc_feature: MA Experiment 108534 PARAMETER Experiment Name: Zm_4deg_Cold_P Parameter: Age (hr) Value: 8
  misc_feature: MA Experiment 108534 PARAMETER Experiment Name: Zm_4deg_Cold_P Parameter: Organism Value: Zea mays
  misc_feature: MA Experiment 108534 PARAMETER Experiment Name: Zm_4deg_Cold_P Parameter: Plant Line Value: 35A19
  misc_feature: MA Experiment 108534 PARAMETER Experiment Name: Zm_4deg_Cold_P Parameter: Temperature (deg C) Value: 4 vs. 22
  misc_feature: MA Experiment 108534 PARAMETER Experiment Name: Zm_4deg_Cold_P Parameter: Timepoint (hr) Value: 6
  misc_feature: MA Experiment 108534 PARAMETER Experiment Name: Zm_4deg_Cold_P Parameter: Tissue Value: Aerial
  misc_feature: MA Experiment ID: 108535 Result: Down-regulated in Transcription
  misc_feature: MA Experiment 108535 PARAMETER Experiment Name: Zm_Meristem_P Parameter: Age (day) Value: 8
  misc_feature: MA Experiment 108535 PARAMETER Experiment Name: Zm_Meristem_P Parameter: Organism Value: Zea mays
  misc_feature: MA Experiment 108535 PARAMETER Experiment Name: Zm_Meristem_P Parameter: Plant Line Value: 35A19
  misc_feature: MA Experiment 108535 PARAMETER Experiment Name: Zm_Meristem_P Parameter: Tissue Value: Root Meristem vs. Above Root Meristem
  misc_feature: MA Experiment ID: 108542 Result: Up-regulated in Transcription
  misc_feature: MA Experiment 108542 PARAMETER Experiment Name: Zm_150mM_NaCl_P Parameter: Age (day) Value: 8
  misc_feature: MA Experiment 108542 PARAMETER Experiment Name: Zm_150mM_NaCl_P Parameter: Organism Value: Zea mays
  misc_feature: MA Experiment 108542 PARAMETER Experiment Name: Zm_150mM_NaCl_P Parameter: Plant Line Value: 35A19
  misc_feature: MA Experiment 108542 PARAMETER Experiment Name: Zm_150mM_NaCl_P Parameter: Timepoint (hr) Value: 6
  misc_feature: MA Experiment 108542 PARAMETER Experiment Name: Zm_150mM_NaCl_P Parameter: Tissue Value: Aerial
  misc_feature: MA Experiment 108542 PARAMETER Experiment Name: Zm_150mM_NaCl_P Parameter: Treatment Value: 150mM NaCl vs. No Treatment
  misc_feature: MA Experiment ID: 108545 Result: Down-regulated in Transcription
  misc_feature: MA Experiment 108545 PARAMETER Experiment Name: Zm_Imbibed_Seeds_P Parameter: Age (day) Value: 3 vs. 2
  misc_feature: MA Experiment 108545 PARAMETER Experiment Name: Zm_Imbibed_Seeds_P Parameter: Organism Value: Zea mays
  misc_feature: MA Experiment 108545 PARAMETER Experiment Name: Zm_Imbibed_Seeds_P Parameter: Plant Line Value: 35A19
  misc_feature: MA Experiment 108545 PARAMETER Experiment Name: Zm_Imbibed_Seeds_P Parameter: Tissue Value: Aerial vs. Embryo
  misc_feature: MA Experiment ID: 108546 Result: Up-regulated in Transcription
  misc_feature: MA Experiment 108546 PARAMETER Experiment Name: Zm_Imbibed_Seeds_P Parameter: Age (day) Value: 3 vs. 2
  misc_feature: MA Experiment 108546 PARAMETER Experiment Name: Zm_Imbibed_Seeds_P Parameter: Organism Value: Zea mays
  misc_feature: MA Experiment 108546 PARAMETER Experiment Name: Zm_Imbibed_Seeds_P Parameter: Plant Line Value: 35A19
  misc_feature: MA Experiment 108546 PARAMETER Experiment Name: Zm_Imbibed_Seeds_P Parameter: Tissue Value: Roots vs. Embryo
  misc_feature: MA Experiment ID: 108559 Result: Up-regulated in Transcription
  misc_feature: MA Experiment 108559 PARAMETER Experiment Name: Zm_5mM_NO_P Parameter: Age (day) Value: 8
  misc_feature: MA Experiment 108559 PARAMETER Experiment Name: Zm_5mM_NO_P Parameter: Organism Value: Zea mays
  misc_feature: MA Experiment 108559 PARAMETER Experiment Name: Zm_5mM_NO_P Parameter: Plant Line Value: 35A19
  misc_feature: MA Experiment 108559 PARAMETER Experiment Name: Zm_5mM_NO_P Parameter: Timepoint (hr) Value: 12
  misc_feature: MA Experiment 108559 PARAMETER Experiment Name: Zm_5mM_NO_P Parameter: Tissue Value: Aerial
  misc_feature: MA Experiment 108559 PARAMETER Experiment Name: Zm_5mM_NO_P Parameter: Treatment Value: 5mM NO vs. No Treatment
  misc_feature: MA Experiment ID: 20000108 Result: Down-regulated in Transcription
  misc_feature: MA Experiment 20000108 PARAMETER Experiment Name: Zm_Root-Tips_P Parameter: Age (day) Value: 12
  misc_feature: MA Experiment 20000108 PARAMETER Experiment Name: Zm_Root-Tips_P Parameter: Organism Value: Zea mays
  misc_feature: MA Experiment 20000108 PARAMETER Experiment Name: Zm_Root-Tips_P Parameter: Tissue Value: Root tips vs. Root mid region    35
  misc_feature: MA Experiment 20000108 PARAMETER Experiment Name: Zm_Root-Tips_P Parameter: Tissue Value: Root tips vs. Root mid region   Sequence Listing-Misc Features (4)
  misc_feature: MA Experiment ID: 20000488 Result: Down-regulated in Transcription
  misc_feature: MA Experiment 20000488 PARAMETER Experiment Name: Zm_50mM_NH4NO3_L_to_H_P Parameter: Organism Value: Zea mays
  misc_feature: MA Experiment 20000488 PARAMETER Experiment Name: Zm_50mM_NH4NO3_L_to_H_P Parameter: Timepoint (hr) Value: 8
  misc_feature: MA Experiment 20000488 PARAMETER Experiment Name: Zm_50mM_NH4NO3_L_to_H_P Parameter: Tissue Value: Leaves
  misc_feature: MA Experiment 20000488 PARAMETER Experiment Name: Zm_50mM_NH4NO3_L_to_H_P Parameter: Treatment Value: 50mM NH4NO3 vs. 100mM Mannitol
  misc_feature: MA Experiment ID: 20000532 Result: Up-regulated in Transcription
  misc_feature: MA Experiment 20000532 PARAMETER Experiment Name: Zm_0.001percent_MeJA_P Parameter: Age (day) Value: 10
  misc_feature: MA Experiment 20000532 PARAMETER Experiment Name: Zm_0.001percent_MeJA_P Parameter: Organism Value: Zea mays
  misc_feature: MA Experiment 20000532 PARAMETER Experiment Name: Zm_0.001percent_MeJA_P Parameter: Plant Line Value: 35A19
  misc_feature: MA Experiment 20000532 PARAMETER Experiment Name: Zm_0.001percent_MeJA_P Parameter: Timepoint (hr) Value: 48
  misc_feature: MA Experiment 20000532 PARAMETER Experiment Name: Zm_0.001percent_MeJA_P Parameter: Tissue Value: Aerial
  misc_feature: MA Experiment 20000532 PARAMETER Experiment Name: Zm_0.001percent_MeJA_P Parameter: Treatment Value: 0.001percent MeJA vs. No Treatment
  misc_feature: MA Experiment ID: 20000533 Result: Up-regulated in Transcription
  misc_feature: MA Experiment 20000533 PARAMETER Experiment Name: Zm_0.001percent_MeJA_P Parameter: Age (day) Value: 11
  misc_feature: MA Experiment 20000533 PARAMETER Experiment Name: Zm_0.001percent_MeJA_P Parameter: Organism Value: Zea mays
  misc_feature: MA Experiment 20000533 PARAMETER Experiment Name: Zm_0.001percent_MeJA_P Parameter: Plant Line Value: 35A19
  misc_feature: MA Experiment 20000533 PARAMETER Experiment Name: Zm_0.001percent_MeJA_P Parameter: Timepoint (hr) Value: 72
  misc_feature: MA Experiment 20000533 PARAMETER Experiment Name: Zm_0.001percent_MeJA_P Parameter: Tissue Value: Aerial
  misc_feature: MA Experiment 20000533 PARAMETER Experiment Name: Zm_0.001percent_MeJA_P Parameter: Treatment Value: 0.001percent MeJA vs. No Treatment
  misc_feature: MA Experiment ID: 20000535 Result: Down-regulated in Transcription
  misc_feature: MA Experiment 20000535 PARAMETER Experiment Name: Zm_Hybrid_Seed_Dev_P Parameter: DAP Value: 30 vs. 12
  misc_feature: MA Experiment 20000535 PARAMETER Experiment Name: Zm_Hybrid_Seed_Dev_P Parameter: Organism Value: Zea mays
  misc_feature: MA Experiment 20000535 PARAMETER Experiment Name: Zm_Hybrid_Seed_Dev_P Parameter: Plant Line Value: 35A19
  misc_feature: MA Experiment 20000535 PARAMETER Experiment Name: Zm_Hybrid_Seed_Dev_P Parameter: Tissue Value: Embryo vs. Unfert Floret
  misc_feature: MA Experiment ID: 20000626 Result: Up-regulated in Transcription
  misc_feature: MA Experiment 20000626 PARAMETER Experiment Name: Zm_Herbicide-Treatments_P Parameter: Timepoint (hr) Value: 12
  misc_feature: MA Experiment 20000626 PARAMETER Experiment Name: Zm_Herbicide-Treatments_P Parameter: Tissue Value: Aerial
  misc_feature: MA Experiment 20000626 PARAMETER Experiment Name: Zm_Herbicide-Treatments_P Parameter: Treatment Value: Roundup vs. No Treatment
  misc_feature: MA Experiment ID: 20001608 Result: Down-regulated in Transcription
  misc_feature: MA Experiment 20001608 PARAMETER Experiment Name: Zm_50ppm_KNO3_L-to-H_P Parameter: Age (day) Value: 21
  misc_feature: MA Experiment 20001608 PARAMETER Experiment Name: Zm_50ppm_KNO3_L-to-H_P Parameter: Organism Value: Zea mays
  misc_feature: MA Experiment 20001608 PARAMETER Experiment Name: Zm_50ppm_KNO3_L-to-H_P Parameter: Plant Line Value: 35A19
  misc_feature: MA Experiment 20001608 PARAMETER Experiment Name: Zm_50ppm_KNO3_L-to-H_P Parameter: Timepoint (hr) Value: 48
  misc_feature: MA Experiment 20001608 PARAMETER Experiment Name: Zm_50ppm_KNO3_L-to-H_P Parameter: Tissue Value: Shoots
  misc_feature: MA Experiment 20001608 PARAMETER Experiment Name: Zm_50ppm_KNO3_L-to-H_P Parameter: Treatment Value: 50ppm KNO3 vs. 50ppm KCl
atcacccaatgacccaatcaatcgctaacaacccaataaaccgcggacgcagcagaaaagaggtagaggggcggcgaccgatggcgcggcggggcacggaggcgttccctaacctgggcgcgcactgcgacaagccggactgcaaccagctcgacttcctgcccttcgactgcgacggctgcggcaaggtcttctgcgccgcgcaccggacctacggggaccacggctgcgccaaggcggcggaccagggccgcaccgtcgtcgtctgcccggactgcggcgacgccatcgagaggctggttccggggcagggcgagcgggagatcctggaggcgcacgtgcggtcgcggcgctgcgacccgggcaagaagcgcaagccccggtgccccgcgcggcggtgcagggagcagctcaccttctccaacacccaggactgcaagggctgcggccggaaggtgtgcctcaagcaccaggttcccggccgaccacgactgcgccgccagcgcaccaggagctgccgcggcggcgaggagggccagcggggagtgcggccgcggcgcgcggaaggaagggagcggcggctgggcgctgccggcgtccatccggagcctcaagatcttctgaggcttgccaatttgccatactgtcacgttgcagccaggtcaccacagcgaaagaaactgttcctcgagatggatgcagcgaacgtatttcatatgttctttggttgatgtataaatgcattttcaggctaagaatctgaaatacagaaactggacattgaaatgttccatcaatactggtttttaaggcagatgtgaagacagacaaatttgcgttcaatatactacgggagttttttttttcc

SEQ ID NO: 7992 - protein, 242 aa, Zea mays subsp. mays
  peptide (1)..(242): Ceres Seq. ID no. 12402306
  misc_feature (47)..(83): Pfam Name: AN1-like Zinc finger Pfam Description: AN1-like Zinc finger
  misc_feature (27)..(159): Homolog of NCBI NO: 15232930 NR Description: zinc finger protein (PMZ), putative; protein id:
  misc_feature (31)..(157): Homolog of NCBI NO: 33146779 NR Description: putative arsenite inducible RNA associated
  misc_feature (31)..(157): Homolog of NCBI NO: 30688811 NR Description: zinc finger protein (PMZ) -related [Arabidopsis >gi|17529076|gb|AAL38748.1| unknown protein [Arabidopsis >gi|20465575|gb|AAM20270.1| unknown protein [Arabidopsis
  misc_feature (31)..(157): Homolog of NCBI NO: 15230311 NR Description: putative protein; protein id: At3g57480.1
  misc_feature (35)..(213): Homolog of NCBI NO: 15079311 NR Description: RIKEN cDNA 1110060O18 gene [Mus musculus]
  misc_feature (32)..(182): Homolog of NCBI NO: 31207325 NR Description: ENSANGP00000015397 [Anopheles gambiae]
  misc_feature (35)..(159): Homolog of NCBI NO: 21312112 NR Description: RIKEN cDNA 1110060O18 [Mus musculus]
  misc_feature (35)..(159): Homolog of NCBI NO: 34876869 NR Description: similar to RIKEN cDNA 1110060O18 [Rattus
  misc_feature (35)..(222): Homolog of NCBI NO: 20270357 NR Description: hypothetical protein BC018415 [Homo sapiens]
  misc_feature (35)..(159): Homolog of NCBI NO: 21749694 NR Description: unnamed protein product [Homo sapiens]
HPMTQSIANNPINRGRSRKEVEGRRPMARRGTEAFPNLGAHCDKPDCNQLDFLPFDCDGCGKVFCAAHRTYGDHGCAKAADQGRTVVVCPDCGDAIERLVPGQGEREILEAHVRSRRCDPGKKRKPRCPARRCREQLTFSNTQDCKGCGRKVCLKHQVPGRPRLRRQRTRSCRGGEEGQRGVRPRRAEGRERRLGAAGVHPEPQDLLRLANLPYCHVAARSPQRKKLFLEMDAANVFHMFFG

SEQ ID NO: 7993 - protein, 240 aa, Zea mays subsp. mays
  peptide (1)..(240): Ceres Seq. ID no. 12402307
  misc_feature (45)..(81): Pfam Name: AN1-like Zinc finger Pfam Description: AN1-like Zinc finger
  misc_feature (25)..(157): Homolog of NCBI NO: 15232930 NR Description: zinc finger protein (PMZ), putative; protein id:
  misc_feature (29)..(155): Homolog of NCBI NO: 33146779 NR Description: putative arsenite inducible RNA associated
  misc_feature (29)..(155): Homolog of NCBI NO: 30688811 NR Description: zinc finger protein (PMZ) -related [Arabidopsis >gi|17529076|gb|AAL38748.1| unknown protein [Arabidopsis >gi|20465575|gb|AAM20270.1| unknown protein [Arabidopsis
  misc_feature (29)..(155): Homolog of NCBI NO: 15230311 NR Description: putative protein; protein id: At3g57480.1
  misc_feature (33)..(211): Homolog of NCBI NO: 15079311 NR Description: RIKEN cDNA 1110060O18 gene [Mus musculus]
  misc_feature (30)..(180): Homolog of NCBI NO: 31207325 NR Description: ENSANGP00000015397 [Anopheles gambiae]
  misc_feature (33)..(157): Homolog of NCBI NO: 21312112 NR Description: RIKEN cDNA 1110060O18 [Mus musculus]
  misc_feature (33)..(157): Homolog of NCBI NO: 34876869 NR Description: similar to RIKEN cDNA 1110060O18 [Rattus
  misc_feature (33)..(220): Homolog of NCBI NO: 20270357 NR Description: hypothetical protein BC018415 [Homo sapiens]
  misc_feature (33)..(157): Homolog of NCBI NO: 21749694 NR Description: unnamed protein product [Homo sapiens]
MTQSIANNPINRGRSRKEVEGRRPMARRGTEAFPNLGAHCDKPDCNQLDFLPFDCDGCGKVFCAAHRTYGDHGCAKAADQGRTVVVCPDCGDAIERLVPGQGEREILEAHVRSRRCDPGKKRKPRCPARRCREQLTFSNTQDCKGCGRKVCLKHQVPGRPRLRRQRTRSCRGGEEGQRGVRPRRAEGRERRLGAAGVHPEPQDLLRLANLPYCHVAARSPQRKKLFLEMDAANVFHMFFG

SEQ ID NO: 7994 - protein, 216 aa, Zea mays subsp. mays
  peptide (1)..(216): Ceres Seq. ID no. 12402308
  misc_feature (21)..(57): Pfam Name: AN1-like Zinc finger Pfam Description: AN1-like Zinc finger
  misc_feature (1)..(133): Homolog of NCBI NO: 15232930 NR Description: zinc finger protein (PMZ), putative; protein id:
  misc_feature (5)..(131): Homolog of NCBI NO: 33146779 NR Description: putative arsenite inducible RNA associated
  misc_feature (5)..(131): Homolog of NCBI NO: 30688811 NR Description: zinc finger protein (PMZ) -related [Arabidopsis >gi|17529076|gb|AAL38748.1| unknown protein [Arabidopsis >gi|20465575|gb|AAM20270.1| unknown protein [Arabidopsis
  misc_feature (5)..(131): Homolog of NCBI NO: 15230311 NR Description: putative protein; protein id: At3g57480.1
  misc_feature (9)..(187): Homolog of NCBI NO: 15079311 NR Description: RIKEN cDNA 1110060O18 gene [Mus musculus]
  misc_feature (6)..(156): Homolog of NCBI NO: 31207325 NR Description: ENSANGP00000015397 [Anopheles gambiae]
  misc_feature (9)..(133): Homolog of NCBI NO: 21312112 NR Description: RIKEN cDNA 1110060O18 [Mus musculus]
  misc_feature (9)..(133): Homolog of NCBI NO: 34876869 NR Description: similar to RIKEN cDNA 1110060O18 [Rattus
  misc_feature (9)..(196): Homolog of NCBI NO: 20270357 NR Description: hypothetical protein BC018415 [Homo sapiens]
  misc_feature (9)..(133): Homolog of NCBI NO: 21749694 NR Description: unnamed protein product [Homo sapiens]
MARRGTEAFPNLGAHCDKPDCNQLDFLPFDCDGCGKVFCAAHRTYGDHGCAKAADQGRTVVVCPDCGDAIERLVPGQGEREILEAHVRSRRCDPGKKRKPRCPARRCREQLTFSNTQDCKGCGRKVCLKHQVPGRPRLRRQRTRSCRGGEEGQRGVRPRRAEGRERRLGAAGVHPEPQDLLRLANLPYCHVAARSPQRKKLFLEMDAANVFHMFFG

SEQ ID NO: 7995 - DNA, 1016 bp, Zea mays subsp. mays
  misc_feature (1)..(1016): Ceres Seq. ID no. 12402434
  misc_feature: MA Experiment ID: 108522 Result: Up-regulated in Transcription
  misc_feature: MA Experiment 108522 PARAMETER Experiment Name: Zm_42deg_Heat_P Parameter: Age (day) Value: 8
  misc_feature: MA Experiment 108522 PARAMETER Experiment Name: Zm_42deg_Heat_P Parameter: Organism Value: Zea mays
  misc_feature: MA Experiment 108522 PARAMETER Experiment Name: Zm_42deg_Heat_P Parameter: Plant Line Value: 35A19
  misc_feature: MA Experiment 108522 PARAMETER Experiment Name: Zm_42deg_Heat_P Parameter: Temperature (deg C) Value: 42 vs. 22
  misc_feature: MA Experiment 108522 PARAMETER Experiment Name: Zm_42deg_Heat_P Parameter: Timepoint (hr) Value: 1
  misc_feature: MA Experiment 108522 PARAMETER Experiment Name: Zm_42deg_Heat_P Parameter: Tissue Value: Aerial
  misc_feature: MA Experiment ID: 108523 Result: Up-regulated in Transcription
  misc_feature: MA Experiment 108523 PARAMETER Experiment Name: Zm_42deg_Heat_P Parameter: Age (day) Value: 8
  misc_feature: MA Experiment 108523 PARAMETER Experiment Name: Zm_42deg_Heat_P Parameter: Organism Value: Zea mays
  misc_feature: MA Experiment 108523 PARAMETER Experiment Name: Zm_42deg_Heat_P Parameter: Plant Line Value: 35A19
  misc_feature: MA Experiment 108523 PARAMETER Experiment Name: Zm_42deg_Heat_P Parameter: Temperature (deg C) Value: 42 vs. 22
  misc_feature: MA Experiment 108523 PARAMETER Experiment Name: Zm_42deg_Heat_P Parameter: Timepoint (hr) Value: 6
  misc_feature: MA Experiment 108523 PARAMETER Experiment Name: Zm_42deg_Heat_P Parameter: Tissue Value: Aerial
  misc_feature: MA Experiment ID: 108543 Result: Down-regulated in Transcription
gtccgatgcctctcatcgccagaagaccttcccggtacgacgccaccgcaccacggaattaacacgagcactgcatcggtgaatctgcaagcccgcccgcccgtcgctcgccaccgccatgttcggcatcgtcttcccggaccacacctttcccctcgacgccaccgctttcgcgcaggtggcgcccaattcctgggtcctcgatctctccactctcgcgctcgccgccgcgccgcgctcggcagtcgtcttcctgctccccgctgccgtgacagcgctgccgcccggcaaggccgtctccgtctacttccaggccgccaccaaccgccccttcgcattcttaggtgcgctcgggcccacgcgcccctcggccagcttcccgcttccggaggccggcgacgagccggagcctgctgtgggccccgctaaactgggtgtcgccgtggaggacgcggccgcgttaccgccgccccctgacgagcagcgtgccgagcgtgtggcgctccgtgtcggcgagaacctgttcaacttcatgcaatcgttctgcggtgccgacggcggcaagctggtagtgcccacggacatcctggaccggtggttccgcaagttccaggagcgagccaagaaagatccagcgtacctcaagagcttcgacttttgagagcaaaggtcattttgcagataccatgtgggaagaatgttggatagcagtatagcagtgttttgtgtctcatctaggccctcctacattgcacacaatgttacgccgtgtcttaggggctgactgaatgaaggtgcatatgcagcttctctatctattgtagagaaggacaacgacaccaaaagcgaccagataggttagatggtggtgcttcaagtccttgcacccgaatgagaagtcttcttagaaacttttacaacaatacatcggatggttctgcttcgaatgtcagtattttgtggataatatctgggaatctcaggactaagatgaatgcgattgagttcttgtcgcg

SEQ ID NO: 7996 - protein, 180 aa, Zea mays subsp. mays
  peptide (1)..(180): Ceres Seq. ID no. 12402435
  misc_feature (1)..(177): Pfam Name: Protein of unknown function (DUF775) Pfam Description: Protein of unknown function (DUF775)
  misc_feature (1)..(178): Homolog of NCBI NO: 15218916 NR Description: hypothetical protein; protein id: At1g66080.1
  misc_feature (1)..(180): Homolog of NCBI NO: 27357983 NR Description: Hypothetical protein [Oryza sativa (japonica
MFGIVFPDHTFPLDATAFAQVAPNSWVLDLSTLALAAAPRSAVVFLLPAAVTALPPGKAVSVYFQAATNRPFAFLGALGPTRPSASFPLPEAGDEPEPAVGPAKLGVAVEDAAALPPPPDEQRAERVALRVGENLFNFMQSFCGADGGKLVVPTDILDRWFRKFQERAKKDPAYLKSFDF

SEQ ID NO: 7997 - protein, 142 aa, Zea mays subsp. mays
  peptide (1)..(142): Ceres Seq. ID no. 12402436
VRCLSSPEDLPGTTPPHHGINTSTASVNLQARPPVARHRHVRHRLPGPHLSPRRHRFRAGGAQFLGPRSLHSRARRRAALGSRLPAPRCRDSAAARQGRLRLLPGRHQPPLRILRCARAHAPLGQLPASGGRRRAGACCGPR

SEQ ID NO: 7998 - DNA, 968 bp, Zea mays subsp. mays
  misc_feature (1)..(968): Ceres Seq. ID no. 12380992
  misc_feature: MA Experiment ID: 20000534 Result: Up-regulated in Transcription
  misc_feature: MA Experiment 20000534 PARAMETER Experiment Name: Zm_Hybrid_Pollen_P Parameter: Age (day) Value: 8
  misc_feature: MA Experiment 20000534 PARAMETER Experiment Name: Zm_Hybrid_Pollen_P Parameter: Organism Value: Zea mays
  misc_feature: MA Experiment 20000534 PARAMETER Experiment Name: Zm_Hybrid_Pollen_P Parameter: Plant Line Value: 35A19
  misc_feature: MA Experiment 20000534 PARAMETER Experiment Name: Zm_Hybrid_Pollen_P Parameter: Tissue Value: Pollen vs. Aerial
aaaggaagggcgggggctacatagcaagctccttctctgctaaccgagcgagagcagctgtagcctacactctacagctagcgcaactaacgaccatccacctgaaagagggagaaggcattgggggttcttgaagtgcagtgcaggtccaggcagctagcagtgaccgagagtgagggacagggcaatggcgtcctcactgctccactgccccgacaagctcccgttcttggacgtggaggccatcctccacatgaaagaggggctcggcgagaccagctacgcgcagaactcctcgcttcagaagcgaggcatggacacgctgaggagcctcatcaccagcaccgcgacggacgtgtacgtctcgcagatgccggagcggttcacggtggccgacctcggctgctcctcggggcccaacgcgctgtgcctggcggaggacatcgtggggagcatcggcagggcgtgcggccggtcgtcgcggccgccgcccgagttctcggtgctgctcaacgacctgcccaccaacgacttcaacaccatcttcttcagcctgccggagttcgccgaccggctcgaggccgcggccaggacggacgagtggggccggccgatggtgttcctgtccggggtcccgggctcgttctacgggcggctgttccccaggacgagcgtgcacttcatctgctcctgctccagcctgcactggctctcccaggtccctccggggctcttcgacgagacggacaacaggccggtgaacaaggggaagatgtacatctcgagcaccagccccgcggccgtgccgctggcctacctgaggcagttccggagagacttcggcgtgttcctcaggtcgcgcgcggccgaggtcgtccccggcggccggatggtcctcgccatgcttggccggcagaccgaaggctacgtcgaccggcggacgaccttcctctgggagctcctctccg

SEQ ID NO: 7999 - protein, 260 aa, Zea mays subsp. mays
  peptide (1)..(260): Ceres Seq. ID no. 12380993
  misc_feature (50)..(259): Pfam Name: SAM dependent carboxyl methyltransferase Pfam Description: SAM dependent carboxyl methyltransferase
  misc_feature (50)..(259): Pfam Name: SAM dependent carboxyl methyltransferase Pfam Description: SAM dependent carboxyl methyltransferase
  misc_feature (1)..(259): Homolog of NCBI NO: 34911508 NR Description: putative S-adenosyl-L-methionine:salicylic acid
  misc_feature (3)..(259): Homolog of NCBI NO: 34911486 NR Description: putative S-adenosyl-L-methionine:salicylic acid
  misc_feature (16)..(259): Homolog of NCBI NO: 15234420 NR Description: S-adenosyl-L-methionine:carboxyl family; protein id: At4g36470.1 [Arabidopsis thaliana]
  misc_feature (15)..(259): Homolog of NCBI NO: 6651395 NR Description: floral nectary-specific protein [Brassica rapa
  misc_feature (15)..(259): Homolog of NCBI NO: 15223601 NR Description: S-adenosyl-L-methionine:jasmonic acid carboxyl (JMT); protein id: At1g19640.1, supported by cDNA: gi_13676828
  misc_feature (3)..(259): Homolog of NCBI NO: 34911486 NR Description: putative S-adenosyl-L-methionine:salicylic acid
  misc_feature (15)..(259): Homolog of NCBI NO: 6651395 NR Description: floral nectary-specific protein [Brassica rapa
  misc_feature (20)..(259): Homolog of NCBI NO: 18461100 NR Description: S-adenosyl-L-methionine:salicylic acid calboxyl
  misc_feature (15)..(259): Homolog of NCBI NO: 34809619 NR Description: Chain X, Crystal Structure Of Salicylic Acid
  misc_feature (15)..(259): Homolog of NCBI NO: 13235641 NR Description: S-adenosyl-L-methionine:salicylic acid carboxyl
  misc_feature (20)..(259): Homolog of NCBI NO: 23957318 NR Description: S-adenosyl-L-methionine:salicylic acid
  misc_feature (15)..(259): Homolog of NCBI NO: 13676829 NR Description: S-adenosyl-L-methionine:jasmonic acid carboxyl
  misc_feature (15)..(259): Homolog of NCBI NO: 15223601 NR Description: S-adenosyl-L-methionine:jasmonic acid carboxyl (JMT); protein id: At1g19640.1, supported by cDNA: gi_13676828
  misc_feature (16)..(259): Homolog of NCBI NO: 15234420 NR Description: S-adenosyl-L-methionine:carboxyl family; protein id: At4g36470.1 [Arabidopsis thaliana]
  misc_feature (1)..(259): Homolog of NCBI NO: 34911508 NR Description: putative S-adenosyl-L-methionine:salicylic acid
  misc_feature (15)..(259): Homolog of NCBI NO: 13676829 NR Description: S-adenosyl-L-methionine:jasmonic acid carboxyl
  misc_feature (20)..(259): Homolog of NCBI NO: 23957318 NR Description: S-adenosyl-L-methionine:salicylic acid
  misc_feature (15)..(259): Homolog of NCBI NO: 13235641 NR Description: S-adenosyl-L-methionine:salicylic acid carboxyl
  misc_feature (15)..(259): Homolog of NCBI NO: 34809619 NR Description: Chain X, Crystal Structure Of Salicylic Acid
  misc_feature (20)..(259): Homolog of NCBI NO: 18461100 NR Description: S-adenosyl-L-methionine:salicylic acid calboxyl
MASSLLHCPDKLPFLDVEAILHMKEGLGETSYAQNSSLQKRGMDTLRSLITSTATDVYVSQMPERFTVADLGCSSGPNALCLAEDIVGSIGRACGRSSRPPPEFSVLLNDLPTNDFNTIFFSLPEFADRLEAAARTDEWGRPMVFLSGVPGSFYGRLFPRTSVHFICSCSSLHWLSQVPPGLFDETDNRPVNKGKMYISSTSPAAVPLAYLRQFRRDFGVFLRSRAAEVVPGGRMVLAMLGRQTEGYVDRRTTFLWELLS

SEQ ID NO: 8000 - protein, 238 aa, Zea mays subsp. mays
  peptide (1)..(238): Ceres Seq. ID no. 12380994
  misc_feature (28)..(237): Pfam Name: SAM dependent carboxyl methyltransferase Pfam Description: SAM dependent carboxyl methyltransferase
  misc_feature (28)..(237): Pfam Name: SAM dependent carboxyl methyltransferase Pfam Description: SAM dependent carboxyl methyltransferase
  misc_feature (1)..(237): Homolog of NCBI NO: 34911508 NR Description: putative S-adenosyl-L-methionine:salicylic acid
  misc_feature (1)..(237): Homolog of NCBI NO: 34911486 NR Description: putative S-adenosyl-L-methionine:salicylic acid
  misc_feature (1)..(237): Homolog of NCBI NO: 15234420 NR Description: S-adenosyl-L-methionine:carboxyl family; protein id: At4g36470.1 [Arabidopsis thaliana]
  misc_feature (1)..(237): Homolog of NCBI NO: 6651395 NR Description: floral nectary-specific protein [Brassica rapa
  misc_feature (1)..(237): Homolog of NCBI NO: 15223601 NR Description: S-adenosyl-L-methionine:jasmonic acid carboxyl (JMT); protein id: At1g19640.1, supported by cDNA: gi_13676828
  misc_feature (1)..(237): Homolog of NCBI NO: 34911486 NR Description: putative S-adenosyl-L-methionine:salicylic acid
  misc_feature (1)..(237): Homolog of NCBI NO: 6651395 NR Description: floral nectary-specific protein [Brassica rapa
  misc_feature (1)..(237): Homolog of NCBI NO: 18461100 NR Description: S-adenosyl-L-methionine:salicylic acid calboxyl
  misc_feature (1)..(237): Homolog of NCBI NO: 34809619 NR Description: Chain X, Crystal Structure Of Salicylic Acid
  misc_feature (1)..(237): Homolog of NCBI NO: 13235641 NR Description: S-adenosyl-L-methionine:salicylic acid carboxyl
  misc_feature (1)..(237): Homolog of NCBI NO: 23957318 NR Description: S-adenosyl-L-methionine:salicylic acid
  misc_feature (1)..(237): Homolog of NCBI NO: 13676829 NR Description: S-adenosyl-L-methionine:jasmonic acid carboxyl
  misc_feature (1)..(237): Homolog of NCBI NO: 15223601 NR Description: S-adenosyl-L-methionine:jasmonic acid carboxyl (JMT); protein id: At1g19640.1, supported by cDNA: gi_13676828
  misc_feature (1)..(237): Homolog of NCBI NO: 15234420 NR Description: S-adenosyl-L-methionine:carboxyl family; protein id: At4g36470.1 [Arabidopsis thaliana]
  misc_feature (1)..(237): Homolog of NCBI NO: 34911508 NR Description: putative S-adenosyl-L-methionine:salicylic acid
  misc_feature (1)..(237): Homolog of NCBI NO: 13676829 NR Description: S-adenosyl-L-methionine:jasmonic acid carboxyl
  misc_feature (1)..(237): Homolog of NCBI NO: 23957318 NR Description: S-adenosyl-L-methionine:salicylic acid
  misc_feature (1)..(237): Homolog of NCBI NO: 13235641 NR Description: S-adenosyl-L-methionine:salicylic acid carboxyl
  misc_feature (1)..(237): Homolog of NCBI NO: 34809619 NR Description: Chain X, Crystal Structure Of Salicylic Acid
  misc_feature (1)..(237): Homolog of NCBI NO: 18461100 NR Description: S-adenosyl-L-methionine:salicylic acid calboxyl
MKEGLGETSYAQNSSLQKRGMDTLRSLITSTATDVYVSQMPERFTVADLGCSSGPNALCLAEDIVGSIGRACGRSSRPPPEFSVLLNDLPTNDFNTIFFSLPEFADRLEAAARTDEWGRPMVFLSGVPGSFYGRLFPRTSVHFICSCSSLHWLSQVPPGLFDETDNRPVNKGKMYISSTSPAAVPLAYLRQFRRDFGVFLRSRAAEVVPGGRMVLAMLGRQTEGYVDRRTTFLWELLS

SEQ ID NO: 8001 - protein, 218 aa, Zea mays subsp. mays
  peptide (1)..(218): Ceres Seq. ID no. 12380995
  misc_feature (8)..(217): Pfam Name: SAM dependent carboxyl methyltransferase Pfam Description: SAM dependent carboxyl methyltransferase
  misc_feature (8)..(217): Pfam Name: SAM dependent carboxyl methyltransferase Pfam Description: SAM dependent carboxyl methyltransferase
  misc_feature (1)..(217): Homolog of NCBI NO: 34911508 NR Description: putative S-adenosyl-L-methionine:salicylic acid
  misc_feature (1)..(217): Homolog of NCBI NO: 34911486 NR Description: putative S-adenosyl-L-methionine:salicylic acid
  misc_feature (1)..(217): Homolog of NCBI NO: 15234420 NR Description: S-adenosyl-L-methionine:carboxyl family; protein id: At4g36470.1 [Arabidopsis thaliana]
  misc_feature (1)..(217): Homolog of NCBI NO: 6651395 NR Description: floral nectary-specific protein [Brassica rapa
  misc_feature (1)..(217): Homolog of NCBI NO: 15223601 NR Description: S-adenosyl-L-methionine:jasmonic acid carboxyl (JMT); protein id: At1g19640.1, supported by cDNA: gi_13676828
  misc_feature (1)..(217): Homolog of NCBI NO: 34911486 NR Description: putative S-adenosyl-L-methionine:salicylic acid
  misc_feature (1)..(217): Homolog of NCBI NO: 6651395 NR Description: floral nectary-specific protein [Brassica rapa
  misc_feature (1)..(217): Homolog of NCBI NO: 18461100 NR Description: S-adenosyl-L-methionine:salicylic acid calboxyl
  misc_feature (1)..(217): Homolog of NCBI NO: 34809619 NR Description: Chain X, Crystal Structure Of Salicylic Acid
  misc_feature (1)..(217): Homolog of NCBI NO: 13235641 NR Description: S-adenosyl-L-methionine:salicylic acid carboxyl
  misc_feature (1)..(217): Homolog of NCBI NO: 23957318 NR Description: S-adenosyl-L-methionine:salicylic acid
  misc_feature (1)..(217): Homolog of NCBI NO: 13676829 NR Description: S-adenosyl-L-methionine:jasmonic acid carboxyl
  misc_feature (1)..(217): Homolog of NCBI NO: 15223601 NR Description: S-adenosyl-L-methionine:jasmonic acid carboxyl (JMT); protein id: At1g19640.1, supported by cDNA: gi_13676828
  misc_feature (1)..(217): Homolog of NCBI NO: 15234420 NR Description: S-adenosyl-L-methionine:carboxyl family; protein id: At4g36470.1 [Arabidopsis thaliana]
  misc_feature (1)..(217): Homolog of NCBI NO: 34911508 NR Description: putative S-adenosyl-L-methionine:salicylic acid
  misc_feature (1)..(217): Homolog of NCBI NO: 13676829 NR Description: S-adenosyl-L-methionine:jasmonic acid carboxyl
  misc_feature (1)..(217): Homolog of NCBI NO: 23957318 NR Description: S-adenosyl-L-methionine:salicylic acid
  misc_feature (1)..(217): Homolog of NCBI NO: 13235641 NR Description: S-adenosyl-L-methionine:salicylic acid carboxyl
  misc_feature (1)..(217): Homolog of NCBI NO: 34809619 NR Description: Chain X, Crystal Structure Of Salicylic Acid
  misc_feature (1)..(217): Homolog of NCBI NO: 18461100 NR Description: S-adenosyl-L-methionine:salicylic acid calboxyl
MDTLRSLITSTATDVYVSQMPERFTVADLGCSSGPNALCLAEDIVGSIGRACGRSSRPPPEFSVLLNDLPTNDFNTIFFSLPEFADRLEAAARTDEWGRPMVFLSGVPGSFYGRLFPRTSVHFICSCSSLHWLSQVPPGLFDETDNRPVNKGKMYISSTSPAAVPLAYLRQFRRDFGVFLRSRAAEVVPGGRMVLAMLGRQTEGYVDRRTTFLWELLS

SEQ ID NO: 8002 - DNA, 782 bp, Zea mays subsp. mays
  misc_feature (1)..(782): Ceres Seq. ID no. 12358043
  misc_feature: MA Experiment ID: 108504 Result: Down-regulated in Transcription
  misc_feature: MA Experiment 108504 PARAMETER Experiment Name: Zm_Drought_P Parameter: Age (day) Value: 8
  misc_feature: MA Experiment 108504 PARAMETER Experiment Name: Zm_Drought_P Parameter: Organism Value: Zea mays
  misc_feature: MA Experiment 108504 PARAMETER Experiment Name: Zm_Drought_P Parameter: Plant Line Value: 35A19
  misc_feature: MA Experiment 108504 PARAMETER Experiment Name: Zm_Drought_P Parameter: Timepoint (hr) Value: 12
  misc_feature: MA Experiment 108504 PARAMETER Experiment Name: Zm_Drought_P Parameter: Tissue Value: Aerial
  misc_feature: MA Experiment 108504 PARAMETER Experiment Name: Zm_Drought_P Parameter: Treatment Value: Drought vs. No Drought
  misc_feature: MA Experiment ID: 108522 Result: Down-regulated in Transcription
  misc_feature: MA Experiment 108522 PARAMETER Experiment Name: Zm_42deg_Heat_P Parameter: Age (day) Value: 8
  misc_feature: MA Experiment 108522 PARAMETER Experiment Name: Zm_42deg_Heat_P Parameter: Organism Value: Zea mays
  misc_feature: MA Experiment 108522 PARAMETER Experiment Name: Zm_42deg_Heat_P Parameter: Plant Line Value: 35A19
  misc_feature: MA Experiment 108522 PARAMETER Experiment Name: Zm_42deg_Heat_P Parameter: Temperature (deg C) Value: 42 vs. 22
  misc_feature: MA Experiment 108522 PARAMETER Experiment Name: Zm_42deg_Heat_P Parameter: Timepoint (hr) Value: 1
  misc_feature: MA Experiment 108522 PARAMETER Experiment Name: Zm_42deg_Heat_P Parameter: Tissue Value: Aerial
  misc_feature: MA Experiment ID: 108523 Result: Down-regulated in Transcription
  misc_feature: MA Experiment 108523 PARAMETER Experiment Name: Zm_42deg_Heat_P Parameter: Age (day) Value: 8
  misc_feature: MA Experiment 108523 PARAMETER Experiment Name: Zm_42deg_Heat_P Parameter: Organism Value: Zea mays
  misc_feature: MA Experiment 108523 PARAMETER Experiment Name: Zm_42deg_Heat_P Parameter: Plant Line Value: 35A19
  misc_feature: MA Experiment 108523 PARAMETER Experiment Name: Zm_42deg_Heat_P Parameter: Temperature (deg C) Value: 42 vs. 22
  misc_feature: MA Experiment 108523 PARAMETER Experiment Name: Zm_42deg_Heat_P Parameter: Timepoint (hr) Value: 6
  misc_feature: MA Experiment 108523 PARAMETER Experiment Name: Zm_42deg_Heat_P Parameter: Tissue Value: Aerial
  misc_feature: MA Experiment ID: 108535 Result: Up-regulated in Transcription
  misc_feature: MA Experiment 108535 PARAMETER Experiment Name: Zm_Meristem_P Parameter: Age (day) Value: 8
  misc_feature: MA Experiment 108535 PARAMETER Experiment Name: Zm_Meristem_P Parameter: Organism Value: Zea mays
  misc_feature: MA Experiment 108535 PARAMETER Experiment Name: Zm_Meristem_P Parameter: Plant Line Value: 35A19
  misc_feature: MA Experiment 108535 PARAMETER Experiment Name: Zm_Meristem_P Parameter: Tissue Value: Root Meristem vs. Above Root Meristem
  misc_feature: MA Experiment ID: 108543 Result: Up-regulated in Transcription
  misc_feature: MA Experiment ID: 108687 Result: Down-regulated in Transcription
  misc_feature: MA Experiment 108687 PARAMETER Experiment Name: Zm_Embryos-Flowers__P Parameter: Tissue Value: Embryo vs. Aerial+
  misc_feature: MA Experiment ID: 20000478 Result: Down-regulated in Transcription
  misc_feature: MA Experiment 20000478 PARAMETER Experiment Name: Zm_5mM_SA_P Parameter: Age (day) Value: 11
  misc_feature: MA Experiment 20000478 PARAMETER Experiment Name: Zm_5mM_SA_P Parameter: Organism Value: Zea mays
  misc_feature: MA Experiment 20000478 PARAMETER Experiment Name: Zm_5mM_SA_P Parameter: Plant Line Value: 35A19
  misc_feature: MA Experiment 20000478 PARAMETER Experiment Name: Zm_5mM_SA_P Parameter: Timepoint (hr) Value: 72
  misc_feature: MA Experiment 20000478 PARAMETER Experiment Name: Zm_5mM_SA_P Parameter: Tissue Value: Aerial
  misc_feature: MA Experiment 20000478 PARAMETER Experiment Name: Zm_5mM_SA_P Parameter: Treatment Value: 5mM SA vs. No Treatment
  misc_feature: MA Experiment ID: 20000479 Result: Down-regulated in Transcription
  misc_feature: MA Experiment 20000479 PARAMETER Experiment Name: Zm_Drought_P Parameter: Age (day) Value: 10
  misc_feature: MA Experiment 20000479 PARAMETER Experiment Name: Zm_Drought_P Parameter: Organism Value: Zea mays
  misc_feature: MA Experiment 20000479 PARAMETER Experiment Name: Zm_Drought_P Parameter: Plant Line Value: 35A19
  misc_feature: MA Experiment 20000479 PARAMETER Experiment Name: Zm_Drought_P Parameter: Timepoint (hr) Value: 48
  misc_feature: MA Experiment 20000479 PARAMETER Experiment Name: Zm_Drought_P Parameter: Tissue Value: Aerial
  misc_feature: MA Experiment 20000479 PARAMETER Experiment Name: Zm_Drought_P Parameter: Treatment Value: Drought vs. No Drought
  misc_feature: MA Experiment ID: 20000487 Result: Down-regulated in Transcription
  misc_feature: MA Experiment 20000487 PARAMETER Experiment Name: Zm_50mM_NH4NO3_L_to_H_P Parameter: Organism Value: Zea mays
  misc_feature: MA Experiment 20000487 PARAMETER Experiment Name: Zm_50mM_NH4NO3_L_to_H_P Parameter: Timepoint (hr) Value: 4
  misc_feature: MA Experiment 20000487 PARAMETER Experiment Name: Zm_50mM_NH4NO3_L_to_H_P Parameter: Tissue Value: Leaves
  misc_feature: MA Experiment 20000487 PARAMETER Experiment Name: Zm_50mM_NH4NO3_L_to_H_P Parameter: Treatment Value: 50mM NH4NO3 vs. 100mM Mannitol
  misc_feature: MA Experiment ID: 20000626 Result: Down-regulated in Transcription
  misc_feature: MA Experiment 20000626 PARAMETER Experiment Name: Zm_Herbicide-Treatments_P Parameter: Timepoint (hr) Value: 12
  misc_feature: MA Experiment 20000626 PARAMETER Experiment Name: Zm_Herbicide-Treatments_P Parameter: Tissue Value: Aerial
  misc_feature: MA Experiment 20000626 PARAMETER Experiment Name: Zm_Herbicide-Treatments_P Parameter: Treatment Value: Roundup vs. No Treatment
  misc_feature: MA Experiment ID: 20000632 Result: Down-regulated in Transcription
  misc_feature: MA Experiment 20000632 PARAMETER Experiment Name: Zm_Herbicide-Treatments_P Parameter: Timepoint (hr) Value: 4
  misc_feature: MA Experiment 20000632 PARAMETER Experiment Name: Zm_Herbicide-Treatments_P Parameter: Tissue Value: Aerial
  misc_feature: MA Experiment 20000632 PARAMETER Experiment Name: Zm_Herbicide-Treatments_P Parameter: Treatment Value: Glean vs. No Treatment
cccactccaaacctccctctctcgacctcgacccctcgcccgcaaagccccgcaagccagcggcatcccgcttcctcggcaggcttccaagacccaacccaacagcttccgagcgagtacggcggcggcgacgatggcggccaagtcgcacacacgcaaggcgttcctcctctgcaactacgtcctcctgggcgcctcctccagctgcatcttcctcacgctgtcgctgcgcctgctgccgtccccgtgcggcctgctcctgctcttcctccacgccctcaccgccgtcttctccgcggccggctgctcgggctccttcacggcgcccgccacgcccgcgcagtggcacaacgcgcacaccgcgggagccgcgctcaccgccatcttccagggcgccatcgcgctgctcgcgttcacccgcacctccgacttcctcgccgagctccagtcctacgtccgcgacgaggacggcgccgtcatcctcaagatggtcggagggctcggcaccgccatcttcgtcctcgagtgggccgcgctcgcgcttgccttctccctccgcctcgacgaggatgacgacgacgacgacctccaggccaagaactggcaatcgtaccatgtctgatcccatccactgctggcctgggctccttcaaaatgagattctttgatgtctattctattattgtactattgctgtcattcttttgtactacggtgtactgttatgactgttcaaccaaaataaataaataccaaagcaaatatatattattgcttttgtt

SEQ ID NO: 8003 - protein, 221 aa, Zea mays subsp. mays
  peptide (1)..(221): Ceres Seq. ID no. 12358044
  misc_feature (90)..(183): Pfam Name: Cation efflux family Pfam Description: Cation efflux family
  misc_feature (90)..(183): Pfam Name: Cation efflux family Pfam Description: Cation efflux family
  misc_feature (2)..(198): Homolog of NCBI NO: 11359723 NR Description: proteophosphoglycan, membrane-associated - Leishmania major (fragment) >gi|5420389|emb|CAB46680.1|
  misc_feature (47)..(200): Homolog of NCBI NO: 38175466 NR Description: putative high-affinity potassium transporter
  misc_feature (55)..(206): Homolog of NCBI NO: 11359723 NR Description: proteophosphoglycan, membrane-associated - Leishmania major (fragment) >gi|5420389|emb|CAB46680.1|
  misc_feature (2)..(202): Homolog of NCBI NO: 13592175 NR Description: ppg3 [Leishmania major]
  misc_feature (2)..(202): Homolog of NCBI NO: 5420387 NR Description: proteophosphoglycan [Leishmania major]
  misc_feature (47)..(200): Homolog of NCBI NO: 38175466 NR Description: putative high-affinity potassium transporter
  misc_feature (2)..(202): Homolog of NCBI NO: 13592175 NR Description: ppg3 [Leishmania major]
  misc_feature (35)..(196): Homolog of NCBI NO: 5420387 NR Description: proteophosphoglycan [Leishmania major]
  misc_feature (2)..(206): Homolog of NCBI NO: 25143299 NR Description: pre-mRNA splicing SR protein related RSR-1 (68.2
  misc_feature (2)..(208): Homolog of NCBI NO: 13592175 NR Description: ppg3 [Leishmania major]
  misc_feature (2)..(206): Homolog of NCBI NO: 13592175 NR Description: ppg3 [Leishmania major]
  misc_feature (48)..(202): Homolog of NCBI NO: 11359723 NR Description: proteophosphoglycan, membrane-associated - Leishmania major (fragment) >gi|5420389|emb|CAB46680.1|
  misc_feature (2)..(202): Homolog of NCBI NO: 5420387 NR Description: proteophosphoglycan [Leishmania major]
  misc_feature (55)..(206): Homolog of NCBI NO: 11359723 NR Description: proteophosphoglycan, membrane-associated - Leishmania major (fragment) >gi|5420389|emb|CAB46680.1|
  misc_feature (2)..(198): Homolog of NCBI NO: 11359723 NR Description: proteophosphoglycan, membrane-associated - Leishmania major (fragment) >gi|5420389|emb|CAB46680.1|
  misc_feature (48)..(202): Homolog of NCBI NO: 11359723 NR Description: proteophosphoglycan, membrane-associated - Leishmania major (fragment) >gi|5420389|emb|CAB46680.1|
  misc_feature (2)..(206): Homolog of NCBI NO: 13592175 NR Description: ppg3 [Leishmania major]
  misc_feature (2)..(208): Homolog of NCBI NO: 13592175 NR Description: ppg3 [Leishmania major]
  misc_feature (2)..(206): Homolog of NCBI NO: 25143299 NR Description: pre-mRNA splicing SR protein related RSR-1 (68.2
  misc_feature (35)..(196): Homolog of NCBI NO: 5420387 NR Description: proteophosphoglycan [Leishmania major]
HSKPPSLDLDPSPAKPRKPAASRFLGRLPRPNPTASERVRRRRRWRPSRTHARRSSSATTSSWAPPPAASSSRCRCACCRPRAACSCSSSTPSPPSSPRPAARAPSRRPPRPRSGTTRTPREPRSPPSSRAPSRCSRSPAPPTSSPSSSPTSATRTAPSSSRWSEGSAPPSSSSSGPRSRLPSPSASTRMTTTTTSRPRTGNRTMSDPIHCWPGLLQNEIL

SEQ ID NO: 8004 - protein, 206 aa, Zea mays subsp. mays
  peptide (1)..(206): Ceres Seq. ID no. 12358045
  misc_feature (49)..(206): Homolog of NCBI NO: 34907616 NR Description: contains EST C27797(C52876)~unknown protein
  misc_feature (47)..(204): Homolog of NCBI NO: 15239379 NR Description: putative protein; protein id: At5g36710.1 thaliana] >gi|8885623|dbj|BAA97553.1| to unknown protein [Arabidopsis thaliana]
  misc_feature (47)..(204): Homolog of NCBI NO: 15239407 NR Description: putative protein; protein id: At5g36800.1
  misc_feature (42)..(186): Homolog of NCBI NO: 38345379 NR Description: OSJNBa0067K08.8 [Oryza sativa (japonica
  misc_feature (39)..(186): Homolog of NCBI NO: 21703131 NR Description: AT5g16250/T21H19_170 [Arabidopsis thaliana]
  misc_feature (39)..(186): Homolog of NCBI NO: 15237310 NR Description: putative protein; protein id: At5g16250.1, by cDNA: 18222. [Arabidopsis thaliana] >gi|11346160|pir||T51495
  misc_feature (39)..(186): Homolog of NCBI NO: 21553926 NR Description: unknown [Arabidopsis thaliana]
  misc_feature (50)..(195): Homolog of NCBI NO: 18396262 NR Description: expressed protein; protein id: At3g02640.1, by cDNA: 4861., supported by cDNA: gi_17065095 [Arabidopsis
  misc_feature (49)..(206): Homolog of NCBI NO: 34907616 NR Description: contains EST C27797(C52876)~unknown protein
  misc_feature (47)..(204): Homolog of NCBI NO: 15239379 NR Description: putative protein; protein id: At5g36710.1 thaliana] >gi|8885623|dbj|BAA97553.1| to unknown protein [Arabidopsis thaliana]
  misc_feature (47)..(204): Homolog of NCBI NO: 15239407 NR Description: putative protein; protein id: At5g36800.1
  misc_feature (42)..(186): Homolog of NCBI NO: 38345379 NR Description: OSJNBa0067K08.8 [Oryza sativa (japonica
  misc_feature (39)..(186): Homolog of NCBI NO: 21703131 NR Description: AT5g16250/T21H19_170 [Arabidopsis thaliana]
  misc_feature (39)..(186): Homolog of NCBI NO: 15237310 NR Description: putative protein; protein id: At5g16250.1, by cDNA: 18222. [Arabidopsis thaliana] >gi|11346160|pir||T51495
  misc_feature (39)..(186): Homolog of NCBI NO: 21553926 NR Description: unknown [Arabidopsis thaliana]
  misc_feature (50)..(195): Homolog of NCBI NO: 18396262 NR Description: expressed protein; protein id: At3g02640.1, by cDNA: 4861., supported by cDNA: gi_17065095 [Arabidopsis
PLQTSLSRPRPLARKAPQASGIPLPRQASKTQPNSFRASTAAATMAAKSHTRKAFLLCNYVLLGASSSCIFLTLSLRLLPSPCGLLLLFLHALTAVFSAAGCSGSFTAPATPAQWHNAHTAGAALTAIFQGAIALLAFTRTSDFLAELQSYVRDEDGAVILKMVGGLGTAIFVLEWAALALAFSLRLDEDDDDDDLQAKNWQSYHV

SEQ ID NO: 8005 - protein, 190 aa, Zea mays subsp. mays
  peptide (1)..(190): Ceres Seq. ID no. 12358046
PTPNLPLSTSTPRPQSPASQRHPASSAGFQDPTQQLPSEYGGGDDGGQVAHTQGVPPLQLRPPGRLLQLHLPHAVAAPAAVPVRPAPALPPRPHRRLLRGRLLGLLHGARHARAVAQRAHRGSRAHRHLPGRHRAARVHPHLRLPRRAPVLRPRRGRRRHPQDGRRARHRHLRPRVGRARACLLPPPRRG

SEQ ID NO: 8006 - protein, 162 aa, Zea mays subsp. mays
  peptide (1)..(162): Ceres Seq. ID no. 12358047
  misc_feature (5)..(162): Homolog of NCBI NO: 34907616 NR Description: contains EST C27797(C52876)~unknown protein
  misc_feature (3)..(160): Homolog of NCBI NO: 15239379 NR Description: putative protein; protein id: At5g36710.1 thaliana] >gi|8885623|dbj|BAA97553.1| to unknown protein [Arabidopsis thaliana]
  misc_feature (3)..(160): Homolog of NCBI NO: 15239407 NR Description: putative protein; protein id: At5g36800.1
  misc_feature (1)..(142): Homolog of NCBI NO: 38345379 NR Description: OSJNBa0067K08.8 [Oryza sativa (japonica
  misc_feature (1)..(142): Homolog of NCBI NO: 21703131 NR Description: AT5g16250/T21H19_170 [Arabidopsis thaliana]
  misc_feature (1)..(142): Homolog of NCBI NO: 15237310 NR Description: putative protein; protein id: At5g16250.1, by cDNA: 18222. [Arabidopsis thaliana] >gi|11346160|pir||T51495
  misc_feature (1)..(142): Homolog of NCBI NO: 21553926 NR Description: unknown [Arabidopsis thaliana]
  misc_feature (6)..(151): Homolog of NCBI NO: 18396262 NR Description: expressed protein; protein id: At3g02640.1, by cDNA: 4861., supported by cDNA: gi_17065095 [Arabidopsis
  misc_feature (5)..(162): Homolog of NCBI NO: 34907616 NR Description: contains EST C27797(C52876)~unknown protein
  misc_feature (3)..(160): Homolog of NCBI NO: 15239379 NR Description: putative protein; protein id: At5g36710.1 thaliana] >gi|8885623|dbj|BAA97553.1| to unknown protein [Arabidopsis thaliana]
  misc_feature (3)..(160): Homolog of NCBI NO: 15239407 NR Description: putative protein; protein id: At5g36800.1
  misc_feature (1)..(142): Homolog of NCBI NO: 38345379 NR Description: OSJNBa0067K08.8 [Oryza sativa (japonica
  misc_feature (1)..(142): Homolog of NCBI NO: 21703131 NR Description: AT5g16250/T21H19_170 [Arabidopsis thaliana]
  misc_feature (1)..(142): Homolog of NCBI NO: 15237310 NR Description: putative protein; protein id: At5g16250.1, by cDNA: 18222. [Arabidopsis thaliana] >gi|11346160|pir||T51495
  misc_feature (1)..(142): Homolog of NCBI NO: 21553926 NR Description: unknown [Arabidopsis thaliana]
  misc_feature (6)..(151): Homolog of NCBI NO: 18396262 NR Description: expressed protein; protein id: At3g02640.1, by cDNA: 4861., supported by cDNA: gi_17065095 [Arabidopsis
MAAKSHTRKAFLLCNYVLLGASSSCIFLTLSLRLLPSPCGLLLLFLHALTAVFSAAGCSGSFTAPATPAQWHNAHTAGAALTAIFQGAIALLAFTRTSDFLAELQSYVRDEDGAVILKMVGGLGTAIFVLEWAALALAFSLRLDEDDDDDDLQAKNWQSYHV

SEQ ID NO: 8007 - DNA, 902 bp, Zea mays subsp. mays
  misc_feature (1)..(902): Ceres Seq. ID no. 12341316
  misc_feature: MA Experiment ID: 108534 Result: Down-regulated in Transcription
  misc_feature: MA Experiment 108534 PARAMETER Experiment Name: Zm_4deg_Cold_P Parameter: Age (hr) Value: 8
  misc_feature: MA Experiment 108534 PARAMETER Experiment Name: Zm_4deg_Cold_P Parameter: Organism Value: Zea mays
  misc_feature: MA Experiment 108534 PARAMETER Experiment Name: Zm_4deg_Cold_P Parameter: Plant Line Value: 35A19
  misc_feature: MA Experiment 108534 PARAMETER Experiment Name: Zm_4deg_Cold_P Parameter: Temperature (deg C) Value: 4 vs. 22
  misc_feature: MA Experiment 108534 PARAMETER Experiment Name: Zm_4deg_Cold_P Parameter: Timepoint (hr) Value: 6
  misc_feature: MA Experiment 108534 PARAMETER Experiment Name: Zm_4deg_Cold_P Parameter: Tissue Value: Aerial
gtacctgtacgtcttctctatagagggagcaattggagagagagaaaagaaagaaagaaacaaagaacggcgaaaaatggtcgatgccggcgacataacggccggagggccgccacgcgctcacgaggaggagcaagcgggaactccggcatacggttcggtggtcctcggcggcacttttgaccgcctccacgacggccaccgccgccttctcaaggcctccgcggatttggggagagaccggatcgtggtgggcgtctgcacgggacctatgctcgccaagaaggagtatgcggagcttattgagcccgtcgacaagcgcatcaagggtgtggaggattacatcaagtctataaagccagaactgatagtacaagtggagcctattgaggacccttatggcccatccataactgatgagaagttggatgccattattgtcagtaaggagacattaaatggtggactggctgtaaataggaaaagagaagagaaagggttcccactgttgaaggttgaggttgttgatctcctttccggcggtgtggagggggaaaaattgagttcttctgctttaaggaaacttgaggcagaacaagctcaacaaagtgaaacaaaatctggtagccttgaagcttcttagggaggaaattgaatactttgatctggttagctgaatgcacaaatacgggggtgatctgctccaagctcagtgtgaacaaaaaatatgatcagagctgacagtttggttacctttctagaggaataatcttcgaacactggcccatggccctgtaacagtattgctctaaccttctaaaatcaacctggcaacatagactctcccctactaaccaaatttacaaattttgtattggcaatgccatctgaatgttaaaagg

SEQ ID NO: 8008 - protein, 213 aa, Zea mays subsp. mays
  peptide (1)..(213): Ceres Seq. ID no. 12341317
  misc_feature (29)..(204): Homolog of NCBI NO: 34393473 NR Description: bifunctional phosphopantetheine adenylyl
  misc_feature (40)..(204): Homolog of NCBI NO: 15224138 NR Description: hypothetical protein; protein id: At2g18250.1
  misc_feature (43)..(194): Homolog of NCBI NO: 25143409 NR Description: Cytidylyltransferase and Dephospho-CoA kinase kD) [Caenorhabditis elegans] >gi|25167211|gb|AAK29952.3|
  misc_feature (31)..(194): Homolog of NCBI NO: 39589394 NR Description: Hypothetical protein CBG22156 [Caenorhabditis
  misc_feature (1)..(193): Homolog of NCBI NO: 31213039 NR Description: ENSANGP00000014315 [Anopheles gambiae]
  misc_feature (56)..(205): Homolog of NCBI NO: 6321716 NR Description: Protein required for cell viability; Ygr277cp cerevisiae] >gi|1723781|sp|P53332|YG5T_YEAST HYPOTHETICAL 34.3 KD
  misc_feature (51)..(193): Homolog of NCBI NO: 20094940 NR Description: Predicted nucleotidyltransferase of the HIGH [Methanopyrus kandleri AV19] >gi|19888182|gb|AAM02717.1| nucleotidyltransferase of the HIGH superfamily [Methanopyrus
  misc_feature (40)..(193): Homolog of NCBI NO: 24658602 NR Description: CG10575-PA [Drosophila melanogaster]
  misc_feature (56)..(194): Homolog of NCBI NO: 20465246 NR Description: bifunctional phosphopantetheine adenylyl
  misc_feature (51)..(194): Homolog of NCBI NO: 27229125 NR Description: CoA synthase; 4'-phosphopantetheine
  misc_feature (29)..(204): Homolog of NCBI NO: 34393473 NR Description: bifunctional phosphopantetheine adenylyl
  misc_feature (40)..(204): Homolog of NCBI NO: 15224138 NR Description: hypothetical protein; protein id: At2g18250.1
  misc_feature (43)..(194): Homolog of NCBI NO: 25143409 NR Description: Cytidylyltransferase and Dephospho-CoA kinase kD) [Caenorhabditis elegans] >gi|25167211|gb|AAK29952.3|
  misc_feature (31)..(194): Homolog of NCBI NO: 39589394 NR Description: Hypothetical protein CBG22156 [Caenorhabditis
  misc_feature (1)..(193): Homolog of NCBI NO: 31213039 NR Description: ENSANGP00000014315 [Anopheles gambiae]
  misc_feature (56)..(205): Homolog of NCBI NO: 6321716 NR Description: Protein required for cell viability; Ygr277cp cerevisiae] >gi|1723781|sp|P53332|YG5T_YEAST HYPOTHETICAL 34.3 KD
  misc_feature (51)..(193): Homolog of NCBI NO: 20094940 NR Description: Predicted nucleotidyltransferase of the HIGH [Methanopyrus kandleri AV19] >gi|19888182|gb|AAM02717.1| nucleotidyltransferase of the HIGH superfamily [Methanopyrus
  misc_feature (40)..(193): Homolog of NCBI NO: 24658602 NR Description: CG10575-PA [Drosophila melanogaster]
  misc_feature (56)..(194): Homolog of NCBI NO: 20465246 NR Description: bifunctional phosphopantetheine adenylyl
  misc_feature (51)..(194): Homolog of NCBI NO: 27229125 NR Description: CoA synthase; 4'-phosphopantetheine
YLYVFSIEGAIGEREKKERNKERRKMVDAGDITAGGPPRAHEEEQAGTPAYGSVVLGGTFDRLHDGHRRLLKASADLGRDRIVVGVCTGPMLAKKEYAELIEPVDKRIKGVEDYIKSIKPELIVQVEPIEDPYGPSITDEKLDAIIVSKETLNGGLAVNRKREEKGFPLLKVEVVDLLSGGVEGEKLSSSALRKLEAEQAQQSETKSGSLEAS

SEQ ID NO: 8009 - protein, 188 aa, Zea mays subsp. mays
  peptide (1)..(188): Ceres Seq. ID no. 12341318
  misc_feature (4)..(179): Homolog of NCBI NO: 34393473 NR Description: bifunctional phosphopantetheine adenylyl
  misc_feature (15)..(179): Homolog of NCBI NO: 15224138 NR Description: hypothetical protein; protein id: At2g18250.1
  misc_feature (18)..(169): Homolog of NCBI NO: 25143409 NR Description: Cytidylyltransferase and Dephospho-CoA kinase kD) [Caenorhabditis elegans] >gi|25167211|gb|AAK29952.3|
  misc_feature (6)..(169): Homolog of NCBI NO: 39589394 NR Description: Hypothetical protein CBG22156 [Caenorhabditis
  misc_feature (1)..(168): Homolog of NCBI NO: 31213039 NR Description: ENSANGP00000014315 [Anopheles gambiae]
  misc_feature (31)..(180): Homolog of NCBI NO: 6321716 NR Description: Protein required for cell viability; Ygr277cp cerevisiae] >gi|1723781|sp|P53332|YG5T_YEAST HYPOTHETICAL 34.3 KD
  misc_feature (26)..(168): Homolog of NCBI NO: 20094940 NR Description: Predicted nucleotidyltransferase of the HIGH [Methanopyrus kandleri AV19] >gi|19888182|gb|AAM02717.1| nucleotidyltransferase of the HIGH superfamily [Methanopyrus
  misc_feature (15)..(168): Homolog of NCBI NO: 24658602 NR Description: CG10575-PA [Drosophila melanogaster]
  misc_feature (31)..(169): Homolog of NCBI NO: 20465246 NR Description: bifunctional phosphopantetheine adenylyl
  misc_feature (26)..(169): Homolog of NCBI NO: 27229125 NR Description: CoA synthase; 4'-phosphopantetheine
  misc_feature (4)..(179): Homolog of NCBI NO: 34393473 NR Description: bifunctional phosphopantetheine adenylyl
  misc_feature (15)..(179): Homolog of NCBI NO: 15224138 NR Description: hypothetical protein; protein id: At2g18250.1
  misc_feature (18)..(169): Homolog of NCBI NO: 25143409 NR Description: Cytidylyltransferase and Dephospho-CoA kinase kD) [Caenorhabditis elegans] >gi|25167211|gb|AAK29952.3|
  misc_feature (6)..(169): Homolog of NCBI NO: 39589394 NR Description: Hypothetical protein CBG22156 [Caenorhabditis
  misc_feature (1)..(168): Homolog of NCBI NO: 31213039 NR Description: ENSANGP00000014315 [Anopheles gambiae]
  misc_feature (31)..(180): Homolog of NCBI NO: 6321716 NR Description: Protein required for cell viability; Ygr277cp cerevisiae] >gi|1723781|sp|P53332|YG5T_YEAST HYPOTHETICAL 34.3 KD
  misc_feature (26)..(168): Homolog of NCBI NO: 20094940 NR Description: Predicted nucleotidyltransferase of the HIGH [Methanopyrus kandleri AV19] >gi|19888182|gb|AAM02717.1| nucleotidyltransferase of the HIGH superfamily [Methanopyrus
  misc_feature (15)..(168): Homolog of NCBI NO: 24658602 NR Description: CG10575-PA [Drosophila melanogaster]
  misc_feature (31)..(169): Homolog of NCBI NO: 20465246 NR Description: bifunctional phosphopantetheine adenylyl
  misc_feature (26)..(169): Homolog of NCBI NO: 27229125 NR Description: CoA synthase; 4'-phosphopantetheine
MVDAGDITAGGPPRAHEEEQAGTPAYGSVVLGGTFDRLHDGHRRLLKASADLGRDRIVVGVCTGPMLAKKEYAELIEPVDKRIKGVEDYIKSIKPELIVQVEPIEDPYGPSITDEKLDAIIVSKETLNGGLAVNRKREEKGFPLLKVEVVDLLSGGVEGEKLSSSALRKLEAEQAQQSETKSGSLEAS

SEQ ID NO: 8010 - protein, 123 aa, Zea mays subsp. mays
  peptide (1)..(123): Ceres Seq. ID no. 12341319
  misc_feature (1)..(114): Homolog of NCBI NO: 34393473 NR Description: bifunctional phosphopantetheine adenylyl
  misc_feature (1)..(114): Homolog of NCBI NO: 15224138 NR Description: hypothetical protein; protein id: At2g18250.1
  misc_feature (1)..(104): Homolog of NCBI NO: 25143409 NR Description: Cytidylyltransferase and Dephospho-CoA kinase kD) [Caenorhabditis elegans] >gi|25167211|gb|AAK29952.3|
  misc_feature (1)..(104): Homolog of NCBI NO: 39589394 NR Description: Hypothetical protein CBG22156 [Caenorhabditis
  misc_feature (1)..(103): Homolog of NCBI NO: 31213039 NR Description: ENSANGP00000014315 [Anopheles gambiae]
  misc_feature (1)..(115): Homolog of NCBI NO: 6321716 NR Description: Protein required for cell viability; Ygr277cp cerevisiae] >gi|1723781|sp|P53332|YG5T_YEAST HYPOTHETICAL 34.3 KD
  misc_feature (1)..(103): Homolog of NCBI NO: 20094940 NR Description: Predicted nucleotidyltransferase of the HIGH [Methanopyrus kandleri AV19] >gi|19888182|gb|AAM02717.1| nucleotidyltransferase of the HIGH superfamily [Methanopyrus
  misc_feature (1)..(103): Homolog of NCBI NO: 24658602 NR Description: CG10575-PA [Drosophila melanogaster]
  misc_feature (1)..(104): Homolog of NCBI NO: 20465246 NR Description: bifunctional phosphopantetheine adenylyl
  misc_feature (1)..(104): Homolog of NCBI NO: 27229125 NR Description: CoA synthase; 4'-phosphopantetheine
  misc_feature (1)..(114): Homolog of NCBI NO: 34393473 NR Description: bifunctional phosphopantetheine adenylyl
  misc_feature (1)..(114): Homolog of NCBI NO: 15224138 NR Description: hypothetical protein; protein id: At2g18250.1
  misc_feature (1)..(104): Homolog of NCBI NO: 25143409 NR Description: Cytidylyltransferase and Dephospho-CoA kinase kD) [Caenorhabditis elegans] >gi|25167211|gb|AAK29952.3|
  misc_feature (1)..(104): Homolog of NCBI NO: 39589394 NR Description: Hypothetical protein CBG22156 [Caenorhabditis
  misc_feature (1)..(103): Homolog of NCBI NO: 31213039 NR Description: ENSANGP00000014315 [Anopheles gambiae]
  misc_feature (1)..(115): Homolog of NCBI NO: 6321716 NR Description: Protein required for cell viability; Ygr277cp cerevisiae] >gi|1723781|sp|P53332|YG5T_YEAST HYPOTHETICAL 34.3 KD
  misc_feature (1)..(103): Homolog of NCBI NO: 20094940 NR Description: Predicted nucleotidyltransferase of the HIGH [Methanopyrus kandleri AV19] >gi|19888182|gb|AAM02717.1| nucleotidyltransferase of the HIGH superfamily [Methanopyrus
  misc_feature (1)..(103): Homolog of NCBI NO: 24658602 NR Description: CG10575-PA [Drosophila melanogaster]
  misc_feature (1)..(104): Homolog of NCBI NO: 20465246 NR Description: bifunctional phosphopantetheine adenylyl
  misc_feature (1)..(104): Homolog of NCBI NO: 27229125 NR Description: CoA synthase; 4'-phosphopantetheine
MLAKKEYAELIEPVDKRIKGVEDYIKSIKPELIVQVEPIEDPYGPSITDEKLDAIIVSKETLNGGLAVNRKREEKGFPLLKVEVVDLLSGGVEGEKLSSSALRKLEAEQAQQSETKSGSLEAS

SEQ ID NO: 8011 - DNA, 1197 bp, Zea mays subsp. mays
  misc_feature (1)..(1197): Ceres Seq. ID no. 12376601
  misc_feature: MA Experiment ID: 108527 Result: Up-regulated in Transcription
  misc_feature: MA Experiment 108527 PARAMETER Experiment Name: Zm_5mM_NO_P Parameter: Age (day) Value: 8
  misc_feature: MA Experiment 108527 PARAMETER Experiment Name: Zm_5mM_NO_P Parameter: Organism Value: Zea mays
  misc_feature: MA Experiment 108527 PARAMETER Experiment Name: Zm_5mM_NO_P Parameter: Plant Line Value: 35A19
  misc_feature: MA Experiment 108527 PARAMETER Experiment Name: Zm_5mM_NO_P Parameter: Timepoint (hr) Value: 6
  misc_feature: MA Experiment 108527 PARAMETER Experiment Name: Zm_5mM_NO_P Parameter: Tissue Value: Aerial
  misc_feature: MA Experiment 108527 PARAMETER Experiment Name: Zm_5mM_NO_P Parameter: Treatment Value: 5mM NO vs. No Treatment
  misc_feature: MA Experiment ID: 108529 Result: Up-regulated in Transcription
  misc_feature: MA Experiment 108529 PARAMETER Experiment Name: Zm_Imbibed_Seeds_P Parameter: Age (day) Value: 5 vs. 2
  misc_feature: MA Experiment 108529 PARAMETER Experiment Name: Zm_Imbibed_Seeds_P Parameter: Organism Value: Zea mays
  misc_feature: MA Experiment 108529 PARAMETER Experiment Name: Zm_Imbibed_Seeds_P Parameter: Plant Line Value: 35A19
  misc_feature: MA Experiment 108529 PARAMETER Experiment Name: Zm_Imbibed_Seeds_P Parameter: Tissue Value: Roots vs. Embryo
  misc_feature: MA Experiment ID: 20000492 Result: Down-regulated in Transcription
  misc_feature: MA Experiment 20000492 PARAMETER Experiment Name: Zm_Hybrid_Seed_Dev_P Parameter: DAP Value: 12
  misc_feature: MA Experiment 20000492 PARAMETER Experiment Name: Zm_Hybrid_Seed_Dev_P Parameter: Organism Value: Zea mays
  misc_feature: MA Experiment 20000492 PARAMETER Experiment Name: Zm_Hybrid_Seed_Dev_P Parameter: Plant Line Value: 35A19
  misc_feature: MA Experiment 20000492 PARAMETER Experiment Name: Zm_Hybrid_Seed_Dev_P Parameter: Tissue Value: Fert Kernel vs. Unfert Floret
gcacgagaccattacctagaacatcctaatcgaaaaggctggaggctcgcctagctggctctggcagcagcatctaccgttcgcttgctgcaaagagaacttccactggtgatatactgaaggcgttcagtttgtatgtcaaagcatgtccgtttaggatactatcacactatgtcgcaaacacgaccatcttaaacgctacgaagagcgccacaaggctgcacatcatagactacgggataatgtatggtttccagtggccagtcctcatgcagcggctctcaaagagacctggtggccccccgtaccttcggatcactggtatagactttcccctgtcaggattccgccctgcagagcgtgttgaggcgacagggcggcggttgcatgagtatgcccgtatgttcaatgtcccatttgaataccaagccattgctgccaagtgggatactatccaagttaaagatctcaacatgaagagcgatgagttcgtcgtcgttaactgcctctaccggatgaggaacatgatggacgagacggtgaccgatgacagcccgagaacgagggttttgaacacaatcaggaagctgaatccccatctgttcgttcatgggatcgtcaatggtacttacaatgcacccttcttcgtgacgcggtttaaggaggctatgttcttcttctcttcgatctttgatatgctcgaagcgaatgccttacggatggatgagcataggctgctgatagagagagagttctttggccgggaagctgtcaatgtgattgcctgtgagggcacagagaggattgaaaggccagagacctacaagcaatggcagatgaggaacctcagggcaggcttccggcagctagctctggacagggagataatgaagagagcaaggtacaaggtaagcaagagctatcagggggatttcctcgtggacgaagataacaagtggatgctacaaggttggaagggtcgtatcatatatgcactttcagcatggactagctagacttgtaaatattagtgagctactgagctgcttagctgacctcttccattaatttcttgattattcaccatttcattttgctgtattatgtttacgttgttgaatctagccctcttttagaaaccaaagttttgtatgtttgaattgactgcaataatagaatcttgtccgtgtctgcctc

SEQ ID NO: 8012 - protein, 257 aa, Zea mays subsp. mays
  peptide (1)..(257): Ceres Seq. ID no. 12376602
  misc_feature (1)..(165): Pfam Name: GRAS family transcription factor Pfam Description: GRAS family transcription factor
  misc_feature (1)..(255): Homolog of NCBI NO: 38346720 NR Description: OSJNBa0086O06.18 [Oryza sativa (japonica
  misc_feature (1)..(256): Homolog of NCBI NO: 32813435 NR Description: SCARECROW-like protein [Lilium longiflorum]
  misc_feature (1)..(255): Homolog of NCBI NO: 34908186 NR Description: P0406G08.7 [Oryza sativa (japonica
  misc_feature (1)..(255): Homolog of NCBI NO: 14719332 NR Description: putative SCARECROW gene regulator [Oryza sativa]
  misc_feature (1)..(255): Homolog of NCBI NO: 15222433 NR Description: transcription factor scarecrow-like 14, putative;
  misc_feature (1)..(255): Homolog of NCBI NO: 15224338 NR Description: putative SCARECROW gene regulator; protein id: [Arabidopsis thaliana] >gi|7485429|pir||T02531 probable SCARECROW
  misc_feature (1)..(249): Homolog of NCBI NO: 8778540 NR Description: F22G5.9 [Arabidopsis thaliana]
  misc_feature (1)..(255): Homolog of NCBI NO: 14719333 NR Description: putative SCARECROW gene regulator [Oryza sativa]
  misc_feature (1)..(255): Homolog of NCBI NO: 15227022 NR Description: putative SCARECROW gene regulator; protein id: [Arabidopsis thaliana] >gi|7487873|pir||T02736 probable SCARECROW
  misc_feature (1)..(255): Homolog of NCBI NO: 15238422 NR Description: scarecrow-like 11 - like; protein id: supported by cDNA: gi_14334655, supported by cDNA: gi_17065587
MYGFQWPVLMQRLSKRPGGPPYLRITGIDFPLSGFRPAERVEATGRRLHEYARMFNVPFEYQAIAAKWDTIQVKDLNMKSDEFVVVNCLYRMRNMMDETVTDDSPRTRVLNTIRKLNPHLFVHGIVNGTYNAPFFVTRFKEAMFFFSSIFDMLEANALRMDEHRLLIEREFFGREAVNVIACEGTERIERPETYKQWQMRNLRAGFRQLALDREIMKRARYKVSKSYQGDFLVDEDNKWMLQGWKGRIIYALSAWTS

SEQ ID NO: 8013 - protein, 248 aa, Zea mays subsp. mays
  peptide (1)..(248): Ceres Seq. ID no. 12376603
  misc_feature (1)..(156): Pfam Name: GRAS family transcription factor Pfam Description: GRAS family transcription factor
  misc_feature (1)..(246): Homolog of NCBI NO: 38346720 NR Description: OSJNBa0086O06.18 [Oryza sativa (japonica
  misc_feature (1)..(247): Homolog of NCBI NO: 32813435 NR Description: SCARECROW-like protein [Lilium longiflorum]
  misc_feature (1)..(246): Homolog of NCBI NO: 34908186 NR Description: P0406G08.7 [Oryza sativa (japonica
  misc_feature (1)..(246): Homolog of NCBI NO: 14719332 NR Description: putative SCARECROW gene regulator [Oryza sativa]
  misc_feature (1)..(246): Homolog of NCBI NO: 15222433 NR Description: transcription factor scarecrow-like 14, putative;
  misc_feature (1)..(246): Homolog of NCBI NO: 15224338 NR Description: putative SCARECROW gene regulator; protein id: [Arabidopsis thaliana] >gi|7485429|pir||T02531 probable SCARECROW
  misc_feature (1)..(240): Homolog of NCBI NO: 8778540 NR Description: F22G5.9 [Arabidopsis thaliana]
  misc_feature (1)..(246): Homolog of NCBI NO: 14719333 NR Description: putative SCARECROW gene regulator [Oryza sativa]
  misc_feature (1)..(246): Homolog of NCBI NO: 15227022 NR Description: putative SCARECROW gene regulator; protein id: [Arabidopsis thaliana] >gi|7487873|pir||T02736 probable SCARECROW
  misc_feature (1)..(246): Homolog of NCBI NO: 15238422 NR Description: scarecrow-like 11 - like; protein id: supported by cDNA: gi_14334655, supported by cDNA: gi_17065587
MQRLSKRPGGPPYLRITGIDFPLSGFRPAERVEATGRRLHEYARMFNVPFEYQAIAAKWDTIQVKDLNMKSDEFVVVNCLYRMRNMMDETVTDDSPRTRVLNTIRKLNPHLFVHGIVNGTYNAPFFVTRFKEAMFFFSSIFDMLEANALRMDEHRLLIEREFFGREAVNVIACEGTERIERPETYKQWQMRNLRAGFRQLALDREIMKRARYKVSKSYQGDFLVDEDNKWMLQGWKGRIIYALSAWTS

SEQ ID NO: 8014 - protein, 204 aa, Zea mays subsp. mays
  peptide (1)..(204): Ceres Seq. ID no. 12376604
  misc_feature (1)..(112): Pfam Name: GRAS family transcription factor Pfam Description: GRAS family transcription factor
  misc_feature (1)..(202): Homolog of NCBI NO: 15224338 NR Description: putative SCARECROW gene regulator; protein id: [Arabidopsis thaliana] >gi|7485429|pir||T02531 probable SCARECROW
  misc_feature (1)..(196): Homolog of NCBI NO: 8778540 NR Description: F22G5.9 [Arabidopsis thaliana]
  misc_feature (1)..(202): Homolog of NCBI NO: 14719333 NR Description: putative SCARECROW gene regulator [Oryza sativa]
  misc_feature (1)..(203): Homolog of NCBI NO: 32813435 NR Description: SCARECROW-like protein [Lilium longiflorum]
  misc_feature (1)..(202): Homolog of NCBI NO: 14719332 NR Description: putative SCARECROW gene regulator [Oryza sativa]
  misc_feature (1)..(202): Homolog of NCBI NO: 15222433 NR Description: transcription factor scarecrow-like 14, putative;
  misc_feature (1)..(202): Homolog of NCBI NO: 34908186 NR Description: P0406G08.7 [Oryza sativa (japonica
  misc_feature (1)..(202): Homolog of NCBI NO: 38346720 NR Description: OSJNBa0086O06.18 [Oryza sativa (japonica
  misc_feature (1)..(202): Homolog of NCBI NO: 15227022 NR Description: putative SCARECROW gene regulator; protein id: [Arabidopsis thaliana] >gi|7487873|pir||T02736 probable SCARECROW
  misc_feature (1)..(202): Homolog of NCBI NO: 15238422 NR Description: scarecrow-like 11 - like; protein id: supported by cDNA: gi_14334655, supported by cDNA: gi_17065587
MFNVPFEYQAIAAKWDTIQVKDLNMKSDEFVVVNCLYRMRNMMDETVTDDSPRTRVLNTIRKLNPHLFVHGIVNGTYNAPFFVTRFKEAMFFFSSIFDMLEANALRMDEHRLLIEREFFGREAVNVIACEGTERIERPETYKQWQMRNLRAGFRQLALDREIMKRARYKVSKSYQGDFLVDEDNKWMLQGWKGRIIYALSAWTS

SEQ ID NO: 8015 - DNA, 1498 bp, Zea mays subsp. mays
  misc_feature (1)..(1498): Ceres Seq. ID no. 12406527
  misc_feature: MA Experiment ID: 108535 Result: Up-regulated in Transcription
  misc_feature: MA Experiment 108535 PARAMETER Experiment Name: Zm_Meristem_P Parameter: Age (day) Value: 8
  misc_feature: MA Experiment 108535 PARAMETER Experiment Name: Zm_Meristem_P Parameter: Organism Value: Zea mays
  misc_feature: MA Experiment 108535 PARAMETER Experiment Name: Zm_Meristem_P Parameter: Plant Line Value: 35A19
  misc_feature: MA Experiment 108535 PARAMETER Experiment Name: Zm_Meristem_P Parameter: Tissue Value: Root Meristem vs. Above Root Meristem
  misc_feature: MA Experiment ID: 108543 Result: Up-regulated in Transcription
agctcccagacattgacgagacataaacccacttgcccacgcgcacggcaagccggcaaggccacgcgagaaattccatctcgagcagagcgcagcaacacgtgcgcggaggtcacagctccgatcgacaagccggccaagcagccacacatgcctcctcacatggcggcgatctcgcaccggatcgcaggatccggcccgcgcgtcgccgttgtggcgccgcctcgcccgcgggggcgcgctgccgtggtcgcgggtgctgcggcgaagggcgcacatcgggagcggacgctggagggcgcgagtgacgacctgagggccgccgcggctcagtgtctggactgggctcccgcgcggcgtcgggtgcgggccgccttcgcgcccgtgctccccaccctcgaccactgccttttcaagatggctcacaatgaaatccagatggaagagaattacgagaccaattcaaagggcgttgaaatattctggaagagttggctgccaagagagggcactgcaactaaggctgcacttttcttctgccatggatatggggatacctgcactttcttttttgaagggattgctaagaggatagcagctgctggttatgcagtttatgctatggattatcctggttttggcatgtcatatggtctccatggctatattgcaagctttgatggaatggtggaccatgtcattgaacagtatgcacgaataagaggcatgaaagaagtgtgtgagctgccacactttctcttggggcagtcaatgggaggtgcagttgccctgaaagtacacttgaagcaacaacaagaatgggatggtgtgcttcttgtcgcacctatgtgcaagatttcagaagatgtaacaccacctgcacctgtattgaaggcactgagcatattgtcatgtcttcttcctgaggcgaagttatttccgcagaaagatataggagatttggcatttagagatccaaggaaaaggaaagtagctgagtacaatgccatctcatattctgaccaaatgagattaagaacagcagttgaacttttaaaagccacgaaggacattgaatcacagttggaaaagatctcctctccattgctgattcttcacggagccgcagacatggtaaccgatcctcaggtcagcaaattcctttatgagaaagccagcacgaaggacaagaccctcaagctctatgaaggcagctaccattcaatcttagagggagaaccagatgaccggatttcaactgccattaacgacatcatttcatggctagattcacactgttaaatacccctttgtctatagcctctcatgtcctcatccattgttttggatttatagttccttattagagtaccatgggtctctagtgctttaaattttgccatggtgtgcagagataagtatctctcgaattaattagttgtgcttgctatcttgacactgttggttttatgttaattgcggacaccgcattcaatgg

SEQ ID NO: 8016 - protein, 433 aa, Zea mays subsp. mays
  peptide (1)..(433): Ceres Seq. ID no. 12406528
  misc_feature (203)..(424): Pfam Name: alpha/beta hydrolase fold Pfam Description: alpha/beta hydrolase fold
  misc_feature (70)..(431): Homolog of NCBI NO: 15223941 NR Description: lysophospholipase isolog, putative; protein id: supported by cDNA: 105948. [Arabidopsis thaliana]
  misc_feature (70)..(431): Homolog of NCBI NO: 21536622 NR Description: lysophospholipase isolog, putative [Arabidopsis
  misc_feature (97)..(432): Homolog of NCBI NO: 18417885 NR Description: lipase-like protein; protein id: At5g16120.1, by cDNA: gi_13430613, supported by cDNA: gi_15293170 [Arabidopsis >gi|13430614|gb|AAK25929.1|AF360219_1 putative lipase
  misc_feature (150)..(432): Homolog of NCBI NO: 37530890 NR Description: putative lipase-like protein [Oryza sativa
  misc_feature (81)..(149): Homolog of NCBI NO: 37530890 NR Description: putative lipase-like protein [Oryza sativa
  misc_feature (97)..(432): Homolog of NCBI NO: 11358489 NR Description: lipase-like protein - Arabidopsis thaliana
  misc_feature (307)..(433): Homolog of NCBI NO: 34911304 NR Description: P0519D04.21 [Oryza sativa (japonica
  misc_feature (193)..(244): Homolog of NCBI NO: 34911304 NR Description: P0519D04.21 [Oryza sativa (japonica
  misc_feature (144)..(431): Homolog of NCBI NO: 30695682 NR Description: esterase/lipase/thioesterase family [Arabidopsis
  misc_feature (140)..(430): Homolog of NCBI NO: 18407407 NR Description: putative phospholipase; protein id: At2g47630.1, by cDNA: 33373., supported by cDNA: gi_16323213 [Arabidopsis >gi|16323214|gb|AAL15341.1| At2g47630/F17A22.2 [Arabidopsis
SSQTLTRHKPTCPRARQAGKATREIPSRAERSNTCAEVTAPIDKPAKQPHMPPHMAAISHRIAGSGPRVAVVAPPRPRGRAAVVAGAAAKGAHRERTLEGASDDLRAAAAQCLDWAPARRRVRAAFAPVLPTLDHCLFKMAHNEIQMEENYETNSKGVEIFWKSWLPREGTATKAALFFCHGYGDTCTFFFEGIAKRIAAAGYAVYAMDYPGFGMSYGLHGYIASFDGMVDHVIEQYARIRGMKEVCELPHFLLGQSMGGAVALKVHLKQQQEWDGVLLVAPMCKISEDVTPPAPVLKALSILSCLLPEAKLFPQKDIGDLAFRDPRKRKVAEYNAISYSDQMRLRTAVELLKATKDIESQLEKISSPLLILHGAADMVTDPQVSKFLYEKASTKDKTLKLYEGSYHSILEGEPDDRISTAINDIISWLDSHC

SEQ ID NO: 8017 - protein, 383 aa, Zea mays subsp. mays
  peptide (1)..(383): Ceres Seq. ID no. 12406529
  misc_feature (153)..(374): Pfam Name: alpha/beta hydrolase fold Pfam Description: alpha/beta hydrolase fold
  misc_feature (20)..(381): Homolog of NCBI NO: 15223941 NR Description: lysophospholipase isolog, putative; protein id: supported by cDNA: 105948. [Arabidopsis thaliana]
  misc_feature (20)..(381): Homolog of NCBI NO: 21536622 NR Description: lysophospholipase isolog, putative [Arabidopsis
  misc_feature (47)..(382): Homolog of NCBI NO: 18417885 NR Description: lipase-like protein; protein id: At5g16120.1, by cDNA: gi_13430613, supported by cDNA: gi_15293170 [Arabidopsis >gi|13430614|gb|AAK25929.1|AF360219_1 putative lipase
  misc_feature (100)..(382): Homolog of NCBI NO: 37530890 NR Description: putative lipase-like protein [Oryza sativa
  misc_feature (31)..(99): Homolog of NCBI NO: 37530890 NR Description: putative lipase-like protein [Oryza sativa
  misc_feature (47)..(382): Homolog of NCBI NO: 11358489 NR Description: lipase-like protein - Arabidopsis thaliana
  misc_feature (257)..(383): Homolog of NCBI NO: 34911304 NR Description: P0519D04.21 [Oryza sativa (japonica
  misc_feature (143)..(194): Homolog of NCBI NO: 34911304 NR Description: P0519D04.21 [Oryza sativa (japonica
  misc_feature (94)..(381): Homolog of NCBI NO: 30695682 NR Description: esterase/lipase/thioesterase family [Arabidopsis
  misc_feature (90)..(380): Homolog of NCBI NO: 18407407 NR Description: putative phospholipase; protein id: At2g47630.1, by cDNA: 33373., supported by cDNA: gi_16323213 [Arabidopsis >gi|16323214|gb|AAL15341.1| At2g47630/F17A22.2 [Arabidopsis
MPPHMAAISHRIAGSGPRVAVVAPPRPRGRAAVVAGAAAKGAHRERTLEGASDDLRAAAAQCLDWAPARRRVRAAFAPVLPTLDHCLFKMAHNEIQMEENYETNSKGVEIFWKSWLPREGTATKAALFFCHGYGDTCTFFFEGIAKRIAAAGYAVYAMDYPGFGMSYGLHGYIASFDGMVDHVIEQYARIRGMKEVCELPHFLLGQSMGGAVALKVHLKQQQEWDGVLLVAPMCKISEDVTPPAPVLKALSILSCLLPEAKLFPQKDIGDLAFRDPRKRKVAEYNAISYSDQMRLRTAVELLKATKDIESQLEKISSPLLILHGAADMVTDPQVSKFLYEKASTKDKTLKLYEGSYHSILEGEPDDRISTAINDIISWLDSHC

SEQ ID NO: 8018 - protein, 379 aa, Zea mays subsp. mays
  peptide (1)..(379): Ceres Seq. ID no. 12406530
  misc_feature (149)..(370): Pfam Name: alpha/beta hydrolase fold Pfam Description: alpha/beta hydrolase fold
  misc_feature (16)..(377): Homolog of NCBI NO: 15223941 NR Description: lysophospholipase isolog, putative; protein id: supported by cDNA: 105948. [Arabidopsis thaliana]
  misc_feature (16)..(377): Homolog of NCBI NO: 21536622 NR Description: lysophospholipase isolog, putative [Arabidopsis
  misc_feature (43)..(378): Homolog of NCBI NO: 18417885 NR Description: lipase-like protein; protein id: At5g16120.1, by cDNA: gi_13430613, supported by cDNA: gi_15293170 [Arabidopsis >gi|13430614|gb|AAK25929.1|AF360219_1 putative lipase
  misc_feature (96)..(378): Homolog of NCBI NO: 37530890 NR Description: putative lipase-like protein [Oryza sativa
  misc_feature (27)..(95): Homolog of NCBI NO: 37530890 NR Description: putative lipase-like protein [Oryza sativa
  misc_feature (43)..(378): Homolog of NCBI NO: 11358489 NR Description: lipase-like protein - Arabidopsis thaliana
  misc_feature (253)..(379): Homolog of NCBI NO: 34911304 NR Description: P0519D04.21 [Oryza sativa (japonica
  misc_feature (139)..(190): Homolog of NCBI NO: 34911304 NR Description: P0519D04.21 [Oryza sativa (japonica
  misc_feature (90)..(377): Homolog of NCBI NO: 30695682 NR Description: esterase/lipase/thioesterase family [Arabidopsis
  misc_feature (86)..(376): Homolog of NCBI NO: 18407407 NR Description: putative phospholipase; protein id: At2g47630.1, by cDNA: 33373., supported by cDNA: gi_16323213 [Arabidopsis >gi|16323214|gb|AAL15341.1| At2g47630/F17A22.2 [Arabidopsis
MAAISHRIAGSGPRVAVVAPPRPRGRAAVVAGAAAKGAHRERTLEGASDDLRAAAAQCLDWAPARRRVRAAFAPVLPTLDHCLFKMAHNEIQMEENYETNSKGVEIFWKSWLPREGTATKAALFFCHGYGDTCTFFFEGIAKRIAAAGYAVYAMDYPGFGMSYGLHGYIASFDGMVDHVIEQYARIRGMKEVCELPHFLLGQSMGGAVALKVHLKQQQEWDGVLLVAPMCKISEDVTPPAPVLKALSILSCLLPEAKLFPQKDIGDLAFRDPRKRKVAEYNAISYSDQMRLRTAVELLKATKDIESQLEKISSPLLILHGAADMVTDPQVSKFLYEKASTKDKTLKLYEGSYHSILEGEPDDRISTAINDIISWLDSHC

SEQ ID NO: 8019 - DNA, 1420 bp, Zea mays subsp. mays
  misc_feature (1)..(1420): Ceres Seq. ID no. 12402424
  misc_feature: MA Experiment ID: 108535 Result: Down-regulated in Transcription
  misc_feature: MA Experiment 108535 PARAMETER Experiment Name: Zm_Meristem_P Parameter: Age (day) Value: 8
  misc_feature: MA Experiment 108535 PARAMETER Experiment Name: Zm_Meristem_P Parameter: Organism Value: Zea mays
  misc_feature: MA Experiment 108535 PARAMETER Experiment Name: Zm_Meristem_P Parameter: Plant Line Value: 35A19
  misc_feature: MA Experiment 108535 PARAMETER Experiment Name: Zm_Meristem_P Parameter: Tissue Value: Root Meristem vs. Above Root Meristem
gacccttcgtcccgcatcgtttcctcctcctttttccccgttcgtcccctggattggcgtctacccggcgcgacccggaccgaatcctaagtccgcctgccgccgccgccggctcccgttggaaacgagtttggagtaaagaaaccaaccttgcatctgtgttctgtctgtctatgctgctttgctttggattcacaaaaaaataagccttgcatctcactgacttgagataactatgcctaaggacaggagctcccgcgtttcctctcacgagagccgccgggctcgtgcctccccatacttgtcagcgtctcatggacagagcagttcttcacgccggtcacaagagtctcctgcggccgcggcagcgaagcaagctgcagagtgggaggatgttcggtgctcggtctgcatggaccacccgcacaacgctgtcctgctggtctgctcgtcgcacgagaagggctgccgccccttcatgtgcgacaccagctcgcggcactccaattgctatgaccagtaccggaaggcctccaaggactcctccaaggattcagggacagagtgcagcgagtgccagcagcaggtccagctctcgtgcccgctgtgccgtgggccagtcagcgactgcatcaaggactacgacgcacggaggtacatgaacaccaaggtccggtcctgcaccatggagtcgtgcgagttcaggggtgcctaccaggagctgaggaagcatgctagggtggagcacccagcggcgaggccgatggaggtagaccctgaacggcagcgggattggcgccggatggagcagcagcgggaccttggagacttgatgagcatgctgcgttcagggttcaacgccaacgttgaggacaacagcggcgaacttggagccaccgaagaaggggaagaggaagccgcaaggactccggcctccataacaatggtcttcatcatgccgtctagaggctcaatcatgcagtacttaacagaacgtagcagggcgatcattctggtcagccggaggcgagcaagcagtggcagtggtgatgctgaggccacagcaccagacagcgaggaaggtgatgaccctatgttgccatcggcagaggcgtctgctggttcgcagcgttcttccgaagaagaggctgacggtgaccacgcccaatgacagaagtcagctagcaggaggtgtgccatggcccatggcatcttcttggcctgaagatcccgacctgcttggtatgtgatgctgtatgctgggaagaaaacatggatgcaggtgccatcaagcaatggaaaggaaaaaaaacaattgagtggttgcatctatcttgtctgaatggatttctttttccatgcgttgtaattctctctcatatattatcatatgaaatagattcggccgtatttgcactgc

SEQ ID NO: 8020 - protein, 311 aa, Zea mays subsp. mays
  peptide (1)..(311): Ceres Seq. ID no. 12402425
  misc_feature (1)..(309): Homolog of NCBI NO: 34912600 NR Description: P0046B10.17 [Oryza sativa (japonica
  misc_feature (5)..(309): Homolog of NCBI NO: 34912600 NR Description: P0046B10.17 [Oryza sativa (japonica
  misc_feature (1)..(205): Homolog of NCBI NO: 15221290 NR Description: unknown protein; protein id: At1g68140.1, by cDNA: gi_17064999 [Arabidopsis thaliana]
  misc_feature (113)..(247): Homolog of NCBI NO: 15230170 NR Description: unknown protein; protein id: At3g24740.1, by cDNA: gi_19715578 [Arabidopsis thaliana] gb|AAF16548.1~gene_id:K7P8.3~similar to unknown protein
  misc_feature (36)..(112): Homolog of NCBI NO: 15230170 NR Description: unknown protein; protein id: At3g24740.1, by cDNA: gi_19715578 [Arabidopsis thaliana] gb|AAF16548.1~gene_id:K7P8.3~similar to unknown protein
  misc_feature (1)..(201): Homolog of NCBI NO: 18394245 NR Description: expressed protein; protein id: At1g15430.1, by cDNA: gi_13430773, supported by cDNA: gi_15293248 [Arabidopsis >gi|13430774|gb|AAK26009.1|AF360299_1 unknown protein
  misc_feature (14)..(201): Homolog of NCBI NO: 5103842 NR Description: F9L1.39 [Arabidopsis thaliana]
  misc_feature (5)..(203): Homolog of NCBI NO: 38344827 NR Description: OSJNBa0064H22.8 [Oryza sativa (japonica
  misc_feature (1)..(201): Homolog of NCBI NO: 15220091 NR Description: hypothetical protein; protein id: At1g80220.1
  misc_feature (50)..(205): Homolog of NCBI NO: 25365932 NR Description: unknown protein T32E8.10 [imported] - Arabidopsis
MPKDRSSRVSSHESRRARASPYLSASHGQSSSSRRSQESPAAAAAKQAAEWEDVRCSVCMDHPHNAVLLVCSSHEKGCRPFMCDTSSRHSNCYDQYRKASKDSSKDSGTECSECQQQVQLSCPLCRGPVSDCIKDYDARRYMNTKVRSCTMESCEFRGAYQELRKHARVEHPAARPMEVDPERQRDWRRMEQQRDLGDLMSMLRSGFNANVEDNSGELGATEEGEEEAARTPASITMVFIMPSRGSIMQYLTERSRAIILVSRRRASSGSGDAEATAPDSEEGDDPMLPSAEASAGSQRSSEEEADGDHAQ

SEQ ID NO: 8021 - protein, 252 aa, Zea mays subsp. mays
  peptide (1)..(252): Ceres Seq. ID no. 12402426
  misc_feature (1)..(250): Homolog of NCBI NO: 34912600 NR Description: P0046B10.17 [Oryza sativa (japonica
  misc_feature (1)..(250): Homolog of NCBI NO: 34912600 NR Description: P0046B10.17 [Oryza sativa (japonica
  misc_feature (1)..(146): Homolog of NCBI NO: 15221290 NR Description: unknown protein; protein id: At1g68140.1, by cDNA: gi_17064999 [Arabidopsis thaliana]
  misc_feature (54)..(188): Homolog of NCBI NO: 15230170 NR Description: unknown protein; protein id: At3g24740.1, by cDNA: gi_19715578 [Arabidopsis thaliana] gb|AAF16548.1~gene_id:K7P8.3~similar to unknown protein
  misc_feature (1)..(53): Homolog of NCBI NO: 15230170 NR Description: unknown protein; protein id: At3g24740.1, by cDNA: gi_19715578 [Arabidopsis thaliana] gb|AAF16548.1~gene_id:K7P8.3~similar to unknown protein
  misc_feature (1)..(142): Homolog of NCBI NO: 18394245 NR Description: expressed protein; protein id: At1g15430.1, by cDNA: gi_13430773, supported by cDNA: gi_15293248 [Arabidopsis >gi|13430774|gb|AAK26009.1|AF360299_1 unknown protein
  misc_feature (1)..(142): Homolog of NCBI NO: 5103842 NR Description: F9L1.39 [Arabidopsis thaliana]
  misc_feature (1)..(144): Homolog of NCBI NO: 38344827 NR Description: OSJNBa0064H22.8 [Oryza sativa (japonica
  misc_feature (1)..(142): Homolog of NCBI NO: 15220091 NR Description: hypothetical protein; protein id: At1g80220.1
  misc_feature (1)..(146): Homolog of NCBI NO: 25365932 NR Description: unknown protein T32E8.10 [imported] - Arabidopsis
MDHPHNAVLLVCSSHEKGCRPFMCDTSSRHSNCYDQYRKASKDSSKDSGTECSECQQQVQLSCPLCRGPVSDCIKDYDARRYMNTKVRSCTMESCEFRGAYQELRKHARVEHPAARPMEVDPERQRDWRRMEQQRDLGDLMSMLRSGFNANVEDNSGELGATEEGEEEAARTPASITMVFIMPSRGSIMQYLTERSRAIILVSRRRASSGSGDAEATAPDSEEGDDPMLPSAEASAGSQRSSEEEADGDHAQ

SEQ ID NO: 8022 - protein, 230 aa, Zea mays subsp. mays
  peptide (1)..(230): Ceres Seq. ID no. 12402427
  misc_feature (1)..(228): Homolog of NCBI NO: 34912600 NR Description: P0046B10.17 [Oryza sativa (japonica
  misc_feature (1)..(228): Homolog of NCBI NO: 34912600 NR Description: P0046B10.17 [Oryza sativa (japonica
  misc_feature (1)..(124): Homolog of NCBI NO: 15221290 NR Description: unknown protein; protein id: At1g68140.1, by cDNA: gi_17064999 [Arabidopsis thaliana]
  misc_feature (32)..(166): Homolog of NCBI NO: 15230170 NR Description: unknown protein; protein id: At3g24740.1, by cDNA: gi_19715578 [Arabidopsis thaliana] gb|AAF16548.1~gene_id:K7P8.3~similar to unknown protein
  misc_feature (1)..(31): Homolog of NCBI NO: 15230170 NR Description: unknown protein; protein id: At3g24740.1, by cDNA: gi_19715578 [Arabidopsis thaliana] gb|AAF16548.1~gene_id:K7P8.3~similar to unknown protein
  misc_feature (1)..(120): Homolog of NCBI NO: 18394245 NR Description: expressed protein; protein id: At1g15430.1, by cDNA: gi_13430773, supported by cDNA: gi_15293248 [Arabidopsis >gi|13430774|gb|AAK26009.1|AF360299_1 unknown protein
  misc_feature (1)..(120): Homolog of NCBI NO: 5103842 NR Description: F9L1.39 [Arabidopsis thaliana]
  misc_feature (1)..(122): Homolog of NCBI NO: 38344827 NR Description: OSJNBa0064H22.8 [Oryza sativa (japonica
  misc_feature (1)..(120): Homolog of NCBI NO: 15220091 NR Description: hypothetical protein; protein id: At1g80220.1
  misc_feature (1)..(124): Homolog of NCBI NO: 25365932 NR Description: unknown protein T32E8.10 [imported] - Arabidopsis
MCDTSSRHSNCYDQYRKASKDSSKDSGTECSECQQQVQLSCPLCRGPVSDCIKDYDARRYMNTKVRSCTMESCEFRGAYQELRKHARVEHPAARPMEVDPERQRDWRRMEQQRDLGDLMSMLRSGFNANVEDNSGELGATEEGEEEAARTPASITMVFIMPSRGSIMQYLTERSRAIILVSRRRASSGSGDAEATAPDSEEGDDPMLPSAEASAGSQRSSEEEADGDHAQ

SEQ ID NO: 8023 - DNA, 1296 bp, Zea mays subsp. mays
  misc_feature (1)..(1296): Ceres Seq. ID no. 12401934
  misc_feature: MA Experiment ID: 108528 Result: Down-regulated in Transcription
  misc_feature: MA Experiment 108528 PARAMETER Experiment Name: Zm_Imbibed_Seeds_P Parameter: Age (day) Value: 5 vs. 2
  misc_feature: MA Experiment 108528 PARAMETER Experiment Name: Zm_Imbibed_Seeds_P Parameter: Organism Value: Zea mays
  misc_feature: MA Experiment 108528 PARAMETER Experiment Name: Zm_Imbibed_Seeds_P Parameter: Plant Line Value: 35A19
  misc_feature: MA Experiment 108528 PARAMETER Experiment Name: Zm_Imbibed_Seeds_P Parameter: Tissue Value: Aerial vs. Embryo
  misc_feature: MA Experiment ID: 108535 Result: Up-regulated in Transcription
  misc_feature: MA Experiment 108535 PARAMETER Experiment Name: Zm_Meristem_P Parameter: Age (day) Value: 8
  misc_feature: MA Experiment 108535 PARAMETER Experiment Name: Zm_Meristem_P Parameter: Organism Value: Zea mays
  misc_feature: MA Experiment 108535 PARAMETER Experiment Name: Zm_Meristem_P Parameter: Plant Line Value: 35A19
  misc_feature: MA Experiment 108535 PARAMETER Experiment Name: Zm_Meristem_P Parameter: Tissue Value: Root Meristem vs. Above Root Meristem
  misc_feature: MA Experiment ID: 108545 Result: Down-regulated in Transcription
  misc_feature: MA Experiment 108545 PARAMETER Experiment Name: Zm_Imbibed_Seeds_P Parameter: Age (day) Value: 3 vs. 2
  misc_feature: MA Experiment 108545 PARAMETER Experiment Name: Zm_Imbibed_Seeds_P Parameter: Organism Value: Zea mays
  misc_feature: MA Experiment 108545 PARAMETER Experiment Name: Zm_Imbibed_Seeds_P Parameter: Plant Line Value: 35A19
  misc_feature: MA Experiment 108545 PARAMETER Experiment Name: Zm_Imbibed_Seeds_P Parameter: Tissue Value: Aerial vs. Embryo
  misc_feature: MA Experiment ID: 108547 Result: Down-regulated in Transcription
  misc_feature: MA Experiment 108547 PARAMETER Experiment Name: Zm_Imbibed_Seeds_P Parameter: Age (day) Value: 4 vs. 2
  misc_feature: MA Experiment 108547 PARAMETER Experiment Name: Zm_Imbibed_Seeds_P Parameter: Organism Value: Zea mays
  misc_feature: MA Experiment 108547 PARAMETER Experiment Name: Zm_Imbibed_Seeds_P Parameter: Plant Line Value: 35A19
  misc_feature: MA Experiment 108547 PARAMETER Experiment Name: Zm_Imbibed_Seeds_P Parameter: Tissue Value: Aerial vs. Embryo
  misc_feature: MA Experiment ID: 20000108 Result: Up-regulated in Transcription
  misc_feature: MA Experiment 20000108 PARAMETER Experiment Name: Zm_Root-Tips_P Parameter: Age (day) Value: 12
  misc_feature: MA Experiment 20000108 PARAMETER Experiment Name: Zm_Root-Tips_P Parameter: Organism Value: Zea mays
  misc_feature: MA Experiment 20000108 PARAMETER Experiment Name: Zm_Root-Tips_P Parameter: Tissue Value: Root tips vs. Root mid region    35
  misc_feature: MA Experiment 20000108 PARAMETER Experiment Name: Zm_Root-Tips_P Parameter: Tissue Value: Root tips vs. Root mid region   Sequence Listing-Misc Features (4)
atcatcagatcatcgtcatcaaccagcaggtgaccgctagctgtacctgtacgacgtgtgaaacgagtagttaagcatgacggagaggcgcgccggcatggcagtggcggtggcggtggcggtggcgctcctgctgtcttcgtcgttcggcgtggcgtcggcggcggggaggggacgacccaccaagaagacgctgaagccaggggagaagccctcgcccaaatccaagttcttcccgctcagccgcaccaagtttgggcacaagcgaaactacgaggcctcctgcgccgacgagggcgggccggcctgctacgtcggatgccccgctgattgccccaactcctgcctcgtcttctgcgaatactgcctcagcttctgccaatgtgacatcttccccggcacctcctgcggcgacccgcgcttcaccggcggcgacggcaacaccttctacttccacggaagcaaggaccaggacttctgcatcgtctccgacgcgggcctccacatcaacgcccacttcatcggcaaccacaacccggccctcaaccgcgacttcacctgggtgcaggcgctgggggtcaccttcgtcgcagcaggcggcgaccaccaccgcctctacgtcggcgcccgcagggccgcggagtgggacgaggacgaggaccacgtccaggtcacattcgacggcgagcccgtcgacgtggacgccgcccggaacgcgcggtgggcgtccaaggcgctcccggggctctccgtcaggcgcaccaaggacgtgaacgccgtcaccgtggagctggacggcgccttcgccatctccgcggcagccgtgcccgtcaccgacgaggacgaccgggtccaccgctacggcaagacgggccgcgacagcctcgtgcacctcgacctcggcttccagttccataacctcaccgccgacgtcgacggcgtgctgggacagacataccgccccggctacgtcaccaagctggacatcagcgccaagatgcccatcatgggcggcgcgcccaagtacctgtccgagggtctcttctccactgactgcgctgtctcccggttccaccaccgccgcgatgccgccggcgctgccgtcgtcaccacatatgcctcttaagttgcatgccgccatgcatgcatgcatgaggaacatgagaaataatcaacaaatggaggcagcccaacaattacatgtactcctaccctgcaagcaagaaataattaagtggtcattccattgaccaaacattatttatattaattataaggagctcaaccaattaattg

SEQ ID NO: 8024 - protein, 349 aa, Zea mays subsp. mays
  peptide (1)..(349): Ceres Seq. ID no. 12401935
  misc_feature (6)..(349): Homolog of NCBI NO: 34905940 NR Description: similar to root cap protein [Oryza sativa
  misc_feature (5)..(349): Homolog of NCBI NO: 34905936 NR Description: similar to root cap protein [Oryza sativa
  misc_feature (47)..(349): Homolog of NCBI NO: 34905930 NR Description: similar to root cap protein [Oryza sativa
  misc_feature (44)..(349): Homolog of NCBI NO: 34905934 NR Description: similar to root cap protein [Oryza sativa
  misc_feature (45)..(345): Homolog of NCBI NO: 4514635 NR Description: root cap protein 1 [Zea mays]
  misc_feature (6)..(349): Homolog of NCBI NO: 4514637 NR Description: root cap protein 2 [Zea mays]
  misc_feature (15)..(343): Homolog of NCBI NO: 21741738 NR Description: OSJNBa0073L04.18 [Oryza sativa (japonica
  misc_feature (35)..(338): Homolog of NCBI NO: 11994465 NR Description: contains similarity to late embryogenesis
  misc_feature (35)..(338): Homolog of NCBI NO: 30685319 NR Description: late embryogenesis abundant protein -related
  misc_feature (67)..(337): Homolog of NCBI NO: 7484468 NR Description: late embryonic abundant protein EMB7 - white >gi|1350543|gb|AAB01570.1| late embryogenesis abundant protein
MTERRAGMAVAVAVAVALLLSSSFGVASAAGRGRPTKKTLKPGEKPSPKSKFFPLSRTKFGHKRNYEASCADEGGPACYVGCPADCPNSCLVFCEYCLSFCQCDIFPGTSCGDPRFTGGDGNTFYFHGSKDQDFCIVSDAGLHINAHFIGNHNPALNRDFTWVQALGVTFVAAGGDHHRLYVGARRAAEWDEDEDHVQVTFDGEPVDVDAARNARWASKALPGLSVRRTKDVNAVTVELDGAFAISAAAVPVTDEDDRVHRYGKTGRDSLVHLDLGFQFHNLTADVDGVLGQTYRPGYVTKLDISAKMPIMGGAPKYLSEGLFSTDCAVSRFHHRRDAAGAAVVTTYAS

SEQ ID NO: 8025 - protein, 342 aa, Zea mays subsp. mays
  peptide (1)..(342): Ceres Seq. ID no. 12401936
  misc_feature (1)..(342): Homolog of NCBI NO: 34905940 NR Description: similar to root cap protein [Oryza sativa
  misc_feature (1)..(342): Homolog of NCBI NO: 34905936 NR Description: similar to root cap protein [Oryza sativa
  misc_feature (40)..(342): Homolog of NCBI NO: 34905930 NR Description: similar to root cap protein [Oryza sativa
  misc_feature (37)..(342): Homolog of NCBI NO: 34905934 NR Description: similar to root cap protein [Oryza sativa
  misc_feature (38)..(338): Homolog of NCBI NO: 4514635 NR Description: root cap protein 1 [Zea mays]
  misc_feature (1)..(342): Homolog of NCBI NO: 4514637 NR Description: root cap protein 2 [Zea mays]
  misc_feature (8)..(336): Homolog of NCBI NO: 21741738 NR Description: OSJNBa0073L04.18 [Oryza sativa (japonica
  misc_feature (28)..(331): Homolog of NCBI NO: 11994465 NR Description: contains similarity to late embryogenesis
  misc_feature (28)..(331): Homolog of NCBI NO: 30685319 NR Description: late embryogenesis abundant protein -related
  misc_feature (60)..(330): Homolog of NCBI NO: 7484468 NR Description: late embryonic abundant protein EMB7 - white >gi|1350543|gb|AAB01570.1| late embryogenesis abundant protein
MAVAVAVAVALLLSSSFGVASAAGRGRPTKKTLKPGEKPSPKSKFFPLSRTKFGHKRNYEASCADEGGPACYVGCPADCPNSCLVFCEYCLSFCQCDIFPGTSCGDPRFTGGDGNTFYFHGSKDQDFCIVSDAGLHINAHFIGNHNPALNRDFTWVQALGVTFVAAGGDHHRLYVGARRAAEWDEDEDHVQVTFDGEPVDVDAARNARWASKALPGLSVRRTKDVNAVTVELDGAFAISAAAVPVTDEDDRVHRYGKTGRDSLVHLDLGFQFHNLTADVDGVLGQTYRPGYVTKLDISAKMPIMGGAPKYLSEGLFSTDCAVSRFHHRRDAAGAAVVTTYAS

SEQ ID NO: 8026 - DNA, 1037 bp, Zea mays subsp. mays
  misc_feature (1)..(1037): Ceres Seq. ID no. 12402421
  misc_feature: MA Experiment ID: 108535 Result: Down-regulated in Transcription
  misc_feature: MA Experiment 108535 PARAMETER Experiment Name: Zm_Meristem_P Parameter: Age (day) Value: 8
  misc_feature: MA Experiment 108535 PARAMETER Experiment Name: Zm_Meristem_P Parameter: Organism Value: Zea mays
  misc_feature: MA Experiment 108535 PARAMETER Experiment Name: Zm_Meristem_P Parameter: Plant Line Value: 35A19
  misc_feature: MA Experiment 108535 PARAMETER Experiment Name: Zm_Meristem_P Parameter: Tissue Value: Root Meristem vs. Above Root Meristem
  misc_feature: MA Experiment ID: 20000108 Result: Down-regulated in Transcription
  misc_feature: MA Experiment 20000108 PARAMETER Experiment Name: Zm_Root-Tips_P Parameter: Age (day) Value: 12
  misc_feature: MA Experiment 20000108 PARAMETER Experiment Name: Zm_Root-Tips_P Parameter: Organism Value: Zea mays
  misc_feature: MA Experiment 20000108 PARAMETER Experiment Name: Zm_Root-Tips_P Parameter: Tissue Value: Root tips vs. Root mid region    35
  misc_feature: MA Experiment 20000108 PARAMETER Experiment Name: Zm_Root-Tips_P Parameter: Tissue Value: Root tips vs. Root mid region   Sequence Listing-Misc Features (4)
  misc_feature: MA Experiment ID: 20000535 Result: Down-regulated in Transcription
  misc_feature: MA Experiment 20000535 PARAMETER Experiment Name: Zm_Hybrid_Seed_Dev_P Parameter: DAP Value: 30 vs. 12
  misc_feature: MA Experiment 20000535 PARAMETER Experiment Name: Zm_Hybrid_Seed_Dev_P Parameter: Organism Value: Zea mays
  misc_feature: MA Experiment 20000535 PARAMETER Experiment Name: Zm_Hybrid_Seed_Dev_P Parameter: Plant Line Value: 35A19
  misc_feature: MA Experiment 20000535 PARAMETER Experiment Name: Zm_Hybrid_Seed_Dev_P Parameter: Tissue Value: Embryo vs. Unfert Floret
gtaaaaacgtgtagtgcaggaggaggggtgggagaagaagaagaaatcaactgggggctgccggacgacaaccactacggcaaggcagtagagatacggcgtctcctcttctgacttggccagcgcaacggcagctagttcaattgaaccagagcgctttatagatagaacaaaaatatatactgtagaaatccatcgagaaacaaccgagaagacctgcggctgcggtgaagagagaactcagtggtgaagaagagggaaaaatcaccatgctggaccatctcgtcggactgctgaagctgcgcgtggtgaggggggtgaacctcgccgtccgcgacctccgatccagcgatccctacgtcgtcgttcgcatcggcaaacagaaattgaagacacgggtggtaaagaagagtgtcaatccggaatgggacgacgaactcaccctctctatcgaagaccctgctgttcctattagactggaagtttttgacaaggacactttcgtcgatgatacaatgggtaatgcagaggtggacatccgcccattagtcgagattgtgaagatgaaactccaggacgttgccgacagaaccgtggtaaagaaactggtgcccaacagacagaactgcctagccgaggagagctcgatatatatatcggaggggaaggtgaagcaagacatggttgtacggctgaggaacgtagagagcggggaaatagagctccagcttcagtggatcgacctccctggctctaagggtgtatgagtggggggcggctatgagctctgccttgccctgctgttttcgcggatctccaactctttttctacttgaaaagaagaactagtggtttgcgtgcgctcgctcgcgtagagctgtcagttgtatgtaagaagttatgattgcgttggcgtttagtaaaatatcgtcagggagatgtatgtgcatgaacatctgagaatcaagactataaaaatgtgtacaatgcatgtactaaaggagtgtttggtttctatagattaatttttagtccct

SEQ ID NO: 8027 - protein, 165 aa, Zea mays subsp. mays
  peptide (1)..(165): Ceres Seq. ID no. 12402422
  misc_feature (9)..(87): Pfam Name: C2 domain Pfam Description: C2 domain
  misc_feature (1)..(165): Homolog of NCBI NO: 15221907 NR Description: unknown protein; protein id: At1g48590.1
  misc_feature (1)..(165): Homolog of NCBI NO: 25405940 NR Description: protein T1N15.21 [imported] - Arabidopsis >gi|8778695|gb|AAF79703.1|AC020889_11 T1N15.21 [Arabidopsis
  misc_feature (2)..(165): Homolog of NCBI NO: 18409682 NR Description: expressed protein; protein id: At1g70810.1, by cDNA: 23322., supported by cDNA: gi_13430459 [Arabidopsis
  misc_feature (2)..(165): Homolog of NCBI NO: 13430460 NR Description: unknown protein [Arabidopsis thaliana]
  misc_feature (2)..(161): Homolog of NCBI NO: 33146442 NR Description: zinc finger and C2 domain protein-like [Oryza
  misc_feature (1)..(165): Homolog of NCBI NO: 30684739 NR Description: C2 domain-containing protein [Arabidopsis
  misc_feature (2)..(165): Homolog of NCBI NO: 15240322 NR Description: putative protein; protein id: At5g37740.1, by cDNA: gi_18377800, supported by cDNA: gi_21281220 [Arabidopsis
  misc_feature (1)..(165): Homolog of NCBI NO: 15219500 NR Description: hypothetical protein; protein id: At1g73580.1
  misc_feature (2)..(162): Homolog of NCBI NO: 15220022 NR Description: unknown protein; protein id: At1g23140.1
  misc_feature (2)..(161): Homolog of NCBI NO: 33146446 NR Description: zinc finger and C2 domain protein-like [Oryza
MLDHLVGLLKLRVVRGVNLAVRDLRSSDPYVVVRIGKQKLKTRVVKKSVNPEWDDELTLSIEDPAVPIRLEVFDKDTFVDDTMGNAEVDIRPLVEIVKMKLQDVADRTVVKKLVPNRQNCLAEESSIYISEGKVKQDMVVRLRNVESGEIELQLQWIDLPGSKGV

SEQ ID NO: 8028 - protein, 83 aa, Zea mays subsp. mays
  peptide (1)..(83): Ceres Seq. ID no. 12402423
  misc_feature (1)..(83): Homolog of NCBI NO: 15221907 NR Description: unknown protein; protein id: At1g48590.1
  misc_feature (1)..(83): Homolog of NCBI NO: 25405940 NR Description: protein T1N15.21 [imported] - Arabidopsis >gi|8778695|gb|AAF79703.1|AC020889_11 T1N15.21 [Arabidopsis
  misc_feature (1)..(83): Homolog of NCBI NO: 18409682 NR Description: expressed protein; protein id: At1g70810.1, by cDNA: 23322., supported by cDNA: gi_13430459 [Arabidopsis
  misc_feature (1)..(83): Homolog of NCBI NO: 13430460 NR Description: unknown protein [Arabidopsis thaliana]
  misc_feature (1)..(79): Homolog of NCBI NO: 33146442 NR Description: zinc finger and C2 domain protein-like [Oryza
  misc_feature (1)..(83): Homolog of NCBI NO: 30684739 NR Description: C2 domain-containing protein [Arabidopsis
  misc_feature (1)..(83): Homolog of NCBI NO: 15240322 NR Description: putative protein; protein id: At5g37740.1, by cDNA: gi_18377800, supported by cDNA: gi_21281220 [Arabidopsis
  misc_feature (1)..(83): Homolog of NCBI NO: 15219500 NR Description: hypothetical protein; protein id: At1g73580.1
  misc_feature (1)..(80): Homolog of NCBI NO: 15220022 NR Description: unknown protein; protein id: At1g23140.1
  misc_feature (1)..(79): Homolog of NCBI NO: 33146446 NR Description: zinc finger and C2 domain protein-like [Oryza
MGNAEVDIRPLVEIVKMKLQDVADRTVVKKLVPNRQNCLAEESSIYISEGKVKQDMVVRLRNVESGEIELQLQWIDLPGSKGV

SEQ ID NO: 8029 - DNA, 782 bp, Zea mays subsp. mays
  misc_feature (1)..(782): Ceres Seq. ID no. 12351274
  misc_feature: MA Experiment ID: 108527 Result: Down-regulated in Transcription
  misc_feature: MA Experiment 108527 PARAMETER Experiment Name: Zm_5mM_NO_P Parameter: Age (day) Value: 8
  misc_feature: MA Experiment 108527 PARAMETER Experiment Name: Zm_5mM_NO_P Parameter: Organism Value: Zea mays
  misc_feature: MA Experiment 108527 PARAMETER Experiment Name: Zm_5mM_NO_P Parameter: Plant Line Value: 35A19
  misc_feature: MA Experiment 108527 PARAMETER Experiment Name: Zm_5mM_NO_P Parameter: Timepoint (hr) Value: 6
  misc_feature: MA Experiment 108527 PARAMETER Experiment Name: Zm_5mM_NO_P Parameter: Tissue Value: Aerial
  misc_feature: MA Experiment 108527 PARAMETER Experiment Name: Zm_5mM_NO_P Parameter: Treatment Value: 5mM NO vs. No Treatment
  misc_feature: MA Experiment ID: 108528 Result: Up-regulated in Transcription
  misc_feature: MA Experiment 108528 PARAMETER Experiment Name: Zm_Imbibed_Seeds_P Parameter: Age (day) Value: 5 vs. 2
  misc_feature: MA Experiment 108528 PARAMETER Experiment Name: Zm_Imbibed_Seeds_P Parameter: Organism Value: Zea mays
  misc_feature: MA Experiment 108528 PARAMETER Experiment Name: Zm_Imbibed_Seeds_P Parameter: Plant Line Value: 35A19
  misc_feature: MA Experiment 108528 PARAMETER Experiment Name: Zm_Imbibed_Seeds_P Parameter: Tissue Value: Aerial vs. Embryo
  misc_feature: MA Experiment ID: 108529 Result: Down-regulated in Transcription
  misc_feature: MA Experiment 108529 PARAMETER Experiment Name: Zm_Imbibed_Seeds_P Parameter: Age (day) Value: 5 vs. 2
  misc_feature: MA Experiment 108529 PARAMETER Experiment Name: Zm_Imbibed_Seeds_P Parameter: Organism Value: Zea mays
  misc_feature: MA Experiment 108529 PARAMETER Experiment Name: Zm_Imbibed_Seeds_P Parameter: Plant Line Value: 35A19
  misc_feature: MA Experiment 108529 PARAMETER Experiment Name: Zm_Imbibed_Seeds_P Parameter: Tissue Value: Roots vs. Embryo
  misc_feature: MA Experiment ID: 108530 Result: Up-regulated in Transcription
  misc_feature: MA Experiment 108530 PARAMETER Experiment Name: Zm_Imbibed_Seeds_P Parameter: Age (day) Value: 6 vs. 2
  misc_feature: MA Experiment 108530 PARAMETER Experiment Name: Zm_Imbibed_Seeds_P Parameter: Organism Value: Zea mays
  misc_feature: MA Experiment 108530 PARAMETER Experiment Name: Zm_Imbibed_Seeds_P Parameter: Plant Line Value: 35A19
  misc_feature: MA Experiment 108530 PARAMETER Experiment Name: Zm_Imbibed_Seeds_P Parameter: Tissue Value: Aerial vs. Embryo
  misc_feature: MA Experiment ID: 108545 Result: Up-regulated in Transcription
  misc_feature: MA Experiment 108545 PARAMETER Experiment Name: Zm_Imbibed_Seeds_P Parameter: Age (day) Value: 3 vs. 2
  misc_feature: MA Experiment 108545 PARAMETER Experiment Name: Zm_Imbibed_Seeds_P Parameter: Organism Value: Zea mays
  misc_feature: MA Experiment 108545 PARAMETER Experiment Name: Zm_Imbibed_Seeds_P Parameter: Plant Line Value: 35A19
  misc_feature: MA Experiment 108545 PARAMETER Experiment Name: Zm_Imbibed_Seeds_P Parameter: Tissue Value: Aerial vs. Embryo
  misc_feature: MA Experiment ID: 108547 Result: Up-regulated in Transcription
  misc_feature: MA Experiment 108547 PARAMETER Experiment Name: Zm_Imbibed_Seeds_P Parameter: Age (day) Value: 4 vs. 2
  misc_feature: MA Experiment 108547 PARAMETER Experiment Name: Zm_Imbibed_Seeds_P Parameter: Organism Value: Zea mays
  misc_feature: MA Experiment 108547 PARAMETER Experiment Name: Zm_Imbibed_Seeds_P Parameter: Plant Line Value: 35A19
  misc_feature: MA Experiment 108547 PARAMETER Experiment Name: Zm_Imbibed_Seeds_P Parameter: Tissue Value: Aerial vs. Embryo
  misc_feature: MA Experiment ID: 108556 Result: Down-regulated in Transcription
  misc_feature: MA Experiment 108556 PARAMETER Experiment Name: Zm_Drought_P Parameter: Age (day) Value: 9
  misc_feature: MA Experiment 108556 PARAMETER Experiment Name: Zm_Drought_P Parameter: Organism Value: Zea mays
  misc_feature: MA Experiment 108556 PARAMETER Experiment Name: Zm_Drought_P Parameter: Plant Line Value: 35A19
  misc_feature: MA Experiment 108556 PARAMETER Experiment Name: Zm_Drought_P Parameter: Timepoint (hr) Value: 24
  misc_feature: MA Experiment 108556 PARAMETER Experiment Name: Zm_Drought_P Parameter: Tissue Value: Aerial
  misc_feature: MA Experiment 108556 PARAMETER Experiment Name: Zm_Drought_P Parameter: Treatment Value: Drought vs. No Drought
  misc_feature: MA Experiment ID: 108559 Result: Down-regulated in Transcription
  misc_feature: MA Experiment 108559 PARAMETER Experiment Name: Zm_5mM_NO_P Parameter: Age (day) Value: 8
  misc_feature: MA Experiment 108559 PARAMETER Experiment Name: Zm_5mM_NO_P Parameter: Organism Value: Zea mays
  misc_feature: MA Experiment 108559 PARAMETER Experiment Name: Zm_5mM_NO_P Parameter: Plant Line Value: 35A19
  misc_feature: MA Experiment 108559 PARAMETER Experiment Name: Zm_5mM_NO_P Parameter: Timepoint (hr) Value: 12
  misc_feature: MA Experiment 108559 PARAMETER Experiment Name: Zm_5mM_NO_P Parameter: Tissue Value: Aerial
  misc_feature: MA Experiment 108559 PARAMETER Experiment Name: Zm_5mM_NO_P Parameter: Treatment Value: 5mM NO vs. No Treatment
  misc_feature: MA Experiment ID: 108687 Result: Down-regulated in Transcription
  misc_feature: MA Experiment 108687 PARAMETER Experiment Name: Zm_Embryos-Flowers__P Parameter: Tissue Value: Embryo vs. Aerial+
  misc_feature: MA Experiment ID: 108688 Result: Down-regulated in Transcription
  misc_feature: MA Experiment 108688 PARAMETER Experiment Name: Zm_Embryos-Flowers__P Parameter: Tissue Value: Immature Flowers vs. Aerial+
  misc_feature: MA Experiment ID: 20000479 Result: Down-regulated in Transcription
  misc_feature: MA Experiment 20000479 PARAMETER Experiment Name: Zm_Drought_P Parameter: Age (day) Value: 10
  misc_feature: MA Experiment 20000479 PARAMETER Experiment Name: Zm_Drought_P Parameter: Organism Value: Zea mays
  misc_feature: MA Experiment 20000479 PARAMETER Experiment Name: Zm_Drought_P Parameter: Plant Line Value: 35A19
  misc_feature: MA Experiment 20000479 PARAMETER Experiment Name: Zm_Drought_P Parameter: Timepoint (hr) Value: 48
  misc_feature: MA Experiment 20000479 PARAMETER Experiment Name: Zm_Drought_P Parameter: Tissue Value: Aerial
  misc_feature: MA Experiment 20000479 PARAMETER Experiment Name: Zm_Drought_P Parameter: Treatment Value: Drought vs. No Drought
  misc_feature: MA Experiment ID: 20000480 Result: Down-regulated in Transcription
  misc_feature: MA Experiment 20000480 PARAMETER Experiment Name: Zm_Drought_P Parameter: Age (day) Value: 11
  misc_feature: MA Experiment 20000480 PARAMETER Experiment Name: Zm_Drought_P Parameter: Organism Value: Zea mays
  misc_feature: MA Experiment 20000480 PARAMETER Experiment Name: Zm_Drought_P Parameter: Plant Line Value: 35A19
  misc_feature: MA Experiment 20000480 PARAMETER Experiment Name: Zm_Drought_P Parameter: Timepoint (hr) Value: 72
  misc_feature: MA Experiment 20000480 PARAMETER Experiment Name: Zm_Drought_P Parameter: Tissue Value: Aerial
  misc_feature: MA Experiment 20000480 PARAMETER Experiment Name: Zm_Drought_P Parameter: Treatment Value: Drought vs. No Drought
atgtgtgtgtccaacagctgagtggcatggacatggaccaaaggcttcagtgcatgtttaagagagtccgggagacctacgacgctgcgacagaaggcatcaagacaaactactatggcataaagcatgtgatcgaagccttgctgcctctgcttcaagcttcctccgatgggaggatcgttaacgtctcctctgagttcggcctgctaaggctgatcaacaacgaggagctaaggcaggagctaaacgacgtggagaagctcaccgaggagaggctggacgaggtgctggccgcgtacctgagagacttcgacgccggcgaggtgggggcgcgcgggtggccggtggacttctcggcctacaaggtggccaaggtggccatgaacgcgtacacgaggatcctagcgaggaggcacccggggctgcgcgtcaactgcgcgcaccccggctacgtgagcaccgacatgaccgtccacaccgggcctctcacgcccgagcaaggcgcggccaacgtcgtgaaggtggcgctgatgccggagggcggcccgaccggcgcgtacttcgcgttgggagaggaggcgtcctttgtgtgacgaaagcaccgtcgtcgttaagttcgtcgttgttcgccaactccctgtcagtcgatttctaaatcgacgtacaatgaaatacatcatcgctgcaaactcacaaatgaaaacagttaagggaaccttttgtagcaaaaaaaaaagtggacagaataatgaataatcatgtcaaatatcgcttgagtatct

SEQ ID NO: 8030 - protein, 196 aa, Zea mays subsp. mays
  peptide (1)..(196): Ceres Seq. ID no. 12351275
  misc_feature (20)..(195): Homolog of NCBI NO: 25518668 NR Description: hypothetical protein T1N6.22 - Arabidopsis
  misc_feature (22)..(195): Homolog of NCBI NO: 15233062 NR Description: putative protein; protein id: At3g61220.1, by cDNA: gi_15028054, supported by cDNA: gi_20259056 [Arabidopsis
  misc_feature (4)..(196): Homolog of NCBI NO: 38346774 NR Description: OSJNBa0081C01.25 [Oryza sativa (japonica
  misc_feature (4)..(196): Homolog of NCBI NO: 38346769 NR Description: OSJNBa0081C01.20 [Oryza sativa (japonica
  misc_feature (4)..(196): Homolog of NCBI NO: 38346768 NR Description: OSJNBa0081C01.19 [Oryza sativa (japonica
  misc_feature (4)..(196): Homolog of NCBI NO: 38346772 NR Description: OSJNBa0081C01.23 [Oryza sativa (japonica
  misc_feature (5)..(196): Homolog of NCBI NO: 38346767 NR Description: OSJNBa0081C01.18 [Oryza sativa (japonica
  misc_feature (24)..(187): Homolog of NCBI NO: 34559416 NR Description: (-)-isopiperitenone reductase [Mentha x piperita]
  misc_feature (24)..(191): Homolog of NCBI NO: 33146492 NR Description: carbonyl reductase -like protein [Oryza sativa
  misc_feature (20)..(195): Homolog of NCBI NO: 18378884 NR Description: carbonyl reductase, putative; protein id: [Arabidopsis thaliana] >gi|13878161|gb|AAK44158.1|AF370343_1 carbonyl reductase [Arabidopsis thaliana]
VCVQQLSGMDMDQRLQCMFKRVRETYDAATEGIKTNYYGIKHVIEALLPLLQASSDGRIVNVSSEFGLLRLINNEELRQELNDVEKLTEERLDEVLAAYLRDFDAGEVGARGWPVDFSAYKVAKVAMNAYTRILARRHPGLRVNCAHPGYVSTDMTVHTGPLTPEQGAANVVKVALMPEGGPTGAYFALGEEASFV

SEQ ID NO: 8031 - protein, 188 aa, Zea mays subsp. mays
  peptide (1)..(188): Ceres Seq. ID no. 12351276
  misc_feature (1)..(188): Homolog of NCBI NO: 38346774 NR Description: OSJNBa0081C01.25 [Oryza sativa (japonica
  misc_feature (1)..(188): Homolog of NCBI NO: 38346769 NR Description: OSJNBa0081C01.20 [Oryza sativa (japonica
  misc_feature (1)..(188): Homolog of NCBI NO: 38346768 NR Description: OSJNBa0081C01.19 [Oryza sativa (japonica
  misc_feature (1)..(188): Homolog of NCBI NO: 38346772 NR Description: OSJNBa0081C01.23 [Oryza sativa (japonica
  misc_feature (1)..(188): Homolog of NCBI NO: 38346767 NR Description: OSJNBa0081C01.18 [Oryza sativa (japonica
  misc_feature (16)..(179): Homolog of NCBI NO: 34559416 NR Description: (-)-isopiperitenone reductase [Mentha x piperita]
  misc_feature (16)..(183): Homolog of NCBI NO: 33146492 NR Description: carbonyl reductase -like protein [Oryza sativa
  misc_feature (12)..(187): Homolog of NCBI NO: 18378884 NR Description: carbonyl reductase, putative; protein id: [Arabidopsis thaliana] >gi|13878161|gb|AAK44158.1|AF370343_1 carbonyl reductase [Arabidopsis thaliana]
  misc_feature (12)..(187): Homolog of NCBI NO: 25518668 NR Description: hypothetical protein T1N6.22 - Arabidopsis
  misc_feature (14)..(187): Homolog of NCBI NO: 15233062 NR Description: putative protein; protein id: At3g61220.1, by cDNA: gi_15028054, supported by cDNA: gi_20259056 [Arabidopsis
MDMDQRLQCMFKRVRETYDAATEGIKTNYYGIKHVIEALLPLLQASSDGRIVNVSSEFGLLRLINNEELRQELNDVEKLTEERLDEVLAAYLRDFDAGEVGARGWPVDFSAYKVAKVAMNAYTRILARRHPGLRVNCAHPGYVSTDMTVHTGPLTPEQGAANVVKVALMPEGGPTGAYFALGEEASFV

SEQ ID NO: 8032 - protein, 186 aa, Zea mays subsp. mays
  peptide (1)..(186): Ceres Seq. ID no. 12351277
  misc_feature (1)..(186): Homolog of NCBI NO: 38346774 NR Description: OSJNBa0081C01.25 [Oryza sativa (japonica
  misc_feature (1)..(186): Homolog of NCBI NO: 38346769 NR Description: OSJNBa0081C01.20 [Oryza sativa (japonica
  misc_feature (1)..(186): Homolog of NCBI NO: 38346768 NR Description: OSJNBa0081C01.19 [Oryza sativa (japonica
  misc_feature (1)..(186): Homolog of NCBI NO: 38346772 NR Description: OSJNBa0081C01.23 [Oryza sativa (japonica
  misc_feature (1)..(186): Homolog of NCBI NO: 38346767 NR Description: OSJNBa0081C01.18 [Oryza sativa (japonica
  misc_feature (14)..(177): Homolog of NCBI NO: 34559416 NR Description: (-)-isopiperitenone reductase [Mentha x piperita]
  misc_feature (14)..(181): Homolog of NCBI NO: 33146492 NR Description: carbonyl reductase -like protein [Oryza sativa
  misc_feature (10)..(185): Homolog of NCBI NO: 18378884 NR Description: carbonyl reductase, putative; protein id: [Arabidopsis thaliana] >gi|13878161|gb|AAK44158.1|AF370343_1 carbonyl reductase [Arabidopsis thaliana]
  misc_feature (10)..(185): Homolog of NCBI NO: 25518668 NR Description: hypothetical protein T1N6.22 - Arabidopsis
  misc_feature (12)..(185): Homolog of NCBI NO: 15233062 NR Description: putative protein; protein id: At3g61220.1, by cDNA: gi_15028054, supported by cDNA: gi_20259056 [Arabidopsis
MDQRLQCMFKRVRETYDAATEGIKTNYYGIKHVIEALLPLLQASSDGRIVNVSSEFGLLRLINNEELRQELNDVEKLTEERLDEVLAAYLRDFDAGEVGARGWPVDFSAYKVAKVAMNAYTRILARRHPGLRVNCAHPGYVSTDMTVHTGPLTPEQGAANVVKVALMPEGGPTGAYFALGEEASFV

SEQ ID NO: 8033 - DNA, 1257 bp, Zea mays subsp. mays
  misc_feature (1)..(1257): Ceres Seq. ID no. 12402418
  misc_feature: MA Experiment ID: 108522 Result: Down-regulated in Transcription
  misc_feature: MA Experiment 108522 PARAMETER Experiment Name: Zm_42deg_Heat_P Parameter: Age (day) Value: 8
  misc_feature: MA Experiment 108522 PARAMETER Experiment Name: Zm_42deg_Heat_P Parameter: Organism Value: Zea mays
  misc_feature: MA Experiment 108522 PARAMETER Experiment Name: Zm_42deg_Heat_P Parameter: Plant Line Value: 35A19
  misc_feature: MA Experiment 108522 PARAMETER Experiment Name: Zm_42deg_Heat_P Parameter: Temperature (deg C) Value: 42 vs. 22
  misc_feature: MA Experiment 108522 PARAMETER Experiment Name: Zm_42deg_Heat_P Parameter: Timepoint (hr) Value: 1
  misc_feature: MA Experiment 108522 PARAMETER Experiment Name: Zm_42deg_Heat_P Parameter: Tissue Value: Aerial
  misc_feature: MA Experiment ID: 108523 Result: Down-regulated in Transcription
  misc_feature: MA Experiment 108523 PARAMETER Experiment Name: Zm_42deg_Heat_P Parameter: Age (day) Value: 8
  misc_feature: MA Experiment 108523 PARAMETER Experiment Name: Zm_42deg_Heat_P Parameter: Organism Value: Zea mays
  misc_feature: MA Experiment 108523 PARAMETER Experiment Name: Zm_42deg_Heat_P Parameter: Plant Line Value: 35A19
  misc_feature: MA Experiment 108523 PARAMETER Experiment Name: Zm_42deg_Heat_P Parameter: Temperature (deg C) Value: 42 vs. 22
  misc_feature: MA Experiment 108523 PARAMETER Experiment Name: Zm_42deg_Heat_P Parameter: Timepoint (hr) Value: 6
  misc_feature: MA Experiment 108523 PARAMETER Experiment Name: Zm_42deg_Heat_P Parameter: Tissue Value: Aerial
  misc_feature: MA Experiment ID: 108527 Result: Down-regulated in Transcription
  misc_feature: MA Experiment 108527 PARAMETER Experiment Name: Zm_5mM_NO_P Parameter: Age (day) Value: 8
  misc_feature: MA Experiment 108527 PARAMETER Experiment Name: Zm_5mM_NO_P Parameter: Organism Value: Zea mays
  misc_feature: MA Experiment 108527 PARAMETER Experiment Name: Zm_5mM_NO_P Parameter: Plant Line Value: 35A19
  misc_feature: MA Experiment 108527 PARAMETER Experiment Name: Zm_5mM_NO_P Parameter: Timepoint (hr) Value: 6
  misc_feature: MA Experiment 108527 PARAMETER Experiment Name: Zm_5mM_NO_P Parameter: Tissue Value: Aerial
  misc_feature: MA Experiment 108527 PARAMETER Experiment Name: Zm_5mM_NO_P Parameter: Treatment Value: 5mM NO vs. No Treatment
  misc_feature: MA Experiment ID: 108543 Result: Down-regulated in Transcription
  misc_feature: MA Experiment ID: 108545 Result: Up-regulated in Transcription
  misc_feature: MA Experiment 108545 PARAMETER Experiment Name: Zm_Imbibed_Seeds_P Parameter: Age (day) Value: 3 vs. 2
  misc_feature: MA Experiment 108545 PARAMETER Experiment Name: Zm_Imbibed_Seeds_P Parameter: Organism Value: Zea mays
  misc_feature: MA Experiment 108545 PARAMETER Experiment Name: Zm_Imbibed_Seeds_P Parameter: Plant Line Value: 35A19
  misc_feature: MA Experiment 108545 PARAMETER Experiment Name: Zm_Imbibed_Seeds_P Parameter: Tissue Value: Aerial vs. Embryo
  misc_feature: MA Experiment ID: 108556 Result: Down-regulated in Transcription
  misc_feature: MA Experiment 108556 PARAMETER Experiment Name: Zm_Drought_P Parameter: Age (day) Value: 9
  misc_feature: MA Experiment 108556 PARAMETER Experiment Name: Zm_Drought_P Parameter: Organism Value: Zea mays
  misc_feature: MA Experiment 108556 PARAMETER Experiment Name: Zm_Drought_P Parameter: Plant Line Value: 35A19
  misc_feature: MA Experiment 108556 PARAMETER Experiment Name: Zm_Drought_P Parameter: Timepoint (hr) Value: 24
  misc_feature: MA Experiment 108556 PARAMETER Experiment Name: Zm_Drought_P Parameter: Tissue Value: Aerial
  misc_feature: MA Experiment 108556 PARAMETER Experiment Name: Zm_Drought_P Parameter: Treatment Value: Drought vs. No Drought
  misc_feature: MA Experiment ID: 108687 Result: Up-regulated in Transcription
  misc_feature: MA Experiment 108687 PARAMETER Experiment Name: Zm_Embryos-Flowers__P Parameter: Tissue Value: Embryo vs. Aerial+
  misc_feature: MA Experiment ID: 20000478 Result: Down-regulated in Transcription
  misc_feature: MA Experiment 20000478 PARAMETER Experiment Name: Zm_5mM_SA_P Parameter: Age (day) Value: 11
  misc_feature: MA Experiment 20000478 PARAMETER Experiment Name: Zm_5mM_SA_P Parameter: Organism Value: Zea mays
  misc_feature: MA Experiment 20000478 PARAMETER Experiment Name: Zm_5mM_SA_P Parameter: Plant Line Value: 35A19
  misc_feature: MA Experiment 20000478 PARAMETER Experiment Name: Zm_5mM_SA_P Parameter: Timepoint (hr) Value: 72
  misc_feature: MA Experiment 20000478 PARAMETER Experiment Name: Zm_5mM_SA_P Parameter: Tissue Value: Aerial
  misc_feature: MA Experiment 20000478 PARAMETER Experiment Name: Zm_5mM_SA_P Parameter: Treatment Value: 5mM SA vs. No Treatment
  misc_feature: MA Experiment ID: 20000480 Result: Down-regulated in Transcription
  misc_feature: MA Experiment 20000480 PARAMETER Experiment Name: Zm_Drought_P Parameter: Age (day) Value: 11
  misc_feature: MA Experiment 20000480 PARAMETER Experiment Name: Zm_Drought_P Parameter: Organism Value: Zea mays
  misc_feature: MA Experiment 20000480 PARAMETER Experiment Name: Zm_Drought_P Parameter: Plant Line Value: 35A19
  misc_feature: MA Experiment 20000480 PARAMETER Experiment Name: Zm_Drought_P Parameter: Timepoint (hr) Value: 72
  misc_feature: MA Experiment 20000480 PARAMETER Experiment Name: Zm_Drought_P Parameter: Tissue Value: Aerial
  misc_feature: MA Experiment 20000480 PARAMETER Experiment Name: Zm_Drought_P Parameter: Treatment Value: Drought vs. No Drought
  misc_feature: MA Experiment ID: 20000533 Result: Down-regulated in Transcription
  misc_feature: MA Experiment 20000533 PARAMETER Experiment Name: Zm_0.001percent_MeJA_P Parameter: Age (day) Value: 11
  misc_feature: MA Experiment 20000533 PARAMETER Experiment Name: Zm_0.001percent_MeJA_P Parameter: Organism Value: Zea mays
  misc_feature: MA Experiment 20000533 PARAMETER Experiment Name: Zm_0.001percent_MeJA_P Parameter: Plant Line Value: 35A19
  misc_feature: MA Experiment 20000533 PARAMETER Experiment Name: Zm_0.001percent_MeJA_P Parameter: Timepoint (hr) Value: 72
  misc_feature: MA Experiment 20000533 PARAMETER Experiment Name: Zm_0.001percent_MeJA_P Parameter: Tissue Value: Aerial
  misc_feature: MA Experiment 20000533 PARAMETER Experiment Name: Zm_0.001percent_MeJA_P Parameter: Treatment Value: 0.001percent MeJA vs. No Treatment
  misc_feature: MA Experiment ID: 20000626 Result: Down-regulated in Transcription
  misc_feature: MA Experiment 20000626 PARAMETER Experiment Name: Zm_Herbicide-Treatments_P Parameter: Timepoint (hr) Value: 12
  misc_feature: MA Experiment 20000626 PARAMETER Experiment Name: Zm_Herbicide-Treatments_P Parameter: Tissue Value: Aerial
  misc_feature: MA Experiment 20000626 PARAMETER Experiment Name: Zm_Herbicide-Treatments_P Parameter: Treatment Value: Roundup vs. No Treatment
agtcctggctgatccggagcattcactcactgctgctgctcagtgctcgcgtccggctcccaccgctctgcagacgactgcctcctctgtccttccttcccttcccagtggcaggcagaggatctgcagtgcctgccgtccagcgccanccgaccgacccctcctgccgcacagcacagagggaggggggaaacgcaggatcatcagctagcatgggtgcagcagtcaaagaagaagaagttccgcggcgtcaggcagcgccactggggctcctggggtctccgagatcaggcacccgctgctcaagaggagggtgtggctgggcaccttcgagaccgcggaggaggcggcgcgggcgtacgacgaggccgccgtcctcatgagcggccgcaacgccaagaccaacttccccgtactgccctgcggcaggacgcgcggcggcggcggcggcggcggctcgtccggcaacaacaccaacgccagcgccagcaccagcaccagcaacctgtcgcaggtcctcagcgccaagctccgcaggtgctgcaaggcgccgtcgccgtcgctcacctgcctccgcctcgacccggagaggtcccacatcggcgtctggcacaagggcgccggcgcgcgcgccgactccagctgggtcatgaccgtccagctcagcgacaaggacgccgcgccggcgcccagcgccacgtcgtcggccacggccacgacgacgacggctgcctcgcatcctccgcctgccacggtggtggtggtggacgacgaggagaggatcgcgctgcagatgatcgaggagctgctgggcggcggcggcggcccggtctcgcaacaaccgcttgggaatgggatgctccagatcgcggcagcaggcggcggcctcgtcatctgaagaccggctaatgcaacaacggaaattgcattgcatgcatgcatggttcgttcagcaagctacaagtttgatcggccggatcaagtatttggtacacaacaagagtcgtcgaaagtagtgtggttggtgcagaaagcagttaagattgcatcataaatacatatgtatctctattactagctagctacatcagtcaagcttattaggagagagaccatatagtaagtaattaatcttaatcacttcatccctgtgaagctctgtatctattaaaaggcttacttgtatgtatatataagcatacagccctttgtataacatgttatacatgtatcaataatatcaggctatatatatct

SEQ ID NO: 8034 - protein, 172 aa, Zea mays subsp. mays
  peptide (1)..(172): Ceres Seq. ID no. 12402419
  misc_feature (1)..(144): Homolog of NCBI NO: 15218134 NR Description: putative ethylene responsive element; protein id:
  misc_feature (1)..(144): Homolog of NCBI NO: 21553845 NR Description: putative ethylene responsive element [Arabidopsis
  misc_feature (1)..(144): Homolog of NCBI NO: 15238976 NR Description: putative protein; protein id: At5g11190.1 thaliana] >gi|8953381|emb|CAB96654.1| putative protein
  misc_feature (1)..(102): Homolog of NCBI NO: 15239413 NR Description: AP2 domain containing protein; protein id:
  misc_feature (1)..(153): Homolog of NCBI NO: 30689846 NR Description: AP2 domain transcription factor, putative thaliana] >gi|26452577|dbj|BAC43373.1| putative AP2 domain protein [Arabidopsis thaliana] >gi|28973113|gb|AAO63881.1|
  misc_feature (1)..(14): Homolog of NCBI NO: 15238727 NR Description: ethylene-responsive element - like protein; id: At5g25190.1, supported by cDNA: gi_15010715, supported by gi_16974344 [Arabidopsis thaliana] >gi|15010716|gb|AAK74017.1|
  misc_feature (1)..(14): Homolog of NCBI NO: 18650662 NR Description: ethylene response factor 1 [Lycopersicon
  misc_feature (1)..(16): Homolog of NCBI NO: 38343976 NR Description: OSJNBb0022F16.15 [Oryza sativa (japonica
  misc_feature (1)..(44): Homolog of NCBI NO: 38346619 NR Description: OSJNBa0074L08.10 [Oryza sativa (japonica
  misc_feature (1)..(11): Homolog of NCBI NO: 34221731 NR Description: putative AP2 domain transcription factor
MSGRNAKTNFPVLPCGRTRGGGGGGGSSGNNTNASASTSTSNLSQVLSAKLRRCCKAPSPSLTCLRLDPERSHIGVWHKGAGARADSSWVMTVQLSDKDAAPAPSATSSATATTTTAASHPPPATVVVVDDEERIALQMIEELLGGGGGPVSQQPLGNGMLQIAAAGGGLVI

SEQ ID NO: 8035 - protein, 126 aa, Zea mays subsp. mays
  peptide (1)..(126): Ceres Seq. ID no. 12402420
  misc_feature (33)..(126): Pfam Name: Glycoprotein GG/GX Pfam Description: Glycoprotein GG/GX
  misc_feature (14)..(126): Homolog of NCBI NO: 25143299 NR Description: pre-mRNA splicing SR protein related RSR-1 (68.2
  misc_feature (35)..(126): Homolog of NCBI NO: 9629749 NR Description: 24 [Equine herpesvirus 4]
  misc_feature (33)..(126): Homolog of NCBI NO: 9629749 NR Description: 24 [Equine herpesvirus 4]
  misc_feature (35)..(126): Homolog of NCBI NO: 11360494 NR Description: antifreeze glycopeptide AFGP polyprotein precursor
  misc_feature (53)..(126): Homolog of NCBI NO: 15600253 NR Description: polyhydroxyalkanoate synthesis protein PhaF aeruginosa PA01] >gi|11350815|pir||G83013 polyhydroxyalkanoate
  misc_feature (14)..(126): Homolog of NCBI NO: 9629879 NR Description: immediate-early transactivator protein with Zn
  misc_feature (20)..(126): Homolog of NCBI NO: 27375632 NR Description: blr0521 [Bradyrhizobium japonicum]
  misc_feature (69)..(126): Homolog of NCBI NO: 25143299 NR Description: pre-mRNA splicing SR protein related RSR-1 (68.2
  misc_feature (15)..(126): Homolog of NCBI NO: 25989119 NR Description: unknown [Streptomyces aureofaciens]
  misc_feature (35)..(126): Homolog of NCBI NO: 11360494 NR Description: antifreeze glycopeptide AFGP polyprotein precursor
  misc_feature (49)..(49): Xaa is any aa, unknown or other
SWLIRSIHSLLLLSARVRLPPLCRRLPPLSFLPFPVAGRGSAVPAVQRXPTDPSCRTAQREGGNAGSSASMGAAVKEEEVPRRQAAPLGLLGSPRSGTRCSRGGCGWAPSRPRRRRRGRTTRPPSS

SEQ ID NO: 8036 - DNA, 1031 bp, Zea mays subsp. mays
  misc_feature (1)..(1031): Ceres Seq. ID no. 12340881
  misc_feature: MA Experiment ID: 108535 Result: Up-regulated in Transcription
  misc_feature: MA Experiment 108535 PARAMETER Experiment Name: Zm_Meristem_P Parameter: Age (day) Value: 8
  misc_feature: MA Experiment 108535 PARAMETER Experiment Name: Zm_Meristem_P Parameter: Organism Value: Zea mays
  misc_feature: MA Experiment 108535 PARAMETER Experiment Name: Zm_Meristem_P Parameter: Plant Line Value: 35A19
  misc_feature: MA Experiment 108535 PARAMETER Experiment Name: Zm_Meristem_P Parameter: Tissue Value: Root Meristem vs. Above Root Meristem
  misc_feature: MA Experiment ID: 108544 Result: Down-regulated in Transcription
  misc_feature: MA Experiment ID: 20000488 Result: Up-regulated in Transcription
  misc_feature: MA Experiment 20000488 PARAMETER Experiment Name: Zm_50mM_NH4NO3_L_to_H_P Parameter: Organism Value: Zea mays
  misc_feature: MA Experiment 20000488 PARAMETER Experiment Name: Zm_50mM_NH4NO3_L_to_H_P Parameter: Timepoint (hr) Value: 8
  misc_feature: MA Experiment 20000488 PARAMETER Experiment Name: Zm_50mM_NH4NO3_L_to_H_P Parameter: Tissue Value: Leaves
  misc_feature: MA Experiment 20000488 PARAMETER Experiment Name: Zm_50mM_NH4NO3_L_to_H_P Parameter: Treatment Value: 50mM NH4NO3 vs. 100mM Mannitol
  misc_feature: MA Experiment ID: 20001606 Result: Up-regulated in Transcription
  misc_feature: MA Experiment 20001606 PARAMETER Experiment Name: Zm_50ppm_KNO3_L-to-H_P Parameter: Age (day) Value: 19
  misc_feature: MA Experiment 20001606 PARAMETER Experiment Name: Zm_50ppm_KNO3_L-to-H_P Parameter: Organism Value: Zea mays
  misc_feature: MA Experiment 20001606 PARAMETER Experiment Name: Zm_50ppm_KNO3_L-to-H_P Parameter: Plant Line Value: 35A19
  misc_feature: MA Experiment 20001606 PARAMETER Experiment Name: Zm_50ppm_KNO3_L-to-H_P Parameter: Timepoint (hr) Value: 8
  misc_feature: MA Experiment 20001606 PARAMETER Experiment Name: Zm_50ppm_KNO3_L-to-H_P Parameter: Tissue Value: Shoots
  misc_feature: MA Experiment 20001606 PARAMETER Experiment Name: Zm_50ppm_KNO3_L-to-H_P Parameter: Treatment Value: 50ppm KNO3 vs. 50ppm KCl
atctctatctcatcgtcatcattagaaaggccgaagccttctccgttcctcctcgacgcgtctcttccacagccgcaacctctatccctcgtctggtatcgtctctcccacacccctctgccccaacccagaaaaaccctcgaaaagcggcggcggcgcgacatggcggaggtcgaggctccagctgctgcggttgcggcggcgacccctgaggtggcgacggtgaccgagggcggagccgctacggaggcgaagggtccgcataagctgcaccgccagtggaccttctggtacgacatccagtccaagcccaagcccggcgctgcgtggggcacctccctcaaaaaggcgtacaccttcgacaccgtcgaggagttttggggcttgtatgatcatgttttccgtccaagcaagttgcctggaactgctgattttcacctattcaaggctggagtagagccaaaatgggaagacccagagtgtgcaaatggtggtaaatggactgtcccatgcaacagaaagccaacctttgagaccatgtggcttgaaacgttgatggctcttgttggggatcagtttgatgaaacagatgacatttgtggaattgttgctagtgtccgtccaagaggagataagcttgcattgtggactaggactgccagcaatgaagctgtccaggtaaacattggcaagaaatggaaggatgtcatcgactacaatgacaagatcatctacactttccatgacgactcgagaagggataagccaagcagaggtggacggtacaccgtgtaagtcgcacacgaagatggtcgttgttcggactggacagaggctgagagtggagttttgtgctgagatcggcaccagctttcatttaatacagcctcagcttacctgaggcaattttcgcacctgttatgatgttgttttgctctcagataggtttatgtagcacaagaaagatatgttggagacgttgacgattttgtatgcaactaaatttctatcttaatatgccccgattcaac

SEQ ID NO: 8037 - protein, 264 aa, Zea mays subsp. mays
  peptide (1)..(264): Ceres Seq. ID no. 12340882
  misc_feature (60)..(264): Pfam Name: Eukaryotic initiation factor 4E Pfam Description: Eukaryotic initiation factor 4E
  misc_feature (58)..(264): Homolog of NCBI NO: 6016335 NR Description: EUKARYOTIC TRANSLATION INITIATION FACTOR 4E
  misc_feature (55)..(264): Homolog of NCBI NO: 37535224 NR Description: cap-binding protein p28 [Oryza sativa (japonica
  misc_feature (55)..(264): Homolog of NCBI NO: 1352442 NR Description: EUKARYOTIC TRANSLATION INITIATION FACTOR 4E
  misc_feature (55)..(264): Homolog of NCBI NO: 170753 NR Description: initiation factor (iso)4F p28 subunit
  misc_feature (55)..(264): Homolog of NCBI NO: 547713 NR Description: EUKARYOTIC TRANSLATION INITIATION FACTOR 4E
  misc_feature (73)..(264): Homolog of NCBI NO: 32698526 NR Description: eukaryotic translation initiation factor iso4E
  misc_feature (53)..(255): Homolog of NCBI NO: 2209274 NR Description: eukaryotic initiation factor (iso)-4F p28 subunit
  misc_feature (81)..(255): Homolog of NCBI NO: 15238558 NR Description: eIF4Eiso protein (emb|CAA71579.1); protein id: supported by cDNA: 23770., supported by cDNA: gi_15451099, by cDNA: gi_20148370 [Arabidopsis thaliana]
  misc_feature (71)..(264): Homolog of NCBI NO: 6016334 NR Description: EUKARYOTIC TRANSLATION INITIATION FACTOR 4E
  misc_feature (71)..(264): Homolog of NCBI NO: 34905982 NR Description: eukaryotic translation initiation factor 4E
ISISSSSLERPKPSPFLLDASLPQPQPLSLVWYRLSHTPLPQPRKTLEKRRRRDMAEVEAPAAAVAAATPEVATVTEGGAATEAKGPHKLHRQWTFWYDIQSKPKPGAAWGTSLKKAYTFDTVEEFWGLYDHVFRPSKLPGTADFHLFKAGVEPKWEDPECANGGKWTVPCNRKPTFETMWLETLMALVGDQFDETDDICGIVASVRPRGDKLALWTRTASNEAVQVNIGKKWKDVIDYNDKIIYTFHDDSRRDKPSRGGRYTV

SEQ ID NO: 8038 - protein, 210 aa, Zea mays subsp. mays
  peptide (1)..(210): Ceres Seq. ID no. 12340883
  misc_feature (6)..(210): Pfam Name: Eukaryotic initiation factor 4E Pfam Description: Eukaryotic initiation factor 4E
  misc_feature (4)..(210): Homolog of NCBI NO: 6016335 NR Description: EUKARYOTIC TRANSLATION INITIATION FACTOR 4E
  misc_feature (1)..(210): Homolog of NCBI NO: 37535224 NR Description: cap-binding protein p28 [Oryza sativa (japonica
  misc_feature (1)..(210): Homolog of NCBI NO: 1352442 NR Description: EUKARYOTIC TRANSLATION INITIATION FACTOR 4E
  misc_feature (1)..(210): Homolog of NCBI NO: 170753 NR Description: initiation factor (iso)4F p28 subunit
  misc_feature (1)..(210): Homolog of NCBI NO: 547713 NR Description: EUKARYOTIC TRANSLATION INITIATION FACTOR 4E
  misc_feature (19)..(210): Homolog of NCBI NO: 32698526 NR Description: eukaryotic translation initiation factor iso4E
  misc_feature (1)..(201): Homolog of NCBI NO: 2209274 NR Description: eukaryotic initiation factor (iso)-4F p28 subunit
  misc_feature (27)..(201): Homolog of NCBI NO: 15238558 NR Description: eIF4Eiso protein (emb|CAA71579.1); protein id: supported by cDNA: 23770., supported by cDNA: gi_15451099, by cDNA: gi_20148370 [Arabidopsis thaliana]
  misc_feature (17)..(210): Homolog of NCBI NO: 6016334 NR Description: EUKARYOTIC TRANSLATION INITIATION FACTOR 4E
  misc_feature (17)..(210): Homolog of NCBI NO: 34905982 NR Description: eukaryotic translation initiation factor 4E
MAEVEAPAAAVAAATPEVATVTEGGAATEAKGPHKLHRQWTFWYDIQSKPKPGAAWGTSLKKAYTFDTVEEFWGLYDHVFRPSKLPGTADFHLFKAGVEPKWEDPECANGGKWTVPCNRKPTFETMWLETLMALVGDQFDETDDICGIVASVRPRGDKLALWTRTASNEAVQVNIGKKWKDVIDYNDKIIYTFHDDSRRDKPSRGGRYTV

SEQ ID NO: 8039 - DNA, 1958 bp, Zea mays subsp. mays
  misc_feature (1)..(1958): Ceres Seq. ID no. 13492276
  misc_feature: MA Experiment ID: 108543 Result: Down-regulated in Transcription
aaaccaaaatcatttcatccccggaaccggacgccgaacggcagtgctgcaaaagtccggacaaagctcgcgccgcccaccgcacccgatccgcctcgcccaggcgtgctgccgtccgctcccttctcccgcgccgtcgcctccgcctacgcccgggccgacccgctggacccagcgtgcgccgctccactcggacgcgccgccgccctctcgggttgaggcggaggtgcttggggacccgcccccatggcgagcgccggcaacagcggcagcggggacgacgatgcaggagggaagctcctggcggatcgctaccagaagggcgaggtcctcggcgagggcacgtatggagtcgtcttcaaggccatcgacaccaagactggaaatacagtcgcggtaaagcgaatccggataggaaaggacaagaaggaaggtgtcaacttcactgcgttgagggaaattaaactacttaaggagctgaaagatcctaatattatagagctgattgattgtttcccttacaaggaaaatttgcaccttgtgtttgagtttatggagaccgatctggaagctctcataaaagataagaacataatactctctccagctgacacaaaatcatatgtccagatgatgttaaaaggtctagcgttctgccataagaaatgggtgctacacagggatatgaaaccaaataatttactcattggtgccgatgggcagctcaagcttgctgacttcggtctggcccgtgtgttcgggagtccaggaaggaacttcactcaccaggtctttgcacgttggtaccgggcaccagaattattatttggctcgaagcagtacggatctggggtggatatttgggccgctggatgtatttttgctgaactgcttactcgcagagcctttctccagggttctagtgacattgatcaacttgggaagattttcgcagcacttgggaccccaaaatcttctcaatggcctgacatggtttatcttcctgattatgttgaataccaatatgttgctgcacctccactacgtacgttgtttccaatggccagcgatgatgctttggatcttctgtcaaaaatgcttacctatgatccaaaagcaagaatcagtgctcagcaggctctagaacacaggtacttttcatcgttacctgcaccaacaagaccatcgcagcttccaaggccacgtcggaaaggagatcaagggaataacaagattcctgatctcaacctgcaggatggccctatggtgctctccccgccaagaaagttacgtagggtgacagcgcatgaagggatggaaggtatgcacaggacagataaagtggacgaacatccttctgggatgaggcacaccgatgacatgcccagtcagagttctagaattccaatgtcagttgatgttggggctgtgtttggcacacgacctgcacctaggccaacattgaacagtgcggacaagtctcgtttaaaacggaaacttgatatggatccagagtttggatacgcggagtagaaggaacacatgtttacatgcaccattcttttcttattggggatgttgatttttaaaataagattctgacacaatcaactgagatgttaccgtcatcgcctcacgaagaggaaaactgaagagagattattctaatttatcccgagtcacatagggtattacagctaaccaattccgtaaggcaggctcttgaaaacagtagactcaatgggatattcattagtggagagtgttatggggaattggaggatggaaaagcttgctccatgcgtgtttgtacgtgttttgccaagattgtgctgaagcatctgatctatctactgattctctattttccgtactgtcaattcccgttcttgtatggacagagctttgagcatgttttcagtcagacaccttaggcagtgattcttattgtacaactc

SEQ ID NO: 8040 - protein, 428 aa, Zea mays subsp. mays
  peptide (1)..(428): Ceres Seq. ID no. 13492277
  misc_feature (23)..(304): Pfam Name: Protein kinase domain Pfam Description: Protein kinase domain
  misc_feature (7)..(428): Homolog of NCBI NO: 266410 NR Description: CDC2+/CDC28-related protein kinase R2
  misc_feature (17)..(421): Homolog of NCBI NO: 15419985 NR Description: CDK-activating kinase [Medicago sativa subsp. x
  misc_feature (17)..(376): Homolog of NCBI NO: 15220917 NR Description: cell division protein kinase, putative
  misc_feature (341)..(421): Homolog of NCBI NO: 15220917 NR Description: cell division protein kinase, putative
  misc_feature (17)..(421): Homolog of NCBI NO: 15219522 NR Description: cell division protein kinase, putative
  misc_feature (14)..(356): Homolog of NCBI NO: 15219730 NR Description: cell division protein kinase, putative thaliana] >gi|12597763|gb|AAG60076.1|AC013288_10 cell division
  misc_feature (17)..(319): Homolog of NCBI NO: 13529020 NR Description: cyclin-dependent kinase 7 (homolog of Xenopus
  misc_feature (17)..(319): Homolog of NCBI NO: 4502743 NR Description: cyclin-dependent kinase 7; cyclin-dependent
  misc_feature (17)..(319): Homolog of NCBI NO: 33304107 NR Description: cyclin-dependent kinase 7 [synthetic construct]
  misc_feature (17)..(319): Homolog of NCBI NO: 2125816 NR Description: serine/threonine protein kinase [Homo sapiens]
MASAGNSGSGDDDAGGKLLADRYQKGEVLGEGTYGVVFKAIDTKTGNTVAVKRIRIGKDKKEGVNFTALREIKLLKELKDPNIIELIDCFPYKENLHLVFEFMETDLEALIKDKNIILSPADTKSYVQMMLKGLAFCHKKWVLHRDMKPNNLLIGADGQLKLADFGLARVFGSPGRNFTHQVFARWYRAPELLFGSKQYGSGVDIWAAGCIFAELLTRRAFLQGSSDIDQLGKIFAALGTPKSSQWPDMVYLPDYVEYQYVAAPPLRTLFPMASDDALDLLSKMLTYDPKARISAQQALEHRYFSSLPAPTRPSQLPRPRRKGDQGNNKIPDLNLQDGPMVLSPPRKLRRVTAHEGMEGMHRTDKVDEHPSGMRHTDDMPSQSSRIPMSVDVGAVFGTRPAPRPTLNSADKSRLKRKLDMDPEFGYAE

SEQ ID NO: 8041 - protein, 326 aa, Zea mays subsp. mays
  peptide (1)..(326): Ceres Seq. ID no. 13492278
  misc_feature (1)..(202): Pfam Name: Protein kinase domain Pfam Description: Protein kinase domain
  misc_feature (1)..(326): Homolog of NCBI NO: 266410 NR Description: CDC2+/CDC28-related protein kinase R2
  misc_feature (1)..(319): Homolog of NCBI NO: 15419985 NR Description: CDK-activating kinase [Medicago sativa subsp. x
  misc_feature (1)..(274): Homolog of NCBI NO: 15220917 NR Description: cell division protein kinase, putative
  misc_feature (239)..(319): Homolog of NCBI NO: 15220917 NR Description: cell division protein kinase, putative
  misc_feature (1)..(319): Homolog of NCBI NO: 15219522 NR Description: cell division protein kinase, putative
  misc_feature (1)..(254): Homolog of NCBI NO: 15219730 NR Description: cell division protein kinase, putative thaliana] >gi|12597763|gb|AAG60076.1|AC013288_10 cell division
  misc_feature (1)..(217): Homolog of NCBI NO: 13529020 NR Description: cyclin-dependent kinase 7 (homolog of Xenopus
  misc_feature (1)..(217): Homolog of NCBI NO: 4502743 NR Description: cyclin-dependent kinase 7; cyclin-dependent
  misc_feature (1)..(217): Homolog of NCBI NO: 33304107 NR Description: cyclin-dependent kinase 7 [synthetic construct]
  misc_feature (1)..(217): Homolog of NCBI NO: 2125816 NR Description: serine/threonine protein kinase [Homo sapiens]
METDLEALIKDKNIILSPADTKSYVQMMLKGLAFCHKKWVLHRDMKPNNLLIGADGQLKLADFGLARVFGSPGRNFTHQVFARWYRAPELLFGSKQYGSGVDIWAAGCIFAELLTRRAFLQGSSDIDQLGKIFAALGTPKSSQWPDMVYLPDYVEYQYVAAPPLRTLFPMASDDALDLLSKMLTYDPKARISAQQALEHRYFSSLPAPTRPSQLPRPRRKGDQGNNKIPDLNLQDGPMVLSPPRKLRRVTAHEGMEGMHRTDKVDEHPSGMRHTDDMPSQSSRIPMSVDVGAVFGTRPAPRPTLNSADKSRLKRKLDMDPEFGYAE

SEQ ID NO: 8042 - protein, 300 aa, Zea mays subsp. mays
  peptide (1)..(300): Ceres Seq. ID no. 13492279
  misc_feature (1)..(176): Pfam Name: Protein kinase domain Pfam Description: Protein kinase domain
  misc_feature (1)..(300): Homolog of NCBI NO: 266410 NR Description: CDC2+/CDC28-related protein kinase R2
  misc_feature (1)..(293): Homolog of NCBI NO: 15419985 NR Description: CDK-activating kinase [Medicago sativa subsp. x
  misc_feature (1)..(248): Homolog of NCBI NO: 15220917 NR Description: cell division protein kinase, putative
  misc_feature (213)..(293): Homolog of NCBI NO: 15220917 NR Description: cell division protein kinase, putative
  misc_feature (1)..(293): Homolog of NCBI NO: 15219522 NR Description: cell division protein kinase, putative
  misc_feature (1)..(228): Homolog of NCBI NO: 15219730 NR Description: cell division protein kinase, putative thaliana] >gi|12597763|gb|AAG60076.1|AC013288_10 cell division
  misc_feature (1)..(191): Homolog of NCBI NO: 13529020 NR Description: cyclin-dependent kinase 7 (homolog of Xenopus
  misc_feature (1)..(191): Homolog of NCBI NO: 4502743 NR Description: cyclin-dependent kinase 7; cyclin-dependent
  misc_feature (1)..(191): Homolog of NCBI NO: 33304107 NR Description: cyclin-dependent kinase 7 [synthetic construct]
  misc_feature (1)..(191): Homolog of NCBI NO: 2125816 NR Description: serine/threonine protein kinase [Homo sapiens]
MMLKGLAFCHKKWVLHRDMKPNNLLIGADGQLKLADFGLARVFGSPGRNFTHQVFARWYRAPELLFGSKQYGSGVDIWAAGCIFAELLTRRAFLQGSSDIDQLGKIFAALGTPKSSQWPDMVYLPDYVEYQYVAAPPLRTLFPMASDDALDLLSKMLTYDPKARISAQQALEHRYFSSLPAPTRPSQLPRPRRKGDQGNNKIPDLNLQDGPMVLSPPRKLRRVTAHEGMEGMHRTDKVDEHPSGMRHTDDMPSQSSRIPMSVDVGAVFGTRPAPRPTLNSADKSRLKRKLDMDPEFGYAE

SEQ ID NO: 8043 - DNA, 1285 bp, Zea mays subsp. mays
  misc_feature (1)..(1285): Ceres Seq. ID no. 12408603
  misc_feature: MA Experiment ID: 108536 Result: Down-regulated in Transcription
  misc_feature: MA Experiment 108536 PARAMETER Experiment Name: Zm_Meristem_P Parameter: Age (day) Value: 8
  misc_feature: MA Experiment 108536 PARAMETER Experiment Name: Zm_Meristem_P Parameter: Organism Value: Zea mays
  misc_feature: MA Experiment 108536 PARAMETER Experiment Name: Zm_Meristem_P Parameter: Plant Line Value: 35A19
  misc_feature: MA Experiment 108536 PARAMETER Experiment Name: Zm_Meristem_P Parameter: Tissue Value: Shoot Meristem vs. Above Shoot Meristem
  misc_feature: MA Experiment ID: 108543 Result: Up-regulated in Transcription
  misc_feature: MA Experiment ID: 108544 Result: Down-regulated in Transcription
  misc_feature: MA Experiment ID: 108545 Result: Down-regulated in Transcription
  misc_feature: MA Experiment 108545 PARAMETER Experiment Name: Zm_Imbibed_Seeds_P Parameter: Age (day) Value: 3 vs. 2
  misc_feature: MA Experiment 108545 PARAMETER Experiment Name: Zm_Imbibed_Seeds_P Parameter: Organism Value: Zea mays
  misc_feature: MA Experiment 108545 PARAMETER Experiment Name: Zm_Imbibed_Seeds_P Parameter: Plant Line Value: 35A19
  misc_feature: MA Experiment 108545 PARAMETER Experiment Name: Zm_Imbibed_Seeds_P Parameter: Tissue Value: Aerial vs. Embryo
  misc_feature: MA Experiment ID: 108547 Result: Down-regulated in Transcription
  misc_feature: MA Experiment 108547 PARAMETER Experiment Name: Zm_Imbibed_Seeds_P Parameter: Age (day) Value: 4 vs. 2
  misc_feature: MA Experiment 108547 PARAMETER Experiment Name: Zm_Imbibed_Seeds_P Parameter: Organism Value: Zea mays
  misc_feature: MA Experiment 108547 PARAMETER Experiment Name: Zm_Imbibed_Seeds_P Parameter: Plant Line Value: 35A19
  misc_feature: MA Experiment 108547 PARAMETER Experiment Name: Zm_Imbibed_Seeds_P Parameter: Tissue Value: Aerial vs. Embryo
  misc_feature: MA Experiment ID: 108688 Result: Down-regulated in Transcription
  misc_feature: MA Experiment 108688 PARAMETER Experiment Name: Zm_Embryos-Flowers__P Parameter: Tissue Value: Immature Flowers vs. Aerial+
  misc_feature: MA Experiment ID: 108689 Result: Down-regulated in Transcription
  misc_feature: MA Experiment 108689 PARAMETER Experiment Name: Zm_Drought_Roots_P Parameter: Age (day) Value: 9
  misc_feature: MA Experiment 108689 PARAMETER Experiment Name: Zm_Drought_Roots_P Parameter: Organism Value: Zea mays
  misc_feature: MA Experiment 108689 PARAMETER Experiment Name: Zm_Drought_Roots_P Parameter: Plant Line Value: 35A19
  misc_feature: MA Experiment 108689 PARAMETER Experiment Name: Zm_Drought_Roots_P Parameter: Timepoint (hr) Value: 24
  misc_feature: MA Experiment 108689 PARAMETER Experiment Name: Zm_Drought_Roots_P Parameter: Tissue Value: Roots
  misc_feature: MA Experiment 108689 PARAMETER Experiment Name: Zm_Drought_Roots_P Parameter: Treatment Value: Drought vs. No Drought
  misc_feature: MA Experiment ID: 20000477 Result: Down-regulated in Transcription
  misc_feature: MA Experiment 20000477 PARAMETER Experiment Name: Zm_5mM_SA_P Parameter: Age (day) Value: 10
  misc_feature: MA Experiment 20000477 PARAMETER Experiment Name: Zm_5mM_SA_P Parameter: Organism Value: Zea mays
  misc_feature: MA Experiment 20000477 PARAMETER Experiment Name: Zm_5mM_SA_P Parameter: Plant Line Value: 35A19
  misc_feature: MA Experiment 20000477 PARAMETER Experiment Name: Zm_5mM_SA_P Parameter: Timepoint (hr) Value: 48
  misc_feature: MA Experiment 20000477 PARAMETER Experiment Name: Zm_5mM_SA_P Parameter: Tissue Value: Aerial
  misc_feature: MA Experiment 20000477 PARAMETER Experiment Name: Zm_5mM_SA_P Parameter: Treatment Value: 5mM SA vs. No Treatment
  misc_feature: MA Experiment ID: 20000478 Result: Down-regulated in Transcription
  misc_feature: MA Experiment 20000478 PARAMETER Experiment Name: Zm_5mM_SA_P Parameter: Age (day) Value: 11
  misc_feature: MA Experiment 20000478 PARAMETER Experiment Name: Zm_5mM_SA_P Parameter: Organism Value: Zea mays
  misc_feature: MA Experiment 20000478 PARAMETER Experiment Name: Zm_5mM_SA_P Parameter: Plant Line Value: 35A19
  misc_feature: MA Experiment 20000478 PARAMETER Experiment Name: Zm_5mM_SA_P Parameter: Timepoint (hr) Value: 72
  misc_feature: MA Experiment 20000478 PARAMETER Experiment Name: Zm_5mM_SA_P Parameter: Tissue Value: Aerial
  misc_feature: MA Experiment 20000478 PARAMETER Experiment Name: Zm_5mM_SA_P Parameter: Treatment Value: 5mM SA vs. No Treatment
  misc_feature: MA Experiment ID: 20000479 Result: Down-regulated in Transcription
  misc_feature: MA Experiment 20000479 PARAMETER Experiment Name: Zm_Drought_P Parameter: Age (day) Value: 10
  misc_feature: MA Experiment 20000479 PARAMETER Experiment Name: Zm_Drought_P Parameter: Organism Value: Zea mays
  misc_feature: MA Experiment 20000479 PARAMETER Experiment Name: Zm_Drought_P Parameter: Plant Line Value: 35A19
  misc_feature: MA Experiment 20000479 PARAMETER Experiment Name: Zm_Drought_P Parameter: Timepoint (hr) Value: 48
  misc_feature: MA Experiment 20000479 PARAMETER Experiment Name: Zm_Drought_P Parameter: Tissue Value: Aerial
  misc_feature: MA Experiment 20000479 PARAMETER Experiment Name: Zm_Drought_P Parameter: Treatment Value: Drought vs. No Drought
  misc_feature: MA Experiment ID: 20000480 Result: Down-regulated in Transcription
  misc_feature: MA Experiment 20000480 PARAMETER Experiment Name: Zm_Drought_P Parameter: Age (day) Value: 11
  misc_feature: MA Experiment 20000480 PARAMETER Experiment Name: Zm_Drought_P Parameter: Organism Value: Zea mays
  misc_feature: MA Experiment 20000480 PARAMETER Experiment Name: Zm_Drought_P Parameter: Plant Line Value: 35A19
  misc_feature: MA Experiment 20000480 PARAMETER Experiment Name: Zm_Drought_P Parameter: Timepoint (hr) Value: 72
  misc_feature: MA Experiment 20000480 PARAMETER Experiment Name: Zm_Drought_P Parameter: Tissue Value: Aerial
  misc_feature: MA Experiment 20000480 PARAMETER Experiment Name: Zm_Drought_P Parameter: Treatment Value: Drought vs. No Drought
  misc_feature: MA Experiment ID: 20000488 Result: Down-regulated in Transcription
  misc_feature: MA Experiment 20000488 PARAMETER Experiment Name: Zm_50mM_NH4NO3_L_to_H_P Parameter: Organism Value: Zea mays
  misc_feature: MA Experiment 20000488 PARAMETER Experiment Name: Zm_50mM_NH4NO3_L_to_H_P Parameter: Timepoint (hr) Value: 8
  misc_feature: MA Experiment 20000488 PARAMETER Experiment Name: Zm_50mM_NH4NO3_L_to_H_P Parameter: Tissue Value: Leaves
  misc_feature: MA Experiment 20000488 PARAMETER Experiment Name: Zm_50mM_NH4NO3_L_to_H_P Parameter: Treatment Value: 50mM NH4NO3 vs. 100mM Mannitol
aactagacggaccagaggacgctgccacactatagatcccgtgcttggctgtacaagaacaaccgcactgatgctaccgaccactggtgtccgattaagcagctcatttctaagaagccgacccaggccagccgatatcgagcaccaacgacacaccccattgacgtacagctatgatgcggccgacgtcgacccttgctatggtcgtgccgtcgctcgctgtagccatcctctgcatcctagtccggtccgcctccgcggagttctggctcgacgagttcaccacggacggcgacgtccgcagagactacgaccgttctggccggcaggtggcgtcgcttgtcctcgaccagcgttctggcgctggcttcaactccacgcgcaagtacctcttcggcgagttcagcgtggagatgaagctcgtcggcggcaactccgctgggactgtcacctccttctacctgacgtccggcgagggcgacgagcacgacgagatcgacatggagttcatgggcaactccagcggctccccgacggtgctcaacacgaacgtgtgggccaacggcgacggcaagaaggagcaccagttctacctgtggttcgacccggccgccgacttccacaaatacaagatcgtctggaacgacaagaacatcatcttccaggtggacgacgtgacggtgcgcgtcttcaagcgctacgatgacctgccgtacccggacgccaagcccatggcggtgcacgccacgctgtgggacggcagctactgggccacgcgcaagggcgaggtcaagatcgactggtccagcgcgcccttcgtcgtctcctaccgagactacaccgccaacgcctgcgccgtcgacggccggaacggcggcggcagctcgtcgtgccccgccggtgccaacgagtggatggacaggcagtccgacgacaccgaccgtctcaccgtggcttgggcgcgccggaactgcttgcagtacaactactgcgatgacgggtggcgcttcccgcaggggttccccggagagtgcgcccgcaactgatccaccatctgccctgcagtcgcgagtctccaagtctcgccggcctcatcgcatcctcttaccgcagatataggcatactagatcgagttcattcttggattttatgttcttgtaattgtcttattgtacgtacgtacatcgtctcttccgactcacaaagagcccagcagcgtgcgtcctggatctggatgcatatcgaaggtactagttctgtgacttctaaaagatctttttttct

SEQ ID NO: 8044 - protein, 290 aa, Zea mays subsp. mays
  peptide (1)..(290): Ceres Seq. ID no. 12408604
  misc_feature (34)..(211): Pfam Name: Glycosyl hydrolases family 16 Pfam Description: Glycosyl hydrolases family 16
  misc_feature (8)..(289): Homolog of NCBI NO: 40253521 NR Description: putative end-xyloglucan transferase [Oryza sativa
  misc_feature (1)..(289): Homolog of NCBI NO: 7447410 NR Description: xyloglucan endo-1,4-beta-D-glucanase (EC 3.2.1.-) barley >gi|1890573|emb|CAA63661.1| xyloglucan
  misc_feature (14)..(289): Homolog of NCBI NO: 14330334 NR Description: Xet2 protein [Festuca pratensis]
  misc_feature (2)..(289): Homolog of NCBI NO: 7447415 NR Description: xyloglucan endotransglycosylase (EC 2.4.1.-) - >gi|1885312|emb|CAA62848.1| similar to Xyloglucan
  misc_feature (8)..(259): Homolog of NCBI NO: 7447411 NR Description: end-xyloglucan transferase (EC 2.4.1.-) - rice
  misc_feature (1)..(288): Homolog of NCBI NO: 32489753 NR Description: OSJNBb0015N08.5 [Oryza sativa (japonica
  misc_feature (31)..(287): Homolog of NCBI NO: 8886865 NR Description: xyloglucan endotransglycosylase XET1 [Asparagus
  misc_feature (23)..(287): Homolog of NCBI NO: 29500891 NR Description: putative xyloglucan endotransglycosylase [Cucumis >gi|29500899|emb|CAD87533.1| putative xyloglucan
MMRPTSTLAMVVPSLAVAILCILVRSASAEFWLDEFTTDGDVRRDYDRSGRQVASLVLDQRSGAGFNSTRKYLFGEFSVEMKLVGGNSAGTVTSFYLTSGEGDEHDEIDMEFMGNSSGSPTVLNTNVWANGDGKKEHQFYLWFDPAADFHKYKIVWNDKNIIFQVDDVTVRVFKRYDDLPYPDAKPMAVHATLWDGSYWATRKGEVKIDWSSAPFVVSYRDYTANACAVDGRNGGGSSSCPAGANEWMDRQSDDTDRLTVAWARRNCLQYNYCDDGWRFPQGFPGECARN

SEQ ID NO: 8045 - protein, 289 aa, Zea mays subsp. mays
  peptide (1)..(289): Ceres Seq. ID no. 12408605
  misc_feature (33)..(210): Pfam Name: Glycosyl hydrolases family 16 Pfam Description: Glycosyl hydrolases family 16
  misc_feature (7)..(288): Homolog of NCBI NO: 40253521 NR Description: putative end-xyloglucan transferase [Oryza sativa
  misc_feature (1)..(288): Homolog of NCBI NO: 7447410 NR Description: xyloglucan endo-1,4-beta-D-glucanase (EC 3.2.1.-) barley >gi|1890573|emb|CAA63661.1| xyloglucan
  misc_feature (13)..(288): Homolog of NCBI NO: 14330334 NR Description: Xet2 protein [Festuca pratensis]
  misc_feature (1)..(288): Homolog of NCBI NO: 7447415 NR Description: xyloglucan endotransglycosylase (EC 2.4.1.-) - >gi|1885312|emb|CAA62848.1| similar to Xyloglucan
  misc_feature (7)..(258): Homolog of NCBI NO: 7447411 NR Description: end-xyloglucan transferase (EC 2.4.1.-) - rice
  misc_feature (1)..(287): Homolog of NCBI NO: 32489753 NR Description: OSJNBb0015N08.5 [Oryza sativa (japonica
  misc_feature (30)..(286): Homolog of NCBI NO: 8886865 NR Description: xyloglucan endotransglycosylase XET1 [Asparagus
  misc_feature (22)..(286): Homolog of NCBI NO: 29500891 NR Description: putative xyloglucan endotransglycosylase [Cucumis >gi|29500899|emb|CAD87533.1| putative xyloglucan
MRPTSTLAMVVPSLAVAILCILVRSASAEFWLDEFTTDGDVRRDYDRSGRQVASLVLDQRSGAGFNSTRKYLFGEFSVEMKLVGGNSAGTVTSFYLTSGEGDEHDEIDMEFMGNSSGSPTVLNTNVWANGDGKKEHQFYLWFDPAADFHKYKIVWNDKNIIFQVDDVTVRVFKRYDDLPYPDAKPMAVHATLWDGSYWATRKGEVKIDWSSAPFVVSYRDYTANACAVDGRNGGGSSSCPAGANEWMDRQSDDTDRLTVAWARRNCLQYNYCDDGWRFPQGFPGECARN

SEQ ID NO: 8046 - protein, 281 aa, Zea mays subsp. mays
  peptide (1)..(281): Ceres Seq. ID no. 12408606
  misc_feature (25)..(202): Pfam Name: Glycosyl hydrolases family 16 Pfam Description: Glycosyl hydrolases family 16
  misc_feature (1)..(280): Homolog of NCBI NO: 40253521 NR Description: putative end-xyloglucan transferase [Oryza sativa
  misc_feature (1)..(280): Homolog of NCBI NO: 7447410 NR Description: xyloglucan endo-1,4-beta-D-glucanase (EC 3.2.1.-) barley >gi|1890573|emb|CAA63661.1| xyloglucan
  misc_feature (5)..(280): Homolog of NCBI NO: 14330334 NR Description: Xet2 protein [Festuca pratensis]
  misc_feature (1)..(280): Homolog of NCBI NO: 7447415 NR Description: xyloglucan endotransglycosylase (EC 2.4.1.-) - >gi|1885312|emb|CAA62848.1| similar to Xyloglucan
  misc_feature (1)..(250): Homolog of NCBI NO: 7447411 NR Description: end-xyloglucan transferase (EC 2.4.1.-) - rice
  misc_feature (1)..(279): Homolog of NCBI NO: 32489753 NR Description: OSJNBb0015N08.5 [Oryza sativa (japonica
  misc_feature (22)..(278): Homolog of NCBI NO: 8886865 NR Description: xyloglucan endotransglycosylase XET1 [Asparagus
  misc_feature (14)..(278): Homolog of NCBI NO: 29500891 NR Description: putative xyloglucan endotransglycosylase [Cucumis >gi|29500899|emb|CAD87533.1| putative xyloglucan
MVVPSLAVAILCILVRSASAEFWLDEFTTDGDVRRDYDRSGRQVASLVLDQRSGAGFNSTRKYLFGEFSVEMKLVGGNSAGTVTSFYLTSGEGDEHDEIDMEFMGNSSGSPTVLNTNVWANGDGKKEHQFYLWFDPAADFHKYKIVWNDKNIIFQVDDVTVRVFKRYDDLPYPDAKPMAVHATLWDGSYWATRKGEVKIDWSSAPFVVSYRDYTANACAVDGRNGGGSSSCPAGANEWMDRQSDDTDRLTVAWARRNCLQYNYCDDGWRFPQGFPGECARN

SEQ ID NO: 8047 - DNA, 1990 bp, Zea mays subsp. mays
  misc_feature (1)..(1990): Ceres Seq. ID no. 12372870
  misc_feature: MA Experiment ID: 20000492 Result: Down-regulated in Transcription
  misc_feature: MA Experiment 20000492 PARAMETER Experiment Name: Zm_Hybrid_Seed_Dev_P Parameter: DAP Value: 12
  misc_feature: MA Experiment 20000492 PARAMETER Experiment Name: Zm_Hybrid_Seed_Dev_P Parameter: Organism Value: Zea mays
  misc_feature: MA Experiment 20000492 PARAMETER Experiment Name: Zm_Hybrid_Seed_Dev_P Parameter: Plant Line Value: 35A19
  misc_feature: MA Experiment 20000492 PARAMETER Experiment Name: Zm_Hybrid_Seed_Dev_P Parameter: Tissue Value: Fert Kernel vs. Unfert Floret
gttccaggtcgtggtctttgccaaattcccacgcccctgcccaccctgcccgaatcctctcgccctttacccccgcccgcgaccccattcacactctcgctgctccactccgctccgctcagctcgtcgggacgcgcccccgcctcccatcccatgcccgcccccgcgctcgtcggaggccgctcgcggcggcctcccatcccgccgcgctgacgagagggcctctcggtgggggcgcttcgggtgttcattttgtccgttcggggaaggggagtgcggcgatggggaagcagcaggaggggaagcggcggcgcggggagaaggacgggcagcggaaggggagggggaagacagctgcagcggcggtgccggaggacgcggcgccagtggccgggtgctggatccgcttcccgcgcctccgcggctgcatgccgtcgcgcgccaaggtcgactcctccaccagcgcgcgtggcggcggccgggaaaccaaaccatctactgatgatgcttgccaggaccaatcagtaccaccagcctctggttccgcaacaaccagtaacactggaagtatctcaccttcttccatagttggagaggagctaaaactagctttccaactgcgtagatttacttttagtgaactgaaatgtgccacgagaaacttccgacctgagagtcttcttggcgagggaggttttggctgtgtctttaaaggatggattgaggagaatggaactgctcctgttaagccaggcaccggattaactgttgctgtcaagacactcaaccatgatgggttgcaggggcataaagagtgggtggcagaagttgattttcttggaaaccttcagcatccacatctagtgaaattggttggctactgcattgaagatgaccagaggttgcttgtgtatgaatttatgccccgtggaagtttggagaatcatctttttagaaagtcattgcctctaccatgggccattagaatgaaaattgctcttggtgctgcgaaaagcctcgcttttcttcatgaagaagctgaaagaccagtaatctatcgggacttcaaaacctccaatattcttttagatgcggactataacgcaaaactctctgattttggacttgctaaagatggccctgagggtgataaaacacatgtgtcaactagggtcatgggaacatatggatatgctgcacctgaatatgtaatgacaggtcacctgacatcgaagagtgacgtatatagctttggagttgtactactagagatgatgactggtagaaggtcaatggacaagaacaggccaaacggagaacacaacctggttgaatgggcacgcccttatctgggagaaagacgcagattctataagcttgtagaccctcgtttggatgggaacttctccataaaaggcgcccagaagacggctcagctggcccatgcctgcctcagccgtgaccccaaggctaggcctctgatgagccaggtggtggaggtgctgaagcctctccagaacctcaaggacatggccagctcttcctactacttccagtccatgcaacatgagcggcgcacagcacttgccaacccatatggcagtcaaagcatgaaagcgcagagcacctttgcgcggaacgggcagcagcccatgaggagcctctcgtatggccctcatgcttccccgtatcgccagtcgccaaggcttgacagcaagcggcaatgagtcatggtgcttgtctgtcgaccataacatattttcaagactgaagttgtaaccagaactggtgtatgaactcagccatccaacaagcatctgagctatctattattgtggatgaagcagcaacattgattcgaatttgcatatcatctgcgagtgaatttttttctctcttgttatcgcttacattttagctgtactgtctttacggctctagataccttgacttgaaaggtggaactaaacagggttttgatcggtctttg

SEQ ID NO: 8048 - protein, 574 aa, Zea mays subsp. mays
  peptide (1)..(574): Ceres Seq. ID no. 12372871
  misc_feature (142)..(562): Homolog of NCBI NO: 28804505 NR Description: serine/threonine protein kinase [Aster tripolium]
  misc_feature (94)..(567): Homolog of NCBI NO: 15232085 NR Description: putative protein kinase; protein id: At3g01300.1, by cDNA: 30775., supported by cDNA: gi_16209632 [Arabidopsis >gi|6094554|gb|AAF03496.1|AC010676_6 putative protein kinase
  misc_feature (94)..(567): Homolog of NCBI NO: 21592646 NR Description: putative protein kinase [Arabidopsis thaliana]
  misc_feature (106)..(572): Homolog of NCBI NO: 15233058 NR Description: protein kinase, putative; protein id: At3g28690.1
  misc_feature (106)..(572): Homolog of NCBI NO: 9294282 NR Description: protein kinase [Arabidopsis thaliana]
  misc_feature (131)..(523): Homolog of NCBI NO: 34898434 NR Description: ESTs C98382(C2985),D22444(C11129) correspond to a of the predicted gene.~Similar to Arabidopsis thaliana APK1 gene
  misc_feature (163)..(545): Homolog of NCBI NO: 14719339 NR Description: putative protein kinase [Oryza sativa]
  misc_feature (181)..(558): Homolog of NCBI NO: 34906046 NR Description: putative serine/threonine-specific protein kinase
  misc_feature (94)..(568): Homolog of NCBI NO: 34912198 NR Description: putative protein kinase [Oryza sativa (japonica group)] >gi|20160990|dbj|BAB89924.1| putative protein kinase
  misc_feature (81)..(567): Homolog of NCBI NO: 15242204 NR Description: serine/threonine specific protein kinase -like; id: At5g15080.1, supported by cDNA: gi_17064887 [Arabidopsis
SRSWSLPNSHAPAHPARILSPFTPARDPIHTLAAPLRSAQLVGTRPRLPSHARPRARRRPLAAASHPAALTRGPLGGGASGVHFVRSGKGSAAMGKQQEGKRRRGEKDGQRKGRGKTAAAAVPEDAAPVAGCWIRFPRLRGCMPSRAKVDSSTSARGGGRETKPSTDDACQDQSVPPASGSATTSNTGSISPSSIVGEELKLAFQLRRFTFSELKCATRNFRPESLLGEGGFGCVFKGWIEENGTAPVKPGTGLTVAVKTLNHDGLQGHKEWVAEVDFLGNLQHPHLVKLVGYCIEDDQRLLVYEFMPRGSLENHLFRKSLPLPWAIRMKIALGAAKSLAFLHEEAERPVIYRDFKTSNILLDADYNAKLSDFGLAKDGPEGDKTHVSTRVMGTYGYAAPEYVMTGHLTSKSDVYSFGVVLLEMMTGRRSMDKNRPNGEHNLVEWARPYLGERRRFYKLVDPRLDGNFSIKGAQKTAQLAHACLSRDPKARPLMSQVVEVLKPLQNLKDMASSSYYFQSMQHERRTALANPYGSQSMKAQSTFARNGQQPMRSLSYGPHASPYRQSPRLDSKRQ

SEQ ID NO: 8049 - protein, 481 aa, Zea mays subsp. mays
  peptide (1)..(481): Ceres Seq. ID no. 12372872
  misc_feature (1)..(475): Homolog of NCBI NO: 34912198 NR Description: putative protein kinase [Oryza sativa (japonica group)] >gi|20160990|dbj|BAB89924.1| putative protein kinase
  misc_feature (1)..(474): Homolog of NCBI NO: 15242204 NR Description: serine/threonine specific protein kinase -like; id: At5g15080.1, supported by cDNA: gi_17064887 [Arabidopsis
  misc_feature (49)..(469): Homolog of NCBI NO: 28804505 NR Description: serine/threonine protein kinase [Aster tripolium]
  misc_feature (1)..(474): Homolog of NCBI NO: 15232085 NR Description: putative protein kinase; protein id: At3g01300.1, by cDNA: 30775., supported by cDNA: gi_16209632 [Arabidopsis >gi|6094554|gb|AAF03496.1|AC010676_6 putative protein kinase
  misc_feature (1)..(474): Homolog of NCBI NO: 21592646 NR Description: putative protein kinase [Arabidopsis thaliana]
  misc_feature (13)..(479): Homolog of NCBI NO: 15233058 NR Description: protein kinase, putative; protein id: At3g28690.1
  misc_feature (13)..(479): Homolog of NCBI NO: 9294282 NR Description: protein kinase [Arabidopsis thaliana]
  misc_feature (38)..(430): Homolog of NCBI NO: 34898434 NR Description: ESTs C98382(C2985),D22444(C11129) correspond to a of the predicted gene.~Similar to Arabidopsis thaliana APK1 gene
  misc_feature (70)..(452): Homolog of NCBI NO: 14719339 NR Description: putative protein kinase [Oryza sativa]
  misc_feature (88)..(465): Homolog of NCBI NO: 34906046 NR Description: putative serine/threonine-specific protein kinase
MGKQQEGKRRRGEKDGQRKGRGKTAAAAVPEDAAPVAGCWIRFPRLRGCMPSRAKVDSSTSARGGGRETKPSTDDACQDQSVPPASGSATTSNTGSISPSSIVGEELKLAFQLRRFTFSELKCATRNFRPESLLGEGGFGCVFKGWIEENGTAPVKPGTGLTVAVKTLNHDGLQGHKEWVAEVDFLGNLQHPHLVKLVGYCIEDDQRLLVYEFMPRGSLENHLFRKSLPLPWAIRMKIALGAAKSLAFLHEEAERPVIYRDFKTSNILLDADYNAKLSDFGLAKDGPEGDKTHVSTRVMGTYGYAAPEYVMTGHLTSKSDVYSFGVVLLEMMTGRRSMDKNRPNGEHNLVEWARPYLGERRRFYKLVDPRLDGNFSIKGAQKTAQLAHACLSRDPKARPLMSQVVEVLKPLQNLKDMASSSYYFQSMQHERRTALANPYGSQSMKAQSTFARNGQQPMRSLSYGPHASPYRQSPRLDSKRQ

SEQ ID NO: 8050 - protein, 432 aa, Zea mays subsp. mays
  peptide (1)..(432): Ceres Seq. ID no. 12372873
  misc_feature (1)..(426): Homolog of NCBI NO: 34912198 NR Description: putative protein kinase [Oryza sativa (japonica group)] >gi|20160990|dbj|BAB89924.1| putative protein kinase
  misc_feature (1)..(425): Homolog of NCBI NO: 15242204 NR Description: serine/threonine specific protein kinase -like; id: At5g15080.1, supported by cDNA: gi_17064887 [Arabidopsis
  misc_feature (1)..(420): Homolog of NCBI NO: 28804505 NR Description: serine/threonine protein kinase [Aster tripolium]
  misc_feature (1)..(425): Homolog of NCBI NO: 15232085 NR Description: putative protein kinase; protein id: At3g01300.1, by cDNA: 30775., supported by cDNA: gi_16209632 [Arabidopsis >gi|6094554|gb|AAF03496.1|AC010676_6 putative protein kinase
  misc_feature (1)..(425): Homolog of NCBI NO: 21592646 NR Description: putative protein kinase [Arabidopsis thaliana]
  misc_feature (1)..(430): Homolog of NCBI NO: 15233058 NR Description: protein kinase, putative; protein id: At3g28690.1
  misc_feature (1)..(430): Homolog of NCBI NO: 9294282 NR Description: protein kinase [Arabidopsis thaliana]
  misc_feature (1)..(381): Homolog of NCBI NO: 34898434 NR Description: ESTs C98382(C2985),D22444(C11129) correspond to a of the predicted gene.~Similar to Arabidopsis thaliana APK1 gene
  misc_feature (21)..(403): Homolog of NCBI NO: 14719339 NR Description: putative protein kinase [Oryza sativa]
  misc_feature (39)..(416): Homolog of NCBI NO: 34906046 NR Description: putative serine/threonine-specific protein kinase
MPSRAKVDSSTSARGGGRETKPSTDDACQDQSVPPASGSATTSNTGSISPSSIVGEELKLAFQLRRFTFSELKCATRNFRPESLLGEGGFGCVFKGWIEENGTAPVKPGTGLTVAVKTLNHDGLQGHKEWVAEVDFLGNLQHPHLVKLVGYCIEDDQRLLVYEFMPRGSLENHLFRKSLPLPWAIRMKIALGAAKSLAFLHEEAERPVIYRDFKTSNILLDADYNAKLSDFGLAKDGPEGDKTHVSTRVMGTYGYAAPEYVMTGHLTSKSDVYSFGVVLLEMMTGRRSMDKNRPNGEHNLVEWARPYLGERRRFYKLVDPRLDGNFSIKGAQKTAQLAHACLSRDPKARPLMSQVVEVLKPLQNLKDMASSSYYFQSMQHERRTALANPYGSQSMKAQSTFARNGQQPMRSLSYGPHASPYRQSPRLDSKRQ

SEQ ID NO: 8051 - DNA, 750 bp, Zea mays subsp. mays
  misc_feature (1)..(750): Ceres Seq. ID no. 12356564
  misc_feature: MA Experiment ID: 108523 Result: Down-regulated in Transcription
  misc_feature: MA Experiment 108523 PARAMETER Experiment Name: Zm_42deg_Heat_P Parameter: Age (day) Value: 8
  misc_feature: MA Experiment 108523 PARAMETER Experiment Name: Zm_42deg_Heat_P Parameter: Organism Value: Zea mays
  misc_feature: MA Experiment 108523 PARAMETER Experiment Name: Zm_42deg_Heat_P Parameter: Plant Line Value: 35A19
  misc_feature: MA Experiment 108523 PARAMETER Experiment Name: Zm_42deg_Heat_P Parameter: Temperature (deg C) Value: 42 vs. 22
  misc_feature: MA Experiment 108523 PARAMETER Experiment Name: Zm_42deg_Heat_P Parameter: Timepoint (hr) Value: 6
  misc_feature: MA Experiment 108523 PARAMETER Experiment Name: Zm_42deg_Heat_P Parameter: Tissue Value: Aerial
  misc_feature: MA Experiment ID: 108535 Result: Up-regulated in Transcription
  misc_feature: MA Experiment 108535 PARAMETER Experiment Name: Zm_Meristem_P Parameter: Age (day) Value: 8
  misc_feature: MA Experiment 108535 PARAMETER Experiment Name: Zm_Meristem_P Parameter: Organism Value: Zea mays
  misc_feature: MA Experiment 108535 PARAMETER Experiment Name: Zm_Meristem_P Parameter: Plant Line Value: 35A19
  misc_feature: MA Experiment 108535 PARAMETER Experiment Name: Zm_Meristem_P Parameter: Tissue Value: Root Meristem vs. Above Root Meristem
  misc_feature: MA Experiment ID: 108544 Result: Down-regulated in Transcription
  misc_feature: MA Experiment ID: 20000478 Result: Down-regulated in Transcription
  misc_feature: MA Experiment 20000478 PARAMETER Experiment Name: Zm_5mM_SA_P Parameter: Age (day) Value: 11
  misc_feature: MA Experiment 20000478 PARAMETER Experiment Name: Zm_5mM_SA_P Parameter: Organism Value: Zea mays
  misc_feature: MA Experiment 20000478 PARAMETER Experiment Name: Zm_5mM_SA_P Parameter: Plant Line Value: 35A19
  misc_feature: MA Experiment 20000478 PARAMETER Experiment Name: Zm_5mM_SA_P Parameter: Timepoint (hr) Value: 72
  misc_feature: MA Experiment 20000478 PARAMETER Experiment Name: Zm_5mM_SA_P Parameter: Tissue Value: Aerial
  misc_feature: MA Experiment 20000478 PARAMETER Experiment Name: Zm_5mM_SA_P Parameter: Treatment Value: 5mM SA vs. No Treatment
  misc_feature: MA Experiment ID: 20000487 Result: Down-regulated in Transcription
  misc_feature: MA Experiment 20000487 PARAMETER Experiment Name: Zm_50mM_NH4NO3_L_to_H_P Parameter: Organism Value: Zea mays
  misc_feature: MA Experiment 20000487 PARAMETER Experiment Name: Zm_50mM_NH4NO3_L_to_H_P Parameter: Timepoint (hr) Value: 4
  misc_feature: MA Experiment 20000487 PARAMETER Experiment Name: Zm_50mM_NH4NO3_L_to_H_P Parameter: Tissue Value: Leaves
  misc_feature: MA Experiment 20000487 PARAMETER Experiment Name: Zm_50mM_NH4NO3_L_to_H_P Parameter: Treatment Value: 50mM NH4NO3 vs. 100mM Mannitol
  misc_feature: MA Experiment ID: 20000632 Result: Down-regulated in Transcription
  misc_feature: MA Experiment 20000632 PARAMETER Experiment Name: Zm_Herbicide-Treatments_P Parameter: Timepoint (hr) Value: 4
  misc_feature: MA Experiment 20000632 PARAMETER Experiment Name: Zm_Herbicide-Treatments_P Parameter: Tissue Value: Aerial
  misc_feature: MA Experiment 20000632 PARAMETER Experiment Name: Zm_Herbicide-Treatments_P Parameter: Treatment Value: Glean vs. No Treatment
aatcaccaatcagtcagtcacagctcacagcaaacaccgcgaagccgcccccgctcccaaacccgaccgagcaaagcgcaaagccccccaaccgcggatcaatccgcagcatcgatggcgcccaaggcggagaaaaagccggcggcgaagaagcccgcggaggaggagcccgcgaccgagaaggcggagaaggctccggcagggaagaagccgaaggcggagaaacgcctccccgcgggcaagtccggcgccggcgagggcaagaagggcaagaagaaagccaagaagagcgtggagacctacaagatctacatcttcaaggtgctcaagcaggtgcaccccgacatcggcatctcgtccaaggccatgtccatcatgaattccttcatcaacgacatcttcgagaagctcgccgcggaggccgccaagctcgcccgctacaacaagaagcccaccatcacctcccgcgagatccagacctccgtccgcctcgtcctacccggcgagctcgccaagcacgccgtctctgaaggcacaaaggcggtcaccaagttcacttcgtcttagattggttgccttccctctcgtttgtactggtgtctggtagtagatctcatctagttgggggtgctgttgctagtcggtcgtgggtccctttggtatgattggccctgttcaatgggtttgcaagtgattagtttgtacatggttgtagtagatctcgtttcagctgtgattctttattactgc

SEQ ID NO: 8052 - protein, 188 aa, Zea mays subsp. mays
  peptide (1)..(188): Ceres Seq. ID no. 12356565
  misc_feature (67)..(187): Pfam Name: Core histone H2A/H2B/H3/H4 Pfam Description: Core histone H2A/H2B/H3/H4
  misc_feature (39)..(188): Homolog of NCBI NO: 399853 NR Description: Histone H2B.1 >gi|283041|pir||S28048 histone H2B
  misc_feature (39)..(188): Homolog of NCBI NO: 3913804 NR Description: Histone H2B.3 >gi|577825|emb|CAA49584.1| H2B
  misc_feature (39)..(188): Homolog of NCBI NO: 122022 NR Description: Histone H2B >gi|283025|pir||S22323 histone H2B -
  misc_feature (39)..(188): Homolog of NCBI NO: 34895908 NR Description: putative histone H2B [Oryza sativa (japonica group)] >gi|13872950|dbj|BAB44055.1| putative histone H2B [Oryza
  misc_feature (39)..(188): Homolog of NCBI NO: 34895904 NR Description: putative histone H2B [Oryza sativa (japonica group)] >gi|9663991|dbj|BAB03632.1| putative histone H2B [Oryza
  misc_feature (23)..(187): Homolog of NCBI NO: 1708103 NR Description: Histone H2B-I >gi|2119003|pir||S59125 histone H2B
  misc_feature (71)..(188): Homolog of NCBI NO: 38512027 NR Description: Hist1h2bp protein [Mus musculus]
  misc_feature (67)..(188): Homolog of NCBI NO: 39595176 NR Description: Hypothetical protein CBG03777 [Caenorhabditis
  misc_feature (30)..(185): Homolog of NCBI NO: 15223150 NR Description: histone H2B, putative; protein id: At1g08170.1 thaliana] >gi|6579213|gb|AAF18256.1|AC011438_18 T23G18.3 thaliana] >gi|8778831|gb|AAF79830.1|AC026875_10 T6D22.26
NHQSVSHSSQQTPRSRPRSQTRPSKAQSPPTADQSAASMAPKAEKKPAAKKPAEEEPATEKAEKAPAGKKPKAEKRLPAGKSGAGEGKKGKKKAKKSVETYKIYIFKVLKQVHPDIGISSKAMSIMNSFINDIFEKLAAEAAKLARYNKKPTITSREIQTSVRLVLPGELAKHAVSEGTKAVTKFTSS

SEQ ID NO: 8053 - protein, 175 aa, Zea mays subsp. mays
  peptide (1)..(175): Ceres Seq. ID no. 12356566
  misc_feature (1)..(77): Pfam Name: Glycoprotein GG/GX Pfam Description: Glycoprotein GG/GX
  misc_feature (68)..(175): Homolog of NCBI NO: 17505204 NR Description: histone 1, H2bc; H2B histone family, member S musculus] >gi|12837582|dbj|BAB23873.1| unnamed protein product
SPISQSQLTANTAKPPPLPNPTEQSAKPPNRGSIRSIDGAQGGEKAGGEEARGGGARDREGGEGSGREEAEGGETPPRGQVRRRRGQEGQEESQEERGDLQDLHLQGAQAGAPRHRHLVQGHVHHEFLHQRHLREARRGGRQARPLQQEAHHHLPRDPDLRPPRPTRRARQARRL

SEQ ID NO: 8054 - protein, 150 aa, Zea mays subsp. mays
  peptide (1)..(150): Ceres Seq. ID no. 12356567
  misc_feature (29)..(149): Pfam Name: Core histone H2A/H2B/H3/H4 Pfam Description: Core histone H2A/H2B/H3/H4
  misc_feature (1)..(150): Homolog of NCBI NO: 399853 NR Description: Histone H2B.1 >gi|283041|pir||S28048 histone H2B
  misc_feature (1)..(150): Homolog of NCBI NO: 3913804 NR Description: Histone H2B.3 >gi|577825|emb|CAA49584.1| H2B
  misc_feature (1)..(150): Homolog of NCBI NO: 122022 NR Description: Histone H2B >gi|283025|pir||S22323 histone H2B -
  misc_feature (1)..(150): Homolog of NCBI NO: 34895908 NR Description: putative histone H2B [Oryza sativa (japonica group)] >gi|13872950|dbj|BAB44055.1| putative histone H2B [Oryza
  misc_feature (1)..(150): Homolog of NCBI NO: 34895904 NR Description: putative histone H2B [Oryza sativa (japonica group)] >gi|9663991|dbj|BAB03632.1| putative histone H2B [Oryza
  misc_feature (1)..(149): Homolog of NCBI NO: 1708103 NR Description: Histone H2B-I >gi|2119003|pir||S59125 histone H2B
  misc_feature (33)..(150): Homolog of NCBI NO: 38512027 NR Description: Hist1h2bp protein [Mus musculus]
  misc_feature (29)..(150): Homolog of NCBI NO: 39595176 NR Description: Hypothetical protein CBG03777 [Caenorhabditis
  misc_feature (1)..(147): Homolog of NCBI NO: 15223150 NR Description: histone H2B, putative; protein id: At1g08170.1 thaliana] >gi|6579213|gb|AAF18256.1|AC011438_18 T23G18.3 thaliana] >gi|8778831|gb|AAF79830.1|AC026875_10 T6D22.26
MAPKAEKKPAAKKPAEEEPATEKAEKAPAGKKPKAEKRLPAGKSGAGEGKKGKKKAKKSVETYKIYIFKVLKQVHPDIGISSKAMSIMNSFINDIFEKLAAEAAKLARYNKKPTITSREIQTSVRLVLPGELAKHAVSEGTKAVTKFTSS

SEQ ID NO: 8055 - DNA, 1556 bp, Zea mays subsp. mays
  misc_feature (1)..(1556): Ceres Seq. ID no. 12343265
  misc_feature: MA Experiment ID: 108504 Result: Up-regulated in Transcription
  misc_feature: MA Experiment 108504 PARAMETER Experiment Name: Zm_Drought_P Parameter: Age (day) Value: 8
  misc_feature: MA Experiment 108504 PARAMETER Experiment Name: Zm_Drought_P Parameter: Organism Value: Zea mays
  misc_feature: MA Experiment 108504 PARAMETER Experiment Name: Zm_Drought_P Parameter: Plant Line Value: 35A19
  misc_feature: MA Experiment 108504 PARAMETER Experiment Name: Zm_Drought_P Parameter: Timepoint (hr) Value: 12
  misc_feature: MA Experiment 108504 PARAMETER Experiment Name: Zm_Drought_P Parameter: Tissue Value: Aerial
  misc_feature: MA Experiment 108504 PARAMETER Experiment Name: Zm_Drought_P Parameter: Treatment Value: Drought vs. No Drought
  misc_feature: MA Experiment ID: 108522 Result: Up-regulated in Transcription
  misc_feature: MA Experiment 108522 PARAMETER Experiment Name: Zm_42deg_Heat_P Parameter: Age (day) Value: 8
  misc_feature: MA Experiment 108522 PARAMETER Experiment Name: Zm_42deg_Heat_P Parameter: Organism Value: Zea mays
  misc_feature: MA Experiment 108522 PARAMETER Experiment Name: Zm_42deg_Heat_P Parameter: Plant Line Value: 35A19
  misc_feature: MA Experiment 108522 PARAMETER Experiment Name: Zm_42deg_Heat_P Parameter: Temperature (deg C) Value: 42 vs. 22
  misc_feature: MA Experiment 108522 PARAMETER Experiment Name: Zm_42deg_Heat_P Parameter: Timepoint (hr) Value: 1
  misc_feature: MA Experiment 108522 PARAMETER Experiment Name: Zm_42deg_Heat_P Parameter: Tissue Value: Aerial
  misc_feature: MA Experiment ID: 108523 Result: Up-regulated in Transcription
  misc_feature: MA Experiment 108523 PARAMETER Experiment Name: Zm_42deg_Heat_P Parameter: Age (day) Value: 8
  misc_feature: MA Experiment 108523 PARAMETER Experiment Name: Zm_42deg_Heat_P Parameter: Organism Value: Zea mays
  misc_feature: MA Experiment 108523 PARAMETER Experiment Name: Zm_42deg_Heat_P Parameter: Plant Line Value: 35A19
  misc_feature: MA Experiment 108523 PARAMETER Experiment Name: Zm_42deg_Heat_P Parameter: Temperature (deg C) Value: 42 vs. 22
  misc_feature: MA Experiment 108523 PARAMETER Experiment Name: Zm_42deg_Heat_P Parameter: Timepoint (hr) Value: 6
  misc_feature: MA Experiment 108523 PARAMETER Experiment Name: Zm_42deg_Heat_P Parameter: Tissue Value: Aerial
  misc_feature: MA Experiment ID: 108527 Result: Up-regulated in Transcription
  misc_feature: MA Experiment 108527 PARAMETER Experiment Name: Zm_5mM_NO_P Parameter: Age (day) Value: 8
  misc_feature: MA Experiment 108527 PARAMETER Experiment Name: Zm_5mM_NO_P Parameter: Organism Value: Zea mays
  misc_feature: MA Experiment 108527 PARAMETER Experiment Name: Zm_5mM_NO_P Parameter: Plant Line Value: 35A19
  misc_feature: MA Experiment 108527 PARAMETER Experiment Name: Zm_5mM_NO_P Parameter: Timepoint (hr) Value: 6
  misc_feature: MA Experiment 108527 PARAMETER Experiment Name: Zm_5mM_NO_P Parameter: Tissue Value: Aerial
  misc_feature: MA Experiment 108527 PARAMETER Experiment Name: Zm_5mM_NO_P Parameter: Treatment Value: 5mM NO vs. No Treatment
  misc_feature: MA Experiment ID: 108597 Result: Up-regulated in Transcription
  misc_feature: MA Experiment 108597 PARAMETER Experiment Name: Zm_100uM_ABA_P Parameter: Age (day) Value: 9
  misc_feature: MA Experiment 108597 PARAMETER Experiment Name: Zm_100uM_ABA_P Parameter: Organism Value: Zea mays
  misc_feature: MA Experiment 108597 PARAMETER Experiment Name: Zm_100uM_ABA_P Parameter: Plant Line Value: 35A19
  misc_feature: MA Experiment 108597 PARAMETER Experiment Name: Zm_100uM_ABA_P Parameter: Timepoint (hr) Value: 24
  misc_feature: MA Experiment 108597 PARAMETER Experiment Name: Zm_100uM_ABA_P Parameter: Tissue Value: Aerial
  misc_feature: MA Experiment 108597 PARAMETER Experiment Name: Zm_100uM_ABA_P Parameter: Treatment Value: 100uM ABA vs. No Treatment
  misc_feature: MA Experiment ID: 20000480 Result: Up-regulated in Transcription
  misc_feature: MA Experiment 20000480 PARAMETER Experiment Name: Zm_Drought_P Parameter: Age (day) Value: 11
  misc_feature: MA Experiment 20000480 PARAMETER Experiment Name: Zm_Drought_P Parameter: Organism Value: Zea mays
  misc_feature: MA Experiment 20000480 PARAMETER Experiment Name: Zm_Drought_P Parameter: Plant Line Value: 35A19
  misc_feature: MA Experiment 20000480 PARAMETER Experiment Name: Zm_Drought_P Parameter: Timepoint (hr) Value: 72
  misc_feature: MA Experiment 20000480 PARAMETER Experiment Name: Zm_Drought_P Parameter: Tissue Value: Aerial
  misc_feature: MA Experiment 20000480 PARAMETER Experiment Name: Zm_Drought_P Parameter: Treatment Value: Drought vs. No Drought
  misc_feature: MA Experiment ID: 20000535 Result: Up-regulated in Transcription
  misc_feature: MA Experiment 20000535 PARAMETER Experiment Name: Zm_Hybrid_Seed_Dev_P Parameter: DAP Value: 30 vs. 12
  misc_feature: MA Experiment 20000535 PARAMETER Experiment Name: Zm_Hybrid_Seed_Dev_P Parameter: Organism Value: Zea mays
  misc_feature: MA Experiment 20000535 PARAMETER Experiment Name: Zm_Hybrid_Seed_Dev_P Parameter: Plant Line Value: 35A19
  misc_feature: MA Experiment 20000535 PARAMETER Experiment Name: Zm_Hybrid_Seed_Dev_P Parameter: Tissue Value: Embryo vs. Unfert Floret
ctaatcgaaaaattctagaattgacgaaggtggctgtgccgagttctccacaccgctggagacttccaggtgcttcaggaaaccgagggggcgttgagataggtaaaaaaaaggaactccggcgaggtcgcccccggtagtggccggtgatgagttcgctcgggctccggctccggcttcggcgacctggagcgaggagttcggagatgcagtcttccagcgctcaagcagttttcgacttcgtctcaccgcttcccgcagactcctgagaggaaatttgtgacaaaaatatctgctctggaaatttgtaatgagattgtgaatggccttctacaatctgactctgctccccttcggttattagatgatcctgagaaatgaaccattgtggagaagttgcaagaagaaattgcttaggacaactaacatctgaggcatccaagcaggatttgtgaagcaacgaacacaacgcgcgccaaggcgcgcataagttactagttcgaaaaacaacaacgacctcgccttcttcacgtacgaggagaagcggaagctcgggtacggcacgcagcgggagcgcctgggaaaggactccatcaagcccttcgacgcctgctgcctctgcctcaagccgctcatcggcccgctctgctgccccaagggccacacattctgtaaggagtgcatcctcgagtgcctcctctaccagaagaaggacatcaagcgcaagctagctgcacatgaggtccagaaaaagcaagagaaggaagaggaagaggagaagctaattctgcagaaggctaaggagttggatgcctttgaccagcagaatcatggacctgttccccagtaccatgatcgcagtggttcgcaagacaagaatggttttcatggagcaaataatgtgaaggtcacttcttttgaagacgaagcccttcgcaatatgaaggcattctggctcccttcagctactcctgaagctacggtcaaggtagacgtgccctccatccacactgtttgcccggaggggcaggagaagctcaagttgaaatcgctcttccctatctcgttcacggaagaaactgctgatcagaagagcagtaaggcagtggaaaaaaagagctacatgtgccctagttgcaagtccactatcacaaataccatgtcccttgtggcggtcagcacctgtggccatgtcttctgcaagaaatgttatgacaagtttctagtgaaggataaagcttgcttggagtgcagcaaaccattcagggagaggaatctggttccattggagaaaggaggaaccgggtttgctgcacatgatgaacgcctagaggcaagatatttcaagcatttgggtagtggctctgggttaggactagtgaagcctgcaccagaaacttactaaccttgaataattatagccgttgttgtattgtttaccttggtgtcatgaaattatataacctagaaatgagaactccatcaagttcccaattgccgctgtaacttctatatacatgtatgcagatgttgattttaggtatctttaagacctt

SEQ ID NO: 8056 - protein, 154 aa, Zea mays subsp. mays
  peptide (1)..(154): Ceres Seq. ID no. 12343266
  misc_feature (1)..(149): Homolog of NCBI NO: 18407260 NR Description: expressed protein; protein id: At1g61620.1, by cDNA: 15739. [Arabidopsis thaliana] >gi|25404329|pir||F96641
  misc_feature (1)..(149): Homolog of NCBI NO: 26449463 NR Description: unknown protein [Arabidopsis thaliana]
  misc_feature (1)..(133): Homolog of NCBI NO: 31213459 NR Description: ENSANGP00000021661 [Anopheles gambiae]
  misc_feature (1)..(133): Homolog of NCBI NO: 38174118 NR Description: Unknown (protein for MGC:75989) [Silurana
  misc_feature (1)..(132): Homolog of NCBI NO: 7705716 NR Description: eNOS interacting protein; CGI-25 protein [Homo
  misc_feature (1)..(132): Homolog of NCBI NO: 15030017 NR Description: Similar to eNOS interacting protein [Homo sapiens]
  misc_feature (1)..(132): Homolog of NCBI NO: 13384956 NR Description: RIKEN cDNA 2310061K06 [Mus musculus]
  misc_feature (1)..(132): Homolog of NCBI NO: 27731403 NR Description: similar to RIKEN cDNA 2310061K06 [Mus musculus]
  misc_feature (1)..(133): Homolog of NCBI NO: 24643007 NR Description: CG6179-PA [Drosophila melanogaster]
  misc_feature (1)..(128): Homolog of NCBI NO: 39593613 NR Description: Hypothetical protein CBG05897 [Caenorhabditis
MKAFWLPSATPEATVKVDVPSIHTVCPEGQEKLKLKSLFPISFTEETADQKSSKAVEKKSYMCPSCKSTITNTMSLVAVSTCGHVFCKKCYDKFLVKDKACLECSKPFRERNLVPLEKGGTGFAAHDERLEARYFKHLGSGSGLGLVKPAPETY

SEQ ID NO: 8057 - protein, 93 aa, Zea mays subsp. mays
  peptide (1)..(93): Ceres Seq. ID no. 12343267
  misc_feature (1)..(88): Homolog of NCBI NO: 18407260 NR Description: expressed protein; protein id: At1g61620.1, by cDNA: 15739. [Arabidopsis thaliana] >gi|25404329|pir||F96641
  misc_feature (1)..(88): Homolog of NCBI NO: 26449463 NR Description: unknown protein [Arabidopsis thaliana]
  misc_feature (1)..(72): Homolog of NCBI NO: 31213459 NR Description: ENSANGP00000021661 [Anopheles gambiae]
  misc_feature (1)..(72): Homolog of NCBI NO: 38174118 NR Description: Unknown (protein for MGC:75989) [Silurana
  misc_feature (1)..(71): Homolog of NCBI NO: 7705716 NR Description: eNOS interacting protein; CGI-25 protein [Homo
  misc_feature (1)..(71): Homolog of NCBI NO: 15030017 NR Description: Similar to eNOS interacting protein [Homo sapiens]
  misc_feature (1)..(71): Homolog of NCBI NO: 13384956 NR Description: RIKEN cDNA 2310061K06 [Mus musculus]
  misc_feature (1)..(71): Homolog of NCBI NO: 27731403 NR Description: similar to RIKEN cDNA 2310061K06 [Mus musculus]
  misc_feature (1)..(72): Homolog of NCBI NO: 24643007 NR Description: CG6179-PA [Drosophila melanogaster]
  misc_feature (1)..(67): Homolog of NCBI NO: 39593613 NR Description: Hypothetical protein CBG05897 [Caenorhabditis
MCPSCKSTITNTMSLVAVSTCGHVFCKKCYDKFLVKDKACLECSKPFRERNLVPLEKGGTGFAAHDERLEARYFKHLGSGSGLGLVKPAPETY

SEQ ID NO: 8058 - protein, 81 aa, Zea mays subsp. mays
  peptide (1)..(81): Ceres Seq. ID no. 12343268
  misc_feature (1)..(76): Homolog of NCBI NO: 18407260 NR Description: expressed protein; protein id: At1g61620.1, by cDNA: 15739. [Arabidopsis thaliana] >gi|25404329|pir||F96641
  misc_feature (1)..(76): Homolog of NCBI NO: 26449463 NR Description: unknown protein [Arabidopsis thaliana]
  misc_feature (1)..(60): Homolog of NCBI NO: 31213459 NR Description: ENSANGP00000021661 [Anopheles gambiae]
  misc_feature (1)..(60): Homolog of NCBI NO: 38174118 NR Description: Unknown (protein for MGC:75989) [Silurana
  misc_feature (1)..(59): Homolog of NCBI NO: 7705716 NR Description: eNOS interacting protein; CGI-25 protein [Homo
  misc_feature (1)..(59): Homolog of NCBI NO: 15030017 NR Description: Similar to eNOS interacting protein [Homo sapiens]
  misc_feature (1)..(59): Homolog of NCBI NO: 13384956 NR Description: RIKEN cDNA 2310061K06 [Mus musculus]
  misc_feature (1)..(59): Homolog of NCBI NO: 27731403 NR Description: similar to RIKEN cDNA 2310061K06 [Mus musculus]
  misc_feature (1)..(60): Homolog of NCBI NO: 24643007 NR Description: CG6179-PA [Drosophila melanogaster]
  misc_feature (1)..(55): Homolog of NCBI NO: 39593613 NR Description: Hypothetical protein CBG05897 [Caenorhabditis
MSLVAVSTCGHVFCKKCYDKFLVKDKACLECSKPFRERNLVPLEKGGTGFAAHDERLEARYFKHLGSGSGLGLVKPAPETY

SEQ ID NO: 8059 - DNA, 620 bp, Zea mays subsp. mays
  misc_feature (1)..(620): Ceres Seq. ID no. 13492231
  misc_feature: MA Experiment ID: 108544 Result: Up-regulated in Transcription
  misc_feature: MA Experiment ID: 20000534 Result: Down-regulated in Transcription
  misc_feature: MA Experiment 20000534 PARAMETER Experiment Name: Zm_Hybrid_Pollen_P Parameter: Age (day) Value: 8
  misc_feature: MA Experiment 20000534 PARAMETER Experiment Name: Zm_Hybrid_Pollen_P Parameter: Organism Value: Zea mays
  misc_feature: MA Experiment 20000534 PARAMETER Experiment Name: Zm_Hybrid_Pollen_P Parameter: Plant Line Value: 35A19
  misc_feature: MA Experiment 20000534 PARAMETER Experiment Name: Zm_Hybrid_Pollen_P Parameter: Tissue Value: Pollen vs. Aerial
aagagacaaaacaagttattggggctctaaaggagaagggagtgtctgctgttggagctgcagggtattgctggggtgcaaaggttgttgtggagttggcaaaagctcatgagatccaggctgctgtgctgttgcacccttcttttgttaccgttgacgatatcaaagaggtcaagtgcgcaatttctatcctcggagctgagattgacaaaatgtccccaccggagctaatcaagcagttcgagcaggtcctttctttgaactcaggggttggccacttcgtcaagatcttccctggtgtggcgcatggatggagcgtgagatacaaccacgacgacgcagctgccgtgaagagtgctgaggaagcctttgcggacatgctcgactggttcaacaagaatctgaaataaactctgcaattgcatcctgccttgtaataatgcgtgttccagtgccctgggatcgaatctgctgtgtttgggcttttgcatggtcaggctattcagagttgtcatggacttagggttgtgttagtagattggttgcgctgaatctataataaaaacgaggtaaactaggacaatgatgatgtggccgtgtgtatttaatgtattctgttc

SEQ ID NO: 8060 - protein, 135 aa, Zea mays subsp. mays
  peptide (1)..(135): Ceres Seq. ID no. 13492232
  misc_feature (2)..(130): Pfam Name: Dienelactone hydrolase family Pfam Description: Dienelactone hydrolase family
  misc_feature (2)..(135): Homolog of NCBI NO: 18403820 NR Description: expressed protein [Arabidopsis thaliana]
  misc_feature (1)..(135): Homolog of NCBI NO: 9294513 NR Description: contains similarity to endo-1,3-1,4-beta-D-
  misc_feature (1)..(135): Homolog of NCBI NO: 18403812 NR Description: expressed protein [Arabidopsis thaliana]
  misc_feature (1)..(135): Homolog of NCBI NO: 24899687 NR Description: Unknown protein [Arabidopsis thaliana]
  misc_feature (1)..(135): Homolog of NCBI NO: 40253303 NR Description: putative Endo-1,3;1,4-beta-D-glucanase precursor
  misc_feature (1)..(135): Homolog of NCBI NO: 40253306 NR Description: putative Endo-1,3;1,4-beta-D-glucanase precursor
  misc_feature (1)..(135): Homolog of NCBI NO: 40253308 NR Description: Endo-1,3;1,4-beta-D-glucanase precursor-like
  misc_feature (1)..(135): Homolog of NCBI NO: 40253310 NR Description: Endo-1,3;1,4-beta-D-glucanase precursor-like
  misc_feature (1)..(84): Homolog of NCBI NO: 8928122 NR Description: Endo-1,3;1,4-beta-D-glucanase precursor
  misc_feature (13)..(134): Homolog of NCBI NO: 40740730 NR Description: hypothetical protein AN3712.2 [Aspergillus
ETKQVIGALKEKGVSAVGAAGYCWGAKVVVELAKAHEIQAAVLLHPSFVTVDDIKEVKCAISILGAEIDKMSPPELIKQFEQVLSLNSGVGHFVKIFPGVAHGWSVRYNHDDAAAVKSAEEAFADMLDWFNKNLK

SEQ ID NO: 8061 - DNA, 1046 bp, Zea mays subsp. mays
  misc_feature (1)..(1046): Ceres Seq. ID no. 12345398
  misc_feature: MA Experiment ID: 108528 Result: Up-regulated in Transcription
  misc_feature: MA Experiment 108528 PARAMETER Experiment Name: Zm_Imbibed_Seeds_P Parameter: Age (day) Value: 5 vs. 2
  misc_feature: MA Experiment 108528 PARAMETER Experiment Name: Zm_Imbibed_Seeds_P Parameter: Organism Value: Zea mays
  misc_feature: MA Experiment 108528 PARAMETER Experiment Name: Zm_Imbibed_Seeds_P Parameter: Plant Line Value: 35A19
  misc_feature: MA Experiment 108528 PARAMETER Experiment Name: Zm_Imbibed_Seeds_P Parameter: Tissue Value: Aerial vs. Embryo
  misc_feature: MA Experiment ID: 108530 Result: Up-regulated in Transcription
  misc_feature: MA Experiment 108530 PARAMETER Experiment Name: Zm_Imbibed_Seeds_P Parameter: Age (day) Value: 6 vs. 2
  misc_feature: MA Experiment 108530 PARAMETER Experiment Name: Zm_Imbibed_Seeds_P Parameter: Organism Value: Zea mays
  misc_feature: MA Experiment 108530 PARAMETER Experiment Name: Zm_Imbibed_Seeds_P Parameter: Plant Line Value: 35A19
  misc_feature: MA Experiment 108530 PARAMETER Experiment Name: Zm_Imbibed_Seeds_P Parameter: Tissue Value: Aerial vs. Embryo
  misc_feature: MA Experiment ID: 108559 Result: Down-regulated in Transcription
  misc_feature: MA Experiment 108559 PARAMETER Experiment Name: Zm_5mM_NO_P Parameter: Age (day) Value: 8
  misc_feature: MA Experiment 108559 PARAMETER Experiment Name: Zm_5mM_NO_P Parameter: Organism Value: Zea mays
  misc_feature: MA Experiment 108559 PARAMETER Experiment Name: Zm_5mM_NO_P Parameter: Plant Line Value: 35A19
  misc_feature: MA Experiment 108559 PARAMETER Experiment Name: Zm_5mM_NO_P Parameter: Timepoint (hr) Value: 12
  misc_feature: MA Experiment 108559 PARAMETER Experiment Name: Zm_5mM_NO_P Parameter: Tissue Value: Aerial
  misc_feature: MA Experiment 108559 PARAMETER Experiment Name: Zm_5mM_NO_P Parameter: Treatment Value: 5mM NO vs. No Treatment
  misc_feature: MA Experiment ID: 108597 Result: Up-regulated in Transcription
  misc_feature: MA Experiment 108597 PARAMETER Experiment Name: Zm_100uM_ABA_P Parameter: Age (day) Value: 9
  misc_feature: MA Experiment 108597 PARAMETER Experiment Name: Zm_100uM_ABA_P Parameter: Organism Value: Zea mays
  misc_feature: MA Experiment 108597 PARAMETER Experiment Name: Zm_100uM_ABA_P Parameter: Plant Line Value: 35A19
  misc_feature: MA Experiment 108597 PARAMETER Experiment Name: Zm_100uM_ABA_P Parameter: Timepoint (hr) Value: 24
  misc_feature: MA Experiment 108597 PARAMETER Experiment Name: Zm_100uM_ABA_P Parameter: Tissue Value: Aerial
  misc_feature: MA Experiment 108597 PARAMETER Experiment Name: Zm_100uM_ABA_P Parameter: Treatment Value: 100uM ABA vs. No Treatment
  misc_feature: MA Experiment ID: 108687 Result: Down-regulated in Transcription
  misc_feature: MA Experiment 108687 PARAMETER Experiment Name: Zm_Embryos-Flowers__P Parameter: Tissue Value: Embryo vs. Aerial+
  misc_feature: MA Experiment ID: 108689 Result: Up-regulated in Transcription
  misc_feature: MA Experiment 108689 PARAMETER Experiment Name: Zm_Drought_Roots_P Parameter: Age (day) Value: 9
  misc_feature: MA Experiment 108689 PARAMETER Experiment Name: Zm_Drought_Roots_P Parameter: Organism Value: Zea mays
  misc_feature: MA Experiment 108689 PARAMETER Experiment Name: Zm_Drought_Roots_P Parameter: Plant Line Value: 35A19
  misc_feature: MA Experiment 108689 PARAMETER Experiment Name: Zm_Drought_Roots_P Parameter: Timepoint (hr) Value: 24
  misc_feature: MA Experiment 108689 PARAMETER Experiment Name: Zm_Drought_Roots_P Parameter: Tissue Value: Roots
  misc_feature: MA Experiment 108689 PARAMETER Experiment Name: Zm_Drought_Roots_P Parameter: Treatment Value: Drought vs. No Drought
  misc_feature: MA Experiment ID: 20000477 Result: Down-regulated in Transcription
  misc_feature: MA Experiment 20000477 PARAMETER Experiment Name: Zm_5mM_SA_P Parameter: Age (day) Value: 10
  misc_feature: MA Experiment 20000477 PARAMETER Experiment Name: Zm_5mM_SA_P Parameter: Organism Value: Zea mays
  misc_feature: MA Experiment 20000477 PARAMETER Experiment Name: Zm_5mM_SA_P Parameter: Plant Line Value: 35A19
  misc_feature: MA Experiment 20000477 PARAMETER Experiment Name: Zm_5mM_SA_P Parameter: Timepoint (hr) Value: 48
  misc_feature: MA Experiment 20000477 PARAMETER Experiment Name: Zm_5mM_SA_P Parameter: Tissue Value: Aerial
  misc_feature: MA Experiment 20000477 PARAMETER Experiment Name: Zm_5mM_SA_P Parameter: Treatment Value: 5mM SA vs. No Treatment
aatcacatttgattcgagccagtcagccagccccggagccctggacagcagcagcgaactcgaggccgctccgccacctcgccactcgcctcttctcgctctcgccaccgggccagggaagggaccatccgatcggctccgtcatggctggagctgctgctctcaatgagggtatcctttcttccgtgtccgagaaaaatgttgctgctcacccatggcatgatttggagataggaccagaggctcctgaagtgttcaattgtgtggttgagattcctagaggcagcaaggttaagtatgagttggacaagatatctggtctgatcaaggtggatcgtgtcctttactcctctgttgtttacccacataactatggtttcattccacgcacactctgtgaggatagcgaccccatggacgtcctcgtactgatgcaggaacaagttgtccctgggtgtttcctgcgagctcgtgctattgggctcatgcctatgatcgatcagggtgagaaagatgataagatcatagctgtctgtgctgatgaccctgaattccgtcactacaaggacatctcggacctccccccgcatcgccttcaagagatccgccgcttttttgaagattataaaaagaatgaaaacaaagaagttgcagtgaatgatttcctcccagccgaagatgccatcaaagcaatcgagcactcgatggacctgtatggctcgtacgtcatggaaagcctgaggaggtgatctgctgctgcttgattgtggatgctacgtaattttctcaacagctcatcgagagtaccgtagtccgtagtacggcaaatgttaacacgcacgaactggaatcatgaccaagggatattaccttctgttcatgctgaaacgatcagcagtttctttctttgcatcatatgccacgtcaaatcaaggcacttgcctctgaaatctttgtggtcaagtcaaaccagcacttcgacagaacgattgatggatgcatgtattactgttacataaatgtccatttgctcaacttcatttctg

SEQ ID NO: 8062 - protein, 248 aa, Zea mays subsp. mays
  peptide (1)..(248): Ceres Seq. ID no. 12345399
  misc_feature (86)..(240): Pfam Name: Inorganic pyrophosphatase Pfam Description: Inorganic pyrophosphatase
  misc_feature (43)..(248): Homolog of NCBI NO: 3885882 NR Description: inorganic pyrophosphatase [Oryza sativa]
  misc_feature (54)..(248): Homolog of NCBI NO: 15231849 NR Description: inorganic pyrophosphatase -like protein; protein
  misc_feature (54)..(248): Homolog of NCBI NO: 21593570 NR Description: inorganic pyrophosphatase-like protein
  misc_feature (51)..(248): Homolog of NCBI NO: 15223288 NR Description: soluble inorganic pyrophosphatase, putative; id: At1g01050.1, supported by cDNA: 124537., supported by cDNA: supported by cDNA: gi_16323128, supported by cDNA:
  misc_feature (51)..(248): Homolog of NCBI NO: 40642617 NR Description: soluble pyrophosphatase [Beta vulgaris]
  misc_feature (51)..(248): Homolog of NCBI NO: 2500047 NR Description: Soluble inorganic pyrophosphatase (Pyrophosphate hydrolase) (PPase) >gi|7436030|pir||T07594 probable inorganic
  misc_feature (51)..(248): Homolog of NCBI NO: 5669924 NR Description: soluble inorganic pyrophosphatase [Populus
  misc_feature (54)..(248): Homolog of NCBI NO: 15226453 NR Description: putative inorganic pyrophosphatase; protein id: [Arabidopsis thaliana] >gi|7436034|pir||T02201 probable inorganic
  misc_feature (51)..(248): Homolog of NCBI NO: 4033424 NR Description: Soluble inorganic pyrophosphatase (Pyrophosphate hydrolase) (PPase) >gi|7436036|pir||T01370 inorganic
  misc_feature (54)..(248): Homolog of NCBI NO: 26451240 NR Description: putative inorganic pyrophosphatase [Arabidopsis
SHLIRASQPAPEPWTAAANSRPLRHLATRLFSLSPPGQGRDHPIGSVMAGAAALNEGILSSVSEKNVAAHPWHDLEIGPEAPEVFNCVVEIPRGSKVKYELDKISGLIKVDRVLYSSVVYPHNYGFIPRTLCEDSDPMDVLVLMQEQVVPGCFLRARAIGLMPMIDQGEKDDKIIAVCADDPEFRHYKDISDLPPHRLQEIRRFFEDYKKNENKEVAVNDFLPAEDAIKAIEHSMDLYGSYVMESLRR

SEQ ID NO: 8063 - protein, 201 aa, Zea mays subsp. mays
  peptide (1)..(201): Ceres Seq. ID no. 12345400
  misc_feature (39)..(193): Pfam Name: Inorganic pyrophosphatase Pfam Description: Inorganic pyrophosphatase
  misc_feature (1)..(201): Homolog of NCBI NO: 3885882 NR Description: inorganic pyrophosphatase [Oryza sativa]
  misc_feature (7)..(201): Homolog of NCBI NO: 15231849 NR Description: inorganic pyrophosphatase -like protein; protein
  misc_feature (7)..(201): Homolog of NCBI NO: 21593570 NR Description: inorganic pyrophosphatase-like protein
  misc_feature (4)..(201): Homolog of NCBI NO: 15223288 NR Description: soluble inorganic pyrophosphatase, putative; id: At1g01050.1, supported by cDNA: 124537., supported by cDNA: supported by cDNA: gi_16323128, supported by cDNA:
  misc_feature (4)..(201): Homolog of NCBI NO: 40642617 NR Description: soluble pyrophosphatase [Beta vulgaris]
  misc_feature (4)..(201): Homolog of NCBI NO: 2500047 NR Description: Soluble inorganic pyrophosphatase (Pyrophosphate hydrolase) (PPase) >gi|7436030|pir||T07594 probable inorganic
  misc_feature (4)..(201): Homolog of NCBI NO: 5669924 NR Description: soluble inorganic pyrophosphatase [Populus
  misc_feature (7)..(201): Homolog of NCBI NO: 15226453 NR Description: putative inorganic pyrophosphatase; protein id: [Arabidopsis thaliana] >gi|7436034|pir||T02201 probable inorganic
  misc_feature (4)..(201): Homolog of NCBI NO: 4033424 NR Description: Soluble inorganic pyrophosphatase (Pyrophosphate hydrolase) (PPase) >gi|7436036|pir||T01370 inorganic
  misc_feature (7)..(201): Homolog of NCBI NO: 26451240 NR Description: putative inorganic pyrophosphatase [Arabidopsis
MAGAAALNEGILSSVSEKNVAAHPWHDLEIGPEAPEVFNCVVEIPRGSKVKYELDKISGLIKVDRVLYSSVVYPHNYGFIPRTLCEDSDPMDVLVLMQEQVVPGCFLRARAIGLMPMIDQGEKDDKIIAVCADDPEFRHYKDISDLPPHRLQEIRRFFEDYKKNENKEVAVNDFLPAEDAIKAIEHSMDLYGSYVMESLRR

SEQ ID NO: 8064 - DNA, 1415 bp, Zea mays subsp. mays
  misc_feature (1)..(1415): Ceres Seq. ID no. 12406615
  misc_feature: MA Experiment ID: 108504 Result: Down-regulated in Transcription
  misc_feature: MA Experiment 108504 PARAMETER Experiment Name: Zm_Drought_P Parameter: Age (day) Value: 8
  misc_feature: MA Experiment 108504 PARAMETER Experiment Name: Zm_Drought_P Parameter: Organism Value: Zea mays
  misc_feature: MA Experiment 108504 PARAMETER Experiment Name: Zm_Drought_P Parameter: Plant Line Value: 35A19
  misc_feature: MA Experiment 108504 PARAMETER Experiment Name: Zm_Drought_P Parameter: Timepoint (hr) Value: 12
  misc_feature: MA Experiment 108504 PARAMETER Experiment Name: Zm_Drought_P Parameter: Tissue Value: Aerial
  misc_feature: MA Experiment 108504 PARAMETER Experiment Name: Zm_Drought_P Parameter: Treatment Value: Drought vs. No Drought
  misc_feature: MA Experiment ID: 108515 Result: Up-regulated in Transcription
  misc_feature: MA Experiment 108515 PARAMETER Experiment Name: Zm_2mM_SA_P Parameter: Age (day) Value: 8
  misc_feature: MA Experiment 108515 PARAMETER Experiment Name: Zm_2mM_SA_P Parameter: Organism Value: Zea mays
  misc_feature: MA Experiment 108515 PARAMETER Experiment Name: Zm_2mM_SA_P Parameter: Plant Line Value: 35A19
  misc_feature: MA Experiment 108515 PARAMETER Experiment Name: Zm_2mM_SA_P Parameter: Timepoint (hr) Value: 12
  misc_feature: MA Experiment 108515 PARAMETER Experiment Name: Zm_2mM_SA_P Parameter: Tissue Value: Aerial
  misc_feature: MA Experiment 108515 PARAMETER Experiment Name: Zm_2mM_SA_P Parameter: Treatment Value: 2mM SA vs. No Treatment
  misc_feature: MA Experiment ID: 108527 Result: Up-regulated in Transcription
  misc_feature: MA Experiment 108527 PARAMETER Experiment Name: Zm_5mM_NO_P Parameter: Age (day) Value: 8
  misc_feature: MA Experiment 108527 PARAMETER Experiment Name: Zm_5mM_NO_P Parameter: Organism Value: Zea mays
  misc_feature: MA Experiment 108527 PARAMETER Experiment Name: Zm_5mM_NO_P Parameter: Plant Line Value: 35A19
  misc_feature: MA Experiment 108527 PARAMETER Experiment Name: Zm_5mM_NO_P Parameter: Timepoint (hr) Value: 6
  misc_feature: MA Experiment 108527 PARAMETER Experiment Name: Zm_5mM_NO_P Parameter: Tissue Value: Aerial
  misc_feature: MA Experiment 108527 PARAMETER Experiment Name: Zm_5mM_NO_P Parameter: Treatment Value: 5mM NO vs. No Treatment
  misc_feature: MA Experiment ID: 108528 Result: Down-regulated in Transcription
  misc_feature: MA Experiment 108528 PARAMETER Experiment Name: Zm_Imbibed_Seeds_P Parameter: Age (day) Value: 5 vs. 2
  misc_feature: MA Experiment 108528 PARAMETER Experiment Name: Zm_Imbibed_Seeds_P Parameter: Organism Value: Zea mays
  misc_feature: MA Experiment 108528 PARAMETER Experiment Name: Zm_Imbibed_Seeds_P Parameter: Plant Line Value: 35A19
  misc_feature: MA Experiment 108528 PARAMETER Experiment Name: Zm_Imbibed_Seeds_P Parameter: Tissue Value: Aerial vs. Embryo
  misc_feature: MA Experiment ID: 108529 Result: Down-regulated in Transcription
  misc_feature: MA Experiment 108529 PARAMETER Experiment Name: Zm_Imbibed_Seeds_P Parameter: Age (day) Value: 5 vs. 2
  misc_feature: MA Experiment 108529 PARAMETER Experiment Name: Zm_Imbibed_Seeds_P Parameter: Organism Value: Zea mays
  misc_feature: MA Experiment 108529 PARAMETER Experiment Name: Zm_Imbibed_Seeds_P Parameter: Plant Line Value: 35A19
  misc_feature: MA Experiment 108529 PARAMETER Experiment Name: Zm_Imbibed_Seeds_P Parameter: Tissue Value: Roots vs. Embryo
  misc_feature: MA Experiment ID: 108530 Result: Down-regulated in Transcription
  misc_feature: MA Experiment 108530 PARAMETER Experiment Name: Zm_Imbibed_Seeds_P Parameter: Age (day) Value: 6 vs. 2
  misc_feature: MA Experiment 108530 PARAMETER Experiment Name: Zm_Imbibed_Seeds_P Parameter: Organism Value: Zea mays
  misc_feature: MA Experiment 108530 PARAMETER Experiment Name: Zm_Imbibed_Seeds_P Parameter: Plant Line Value: 35A19
  misc_feature: MA Experiment 108530 PARAMETER Experiment Name: Zm_Imbibed_Seeds_P Parameter: Tissue Value: Aerial vs. Embryo
  misc_feature: MA Experiment ID: 108535 Result: Up-regulated in Transcription
  misc_feature: MA Experiment 108535 PARAMETER Experiment Name: Zm_Meristem_P Parameter: Age (day) Value: 8
  misc_feature: MA Experiment 108535 PARAMETER Experiment Name: Zm_Meristem_P Parameter: Organism Value: Zea mays
  misc_feature: MA Experiment 108535 PARAMETER Experiment Name: Zm_Meristem_P Parameter: Plant Line Value: 35A19
  misc_feature: MA Experiment 108535 PARAMETER Experiment Name: Zm_Meristem_P Parameter: Tissue Value: Root Meristem vs. Above Root Meristem
  misc_feature: MA Experiment ID: 108540 Result: Down-regulated in Transcription
  misc_feature: MA Experiment 108540 PARAMETER Experiment Name: Zm_20percent_PEG_P Parameter: Age (day) Value: 8
  misc_feature: MA Experiment 108540 PARAMETER Experiment Name: Zm_20percent_PEG_P Parameter: Organism Value: Zea mays
  misc_feature: MA Experiment 108540 PARAMETER Experiment Name: Zm_20percent_PEG_P Parameter: Plant Line Value: 35A19
  misc_feature: MA Experiment 108540 PARAMETER Experiment Name: Zm_20percent_PEG_P Parameter: Timepoint (hr) Value: 6
  misc_feature: MA Experiment 108540 PARAMETER Experiment Name: Zm_20percent_PEG_P Parameter: Tissue Value: Aerial
  misc_feature: MA Experiment 108540 PARAMETER Experiment Name: Zm_20percent_PEG_P Parameter: Treatment Value: 20percent PEG vs. No Treatment
  misc_feature: MA Experiment ID: 108544 Result: Down-regulated in Transcription
  misc_feature: MA Experiment ID: 108559 Result: Up-regulated in Transcription
  misc_feature: MA Experiment 108559 PARAMETER Experiment Name: Zm_5mM_NO_P Parameter: Age (day) Value: 8
  misc_feature: MA Experiment 108559 PARAMETER Experiment Name: Zm_5mM_NO_P Parameter: Organism Value: Zea mays
  misc_feature: MA Experiment 108559 PARAMETER Experiment Name: Zm_5mM_NO_P Parameter: Plant Line Value: 35A19
  misc_feature: MA Experiment 108559 PARAMETER Experiment Name: Zm_5mM_NO_P Parameter: Timepoint (hr) Value: 12
  misc_feature: MA Experiment 108559 PARAMETER Experiment Name: Zm_5mM_NO_P Parameter: Tissue Value: Aerial
  misc_feature: MA Experiment 108559 PARAMETER Experiment Name: Zm_5mM_NO_P Parameter: Treatment Value: 5mM NO vs. No Treatment
  misc_feature: MA Experiment ID: 108597 Result: Down-regulated in Transcription
  misc_feature: MA Experiment 108597 PARAMETER Experiment Name: Zm_100uM_ABA_P Parameter: Age (day) Value: 9
  misc_feature: MA Experiment 108597 PARAMETER Experiment Name: Zm_100uM_ABA_P Parameter: Organism Value: Zea mays
  misc_feature: MA Experiment 108597 PARAMETER Experiment Name: Zm_100uM_ABA_P Parameter: Plant Line Value: 35A19
  misc_feature: MA Experiment 108597 PARAMETER Experiment Name: Zm_100uM_ABA_P Parameter: Timepoint (hr) Value: 24
  misc_feature: MA Experiment 108597 PARAMETER Experiment Name: Zm_100uM_ABA_P Parameter: Tissue Value: Aerial
  misc_feature: MA Experiment 108597 PARAMETER Experiment Name: Zm_100uM_ABA_P Parameter: Treatment Value: 100uM ABA vs. No Treatment
  misc_feature: MA Experiment ID: 108599 Result: Up-regulated in Transcription
  misc_feature: MA Experiment 108599 PARAMETER Experiment Name: Zm_RT1_P Parameter: Age (day) Value: 11
  misc_feature: MA Experiment 108599 PARAMETER Experiment Name: Zm_RT1_P Parameter: Organism Value: Zea mays
  misc_feature: MA Experiment 108599 PARAMETER Experiment Name: Zm_RT1_P Parameter: Plant Line Value: rt1 mut vs. rt1 wt
  misc_feature: MA Experiment 108599 PARAMETER Experiment Name: Zm_RT1_P Parameter: Tissue Value: Roots
  misc_feature: MA Experiment ID: 20000108 Result: Up-regulated in Transcription
  misc_feature: MA Experiment 20000108 PARAMETER Experiment Name: Zm_Root-Tips_P Parameter: Age (day) Value: 12
  misc_feature: MA Experiment 20000108 PARAMETER Experiment Name: Zm_Root-Tips_P Parameter: Organism Value: Zea mays
  misc_feature: MA Experiment 20000108 PARAMETER Experiment Name: Zm_Root-Tips_P Parameter: Tissue Value: Root tips vs. Root mid region    35
  misc_feature: MA Experiment 20000108 PARAMETER Experiment Name: Zm_Root-Tips_P Parameter: Tissue Value: Root tips vs. Root mid region   Sequence Listing-Misc Features (4)
  misc_feature: MA Experiment ID: 20000478 Result: Down-regulated in Transcription
  misc_feature: MA Experiment 20000478 PARAMETER Experiment Name: Zm_5mM_SA_P Parameter: Age (day) Value: 11
  misc_feature: MA Experiment 20000478 PARAMETER Experiment Name: Zm_5mM_SA_P Parameter: Organism Value: Zea mays
  misc_feature: MA Experiment 20000478 PARAMETER Experiment Name: Zm_5mM_SA_P Parameter: Plant Line Value: 35A19
  misc_feature: MA Experiment 20000478 PARAMETER Experiment Name: Zm_5mM_SA_P Parameter: Timepoint (hr) Value: 72
  misc_feature: MA Experiment 20000478 PARAMETER Experiment Name: Zm_5mM_SA_P Parameter: Tissue Value: Aerial
  misc_feature: MA Experiment 20000478 PARAMETER Experiment Name: Zm_5mM_SA_P Parameter: Treatment Value: 5mM SA vs. No Treatment
  misc_feature: MA Experiment ID: 20000480 Result: Down-regulated in Transcription
  misc_feature: MA Experiment 20000480 PARAMETER Experiment Name: Zm_Drought_P Parameter: Age (day) Value: 11
  misc_feature: MA Experiment 20000480 PARAMETER Experiment Name: Zm_Drought_P Parameter: Organism Value: Zea mays
  misc_feature: MA Experiment 20000480 PARAMETER Experiment Name: Zm_Drought_P Parameter: Plant Line Value: 35A19
  misc_feature: MA Experiment 20000480 PARAMETER Experiment Name: Zm_Drought_P Parameter: Timepoint (hr) Value: 72
  misc_feature: MA Experiment 20000480 PARAMETER Experiment Name: Zm_Drought_P Parameter: Tissue Value: Aerial
  misc_feature: MA Experiment 20000480 PARAMETER Experiment Name: Zm_Drought_P Parameter: Treatment Value: Drought vs. No Drought
  misc_feature: MA Experiment ID: 20000532 Result: Up-regulated in Transcription
  misc_feature: MA Experiment 20000532 PARAMETER Experiment Name: Zm_0.001percent_MeJA_P Parameter: Age (day) Value: 10
  misc_feature: MA Experiment 20000532 PARAMETER Experiment Name: Zm_0.001percent_MeJA_P Parameter: Organism Value: Zea mays
  misc_feature: MA Experiment 20000532 PARAMETER Experiment Name: Zm_0.001percent_MeJA_P Parameter: Plant Line Value: 35A19
  misc_feature: MA Experiment 20000532 PARAMETER Experiment Name: Zm_0.001percent_MeJA_P Parameter: Timepoint (hr) Value: 48
  misc_feature: MA Experiment 20000532 PARAMETER Experiment Name: Zm_0.001percent_MeJA_P Parameter: Tissue Value: Aerial
  misc_feature: MA Experiment 20000532 PARAMETER Experiment Name: Zm_0.001percent_MeJA_P Parameter: Treatment Value: 0.001percent MeJA vs. No Treatment
  misc_feature: MA Experiment ID: 20000533 Result: Up-regulated in Transcription
  misc_feature: MA Experiment 20000533 PARAMETER Experiment Name: Zm_0.001percent_MeJA_P Parameter: Age (day) Value: 11
  misc_feature: MA Experiment 20000533 PARAMETER Experiment Name: Zm_0.001percent_MeJA_P Parameter: Organism Value: Zea mays
  misc_feature: MA Experiment 20000533 PARAMETER Experiment Name: Zm_0.001percent_MeJA_P Parameter: Plant Line Value: 35A19
  misc_feature: MA Experiment 20000533 PARAMETER Experiment Name: Zm_0.001percent_MeJA_P Parameter: Timepoint (hr) Value: 72
  misc_feature: MA Experiment 20000533 PARAMETER Experiment Name: Zm_0.001percent_MeJA_P Parameter: Tissue Value: Aerial
  misc_feature: MA Experiment 20000533 PARAMETER Experiment Name: Zm_0.001percent_MeJA_P Parameter: Treatment Value: 0.001percent MeJA vs. No Treatment
  misc_feature: MA Experiment ID: 20000626 Result: Up-regulated in Transcription
  misc_feature: MA Experiment 20000626 PARAMETER Experiment Name: Zm_Herbicide-Treatments_P Parameter: Timepoint (hr) Value: 12
  misc_feature: MA Experiment 20000626 PARAMETER Experiment Name: Zm_Herbicide-Treatments_P Parameter: Tissue Value: Aerial
  misc_feature: MA Experiment 20000626 PARAMETER Experiment Name: Zm_Herbicide-Treatments_P Parameter: Treatment Value: Roundup vs. No Treatment
  misc_feature: MA Experiment ID: 20000632 Result: Down-regulated in Transcription
  misc_feature: MA Experiment 20000632 PARAMETER Experiment Name: Zm_Herbicide-Treatments_P Parameter: Timepoint (hr) Value: 4
  misc_feature: MA Experiment 20000632 PARAMETER Experiment Name: Zm_Herbicide-Treatments_P Parameter: Tissue Value: Aerial
  misc_feature: MA Experiment 20000632 PARAMETER Experiment Name: Zm_Herbicide-Treatments_P Parameter: Treatment Value: Glean vs. No Treatment
  misc_feature: MA Experiment ID: 20001606 Result: Up-regulated in Transcription
  misc_feature: MA Experiment 20001606 PARAMETER Experiment Name: Zm_50ppm_KNO3_L-to-H_P Parameter: Age (day) Value: 19
  misc_feature: MA Experiment 20001606 PARAMETER Experiment Name: Zm_50ppm_KNO3_L-to-H_P Parameter: Organism Value: Zea mays
  misc_feature: MA Experiment 20001606 PARAMETER Experiment Name: Zm_50ppm_KNO3_L-to-H_P Parameter: Plant Line Value: 35A19
  misc_feature: MA Experiment 20001606 PARAMETER Experiment Name: Zm_50ppm_KNO3_L-to-H_P Parameter: Timepoint (hr) Value: 8
  misc_feature: MA Experiment 20001606 PARAMETER Experiment Name: Zm_50ppm_KNO3_L-to-H_P Parameter: Tissue Value: Shoots
  misc_feature: MA Experiment 20001606 PARAMETER Experiment Name: Zm_50ppm_KNO3_L-to-H_P Parameter: Treatment Value: 50ppm KNO3 vs. 50ppm KCl
agggtgtgcactccgatcctgccctctaataacagcagcagcagccgccatggaaggcagcagcaagaagctccagccgttcctcctcacgctgctgctggtgctctccaccgccgtgacgcccatcctctcgctgtcagtgccagacgacgaggtagcctgcgactgcgacaaacccaaggcgcccaagccgtcgcacccgcccaagaccaagccctcccacccgtcgccgtcgccgaagcccaagaaccccaagccacccaggggcagcaccgggtacccagcgccggggcaccaaccgcccaagagcccctcctaccccccggtcgtcggccctcccaagggccccgtcacgcgcccgccagtcacgcgtccgccggtcgtcggtcctcccaagggccccgtcacgcgcccgccggtcacgcgtccgccggttgtcggaccaccggtgacctacccgccgatcaccggccctccgacgacgccgcctgttgtcggaccaccggtgacctacccgccgatcaccggccctccaacaacgccgcctgttgtcggcccaccggtgacctacccaccgatcactggcccgcccgcgacgaggcgccccggtcaccggtccgcccgtaacctacccacccggcggaggcgggggcagctcgacgccgtgcccgccgccaccgagcccgacgccgacgccgtcgtcgccgacgtgcccggcggactcgctgaagctgggcgcgtgcgtggacctgctgggcgggctggtgcatatcggcctcggcgaccccgtggtgaacaagtgctgcccggtgctggaggggctggtggagctggaggcggccgtgtgcctctgcaccaccatcaagctcaggctcctcaacatcaacctctacctgccactggcgctccagctcctcctcacctgcggcaagacgccgccgccgggctacacctgcaccgtctgatctggactagctggcagcccccggcccatgcgtccatttatccgtgaacatgggttttggagtgagctagcatccagttcatcggtcgtttgaagagagatcgacatgagaggatgtcgtctgcttcgtcgttccaagctgaagaaggcacgccggaggaggaagagagtaacaacggccgggtcgatcagctaacgatggatcgatcattttttccccatatttattgtgttgcgtctgctgtagtttctaattttctagatgtgctttcggtttggtctgtagaccctgcagcttgatttggttaagtttgatttgatgcaagggaaatgggtggcggttgattgctaataattcccgttgatatttgtcatgcgtacgtgaacttgataacaaaatgcatgatgtcttctctttgcgtgatttcgagttgattgtcatcaccatggc

SEQ ID NO: 8065 - protein, 336 aa, Zea mays subsp. mays
  peptide (1)..(336): Ceres Seq. ID no. 12406616
  misc_feature (41)..(197): Pfam Name: Formin Homology 2 Domain Pfam Description: Formin Homology 2 Domain
  misc_feature (41)..(197): Pfam Name: Formin Homology 2 Domain Pfam Description: Formin Homology 2 Domain
  misc_feature (59)..(197): Homolog of NCBI NO: 7446482 NR Description: probable cell wall-plasma membrane linker protein
  misc_feature (62)..(202): Homolog of NCBI NO: 7446482 NR Description: probable cell wall-plasma membrane linker protein
  misc_feature (28)..(202): Homolog of NCBI NO: 7446483 NR Description: probable cell wall protein - garden pea
  misc_feature (35)..(199): Homolog of NCBI NO: 18396941 NR Description: expressed protein; protein id: At2g10940.1, by cDNA: 32647., supported by cDNA: gi_17473864 [Arabidopsis >gi|25411373|pir||G84494 hypothetical protein At2g10940
  misc_feature (62)..(202): Homolog of NCBI NO: 7446482 NR Description: probable cell wall-plasma membrane linker protein
  misc_feature (58)..(202): Homolog of NCBI NO: 1076501 NR Description: cell wall protein - alfalfa
  misc_feature (58)..(197): Homolog of NCBI NO: 7446482 NR Description: probable cell wall-plasma membrane linker protein
  misc_feature (56)..(202): Homolog of NCBI NO: 1076501 NR Description: cell wall protein - alfalfa
  misc_feature (62)..(202): Homolog of NCBI NO: 7446482 NR Description: probable cell wall-plasma membrane linker protein
  misc_feature (35)..(199): Homolog of NCBI NO: 18396941 NR Description: expressed protein; protein id: At2g10940.1, by cDNA: 32647., supported by cDNA: gi_17473864 [Arabidopsis >gi|25411373|pir||G84494 hypothetical protein At2g10940
  misc_feature (28)..(202): Homolog of NCBI NO: 7446483 NR Description: probable cell wall protein - garden pea
  misc_feature (62)..(202): Homolog of NCBI NO: 7446482 NR Description: probable cell wall-plasma membrane linker protein
  misc_feature (59)..(197): Homolog of NCBI NO: 7446482 NR Description: probable cell wall-plasma membrane linker protein
  misc_feature (58)..(202): Homolog of NCBI NO: 11994732 NR Description: contains similarity to cell wall-plasma membrane
  misc_feature (58)..(202): Homolog of NCBI NO: 15233282 NR Description: unknown protein; protein id: At3g22120.1
  misc_feature (58)..(202): Homolog of NCBI NO: 1076501 NR Description: cell wall protein - alfalfa
  misc_feature (58)..(197): Homolog of NCBI NO: 7446482 NR Description: probable cell wall-plasma membrane linker protein
  misc_feature (56)..(202): Homolog of NCBI NO: 1076501 NR Description: cell wall protein - alfalfa
  misc_feature (58)..(202): Homolog of NCBI NO: 11994732 NR Description: contains similarity to cell wall-plasma membrane
  misc_feature (58)..(202): Homolog of NCBI NO: 15233282 NR Description: unknown protein; protein id: At3g22120.1
GCALRSCPLITAAAAAMEGSSKKLQPFLLTLLLVLSTAVTPILSLSVPDDEVACDCDKPKAPKPSHPPKTKPSHPSPSPKPKNPKPPRGSTGYPAPGHQPPKSPSYPPVVGPPKGPVTRPPVTRPPVVGPPKGPVTRPPVTRPPVVGPPVTYPPITGPPTTPPVVGPPVTYPPITGPPTTPPVVGPPVTYPPITGPPATRRPGHRSARNLPTRRRRGQLDAVPAATEPDADAVVADVPGGLAEAGRVRGPAGRAGAYRPRRPRGEQVLPGAGGAGGAGGGRVPLHHHQAQAPQHQPLPATGAPAPPHLRQDAAAGLHLHRLIWTSWQPPAHASIYP

SEQ ID NO: 8066 - protein, 320 aa, Zea mays subsp. mays
  peptide (1)..(320): Ceres Seq. ID no. 12406617
  misc_feature (25)..(181): Pfam Name: Formin Homology 2 Domain Pfam Description: Formin Homology 2 Domain
  misc_feature (25)..(181): Pfam Name: Formin Homology 2 Domain Pfam Description: Formin Homology 2 Domain
  misc_feature (43)..(181): Homolog of NCBI NO: 7446482 NR Description: probable cell wall-plasma membrane linker protein
  misc_feature (46)..(186): Homolog of NCBI NO: 7446482 NR Description: probable cell wall-plasma membrane linker protein
  misc_feature (12)..(186): Homolog of NCBI NO: 7446483 NR Description: probable cell wall protein - garden pea
  misc_feature (19)..(183): Homolog of NCBI NO: 18396941 NR Description: expressed protein; protein id: At2g10940.1, by cDNA: 32647., supported by cDNA: gi_17473864 [Arabidopsis >gi|25411373|pir||G84494 hypothetical protein At2g10940
  misc_feature (46)..(186): Homolog of NCBI NO: 7446482 NR Description: probable cell wall-plasma membrane linker protein
  misc_feature (46)..(186): Homolog of NCBI NO: 7446482 NR Description: probable cell wall-plasma membrane linker protein
  misc_feature (19)..(183): Homolog of NCBI NO: 18396941 NR Description: expressed protein; protein id: At2g10940.1, by cDNA: 32647., supported by cDNA: gi_17473864 [Arabidopsis >gi|25411373|pir||G84494 hypothetical protein At2g10940
  misc_feature (42)..(186): Homolog of NCBI NO: 15233282 NR Description: unknown protein; protein id: At3g22120.1
  misc_feature (42)..(186): Homolog of NCBI NO: 11994732 NR Description: contains similarity to cell wall-plasma membrane
  misc_feature (40)..(186): Homolog of NCBI NO: 1076501 NR Description: cell wall protein - alfalfa
  misc_feature (42)..(181): Homolog of NCBI NO: 7446482 NR Description: probable cell wall-plasma membrane linker protein
  misc_feature (42)..(186): Homolog of NCBI NO: 1076501 NR Description: cell wall protein - alfalfa
  misc_feature (46)..(186): Homolog of NCBI NO: 7446482 NR Description: probable cell wall-plasma membrane linker protein
  misc_feature (12)..(186): Homolog of NCBI NO: 7446483 NR Description: probable cell wall protein - garden pea
  misc_feature (43)..(181): Homolog of NCBI NO: 7446482 NR Description: probable cell wall-plasma membrane linker protein
  misc_feature (42)..(186): Homolog of NCBI NO: 1076501 NR Description: cell wall protein - alfalfa
  misc_feature (42)..(181): Homolog of NCBI NO: 7446482 NR Description: probable cell wall-plasma membrane linker protein
  misc_feature (40)..(186): Homolog of NCBI NO: 1076501 NR Description: cell wall protein - alfalfa
  misc_feature (42)..(186): Homolog of NCBI NO: 11994732 NR Description: contains similarity to cell wall-plasma membrane
  misc_feature (42)..(186): Homolog of NCBI NO: 15233282 NR Description: unknown protein; protein id: At3g22120.1
MEGSSKKLQPFLLTLLLVLSTAVTPILSLSVPDDEVACDCDKPKAPKPSHPPKTKPSHPSPSPKPKNPKPPRGSTGYPAPGHQPPKSPSYPPVVGPPKGPVTRPPVTRPPVVGPPKGPVTRPPVTRPPVVGPPVTYPPITGPPTTPPVVGPPVTYPPITGPPTTPPVVGPPVTYPPITGPPATRRPGHRSARNLPTRRRRGQLDAVPAATEPDADAVVADVPGGLAEAGRVRGPAGRAGAYRPRRPRGEQVLPGAGGAGGAGGGRVPLHHHQAQAPQHQPLPATGAPAPPHLRQDAAAGLHLHRLIWTSWQPPAHASIYP

SEQ ID NO: 8067 - protein, 208 aa, Zea mays subsp. mays
  peptide (1)..(208): Ceres Seq. ID no. 12406618
RVCTPILPSNNSSSSRHGRQQQEAPAVPPHAAAGALHRRDAHPLAVSARRRGSLRLRQTQGAQAVAPAQDQALPPVAVAEAQEPQATQGQHRVPSAGAPTAQEPLLPPGRRPSQGPRHAPASHASAGRRSSQGPRHAPAGHASAGCRTTGDLPADHRPSDDAACCRTTGDLPADHRPSNNAACCRPTGDLPTDHWPARDEAPRSPVRP

SEQ ID NO: 8068 - DNA, 1277 bp, Zea mays subsp. mays
  misc_feature (1)..(1277): Ceres Seq. ID no. 12402410
  misc_feature: MA Experiment ID: 108536 Result: Down-regulated in Transcription
  misc_feature: MA Experiment 108536 PARAMETER Experiment Name: Zm_Meristem_P Parameter: Age (day) Value: 8
  misc_feature: MA Experiment 108536 PARAMETER Experiment Name: Zm_Meristem_P Parameter: Organism Value: Zea mays
  misc_feature: MA Experiment 108536 PARAMETER Experiment Name: Zm_Meristem_P Parameter: Plant Line Value: 35A19
  misc_feature: MA Experiment 108536 PARAMETER Experiment Name: Zm_Meristem_P Parameter: Tissue Value: Shoot Meristem vs. Above Shoot Meristem
gcactcatccattccatcatcccctttgcaagtatagtctctctgctaagcgaannnagcttcaagctagtctcggcggctctagaagacgatgggcaaggacgacgtgatcgagagcggcgctggcggcggcgagttcgctgccaaggactacacggaccctcccccggcgccgctgatcgacgcggcggactgggggtcctggtcgctgtaccgcgccgtgatcgccgagttcatcgccacgctgctgttcctgtacatcacggtggccaccgtgatcgggtacaagcaccagacgnacgcgtcggcgtcgggcgccnacgcggcgtgcggcggcgtgggcgtnctgggcatcgcctgggccttcggcggcatgatcttcgtcctcgtctactgcaccgccggcatctcggggggccacatcaaccccgccgtcaccttcggcctcttcctggcgcggcaaggtctccctggtgcgcgcgctgctctacatcgtggcgcagtgcctcggcgccatctgcggcgtcggcctcgtcaaggcgttccagagcgcctacttcgacaggtacggcggcggcgccaactcgctcgcctccggctactcccgcggcaccggcctcggcgccgagatcatcggcaccttcgtgctcgtctacaccgtcttctccgccaccgaccccaagcgcaacgcccgcgactcccacgtcccggttctggctcccctccccatcggcttcgccgtgttcatggtgcacctggccaccatccccgtcaccggcaccggcatcaacccggccaggagcctgggcgccgccgtcatctacaacaaggacaagccctgggacgaccactggatcttctgggtgggccctctcgtgggcgctgccatcgcggccttctaccaccagtacatcctccgggctggcgccatcaaggccctcggctccttcaggagcaacgcgtgatgagcggggcttggctgtggagcaatggcgggcgacctacgggcggggggccgtgagcgaggagaatgccatcattcatcgatcgacttgggtgccggtggttggttcgggtcgcctttttttttgtttcagcagctgctgcgttgcgcgcgtgcgtgagatttggtttggtttcgttcccctgcaatgtaatcatgtcgtgactctcaagggattattccgctctgctcttatggtctctgttttctatttaatgattgttattaccatgtagcagtaaccatcgtcatcagtgagaaccttgttgcttct

SEQ ID NO: 8069 - protein, 412 aa, Zea mays subsp. mays
  peptide (1)..(412): Ceres Seq. ID no. 12402411
  misc_feature (163)..(320): Pfam Name: Equine herpesvirus glycoprotein gp2 Pfam Description: Equine herpesvirus glycoprotein gp2
  misc_feature (149)..(320): Homolog of NCBI NO: 13592175 NR Description: ppg3 [Leishmania major]
  misc_feature (151)..(320): Homolog of NCBI NO: 13592175 NR Description: ppg3 [Leishmania major]
  misc_feature (151)..(320): Homolog of NCBI NO: 13592175 NR Description: ppg3 [Leishmania major]
  misc_feature (149)..(322): Homolog of NCBI NO: 13592175 NR Description: ppg3 [Leishmania major]
  misc_feature (151)..(320): Homolog of NCBI NO: 13592175 NR Description: ppg3 [Leishmania major]
  misc_feature (151)..(320): Homolog of NCBI NO: 13592175 NR Description: ppg3 [Leishmania major]
  misc_feature (149)..(320): Homolog of NCBI NO: 13592175 NR Description: ppg3 [Leishmania major]
  misc_feature (149)..(320): Homolog of NCBI NO: 13592175 NR Description: ppg3 [Leishmania major]
  misc_feature (151)..(320): Homolog of NCBI NO: 13592175 NR Description: ppg3 [Leishmania major]
  misc_feature (151)..(320): Homolog of NCBI NO: 13592175 NR Description: ppg3 [Leishmania major]
  misc_feature (19)..(19): Xaa is any aa, unknown or other
  misc_feature (100)..(100): Xaa is any aa, unknown or other
  misc_feature (107)..(107): Xaa is any aa, unknown or other
  misc_feature (116)..(116): Xaa is any aa, unknown or other
ALIHSIIPFASIVSLLSEXSFKLVSAALEDDGQGRRDRERRWRRRVRCQGLHGPSPGAADRRGGLGVLVAVPRRDRRVHRHAAVPVHHGGHRDRVQAPDXRVGVGRXRGVRRRGRXGHRLGLRRHDLRPRLLHRRHLGGPHQPRRHLRPLPGAARSPWCARCSTSWRSASAPSAASASSRRSRAPTSTGTAAAPTRSPPATPAAPASAPRSSAPSCSSTPSSPPPTPSATPATPTSRFWLPSPSASPCSWCTWPPSPSPAPASTRPGAWAPPSSTTRTSPGTTTGSSGWALSWALPSRPSTTSTSSGLAPSRPSAPSGATRDERGLAVEQWRATYGRGAVSEENAIIHRSTWVPVVGSGRLFFCFSSCCVARVREIWFGFVPLQCNHVVTLKGLFRSALMVSVFYLMIVITM

SEQ ID NO: 8070 - protein, 309 aa, Zea mays subsp. mays
  peptide (1)..(309): Ceres Seq. ID no. 12402412
  misc_feature (36)..(134): Pfam Name: Major intrinsic protein Pfam Description: Major intrinsic protein
  misc_feature (1)..(134): Homolog of NCBI NO: 13447801 NR Description: plasma membrane integral protein ZmPIP2-1 [Zea
  misc_feature (1)..(134): Homolog of NCBI NO: 29650727 NR Description: aquaporin [Zea mays]
  misc_feature (1)..(134): Homolog of NCBI NO: 13447803 NR Description: plasma membrane integral protein ZmPIP2-2 [Zea
  misc_feature (1)..(134): Homolog of NCBI NO: 34901270 NR Description: putative plasma membrane intrinsic protein [Oryza
  misc_feature (1)..(134): Homolog of NCBI NO: 7441249 NR Description: probable plasma membrane intrinsic protein - rice
  misc_feature (1)..(134): Homolog of NCBI NO: 13447805 NR Description: plasma membrane integral protein ZmPIP2-3 [Zea
  misc_feature (1)..(134): Homolog of NCBI NO: 13447807 NR Description: plasma membrane integral protein ZmPIP2-4 [Zea
  misc_feature (1)..(124): Homolog of NCBI NO: 7441245 NR Description: plasma membrane intrinsic protein BPW1 - barley
  misc_feature (1)..(134): Homolog of NCBI NO: 4741931 NR Description: plasma membrane intrinsic protein [Zea mays]
  misc_feature (1)..(124): Homolog of NCBI NO: 3158476 NR Description: aquaporin 2 [Samanea saman]
  misc_feature (70)..(70): Xaa is any aa, unknown or other
  misc_feature (77)..(77): Xaa is any aa, unknown or other
  misc_feature (85)..(85): Xaa is any aa, unknown or other
MGKDDVIESGAGGGEFAAKDYTDPPPAPLIDAADWGSWSLYRAVIAEFIATLLFLYITVATVIGYKHQTXASASGAXAACGGVGXLGIAWAFGGMIFVLVYCTAGISGGHINPAVTFGLFLARQGLPGARAALHRGAVPRRHLRRRPRQGVPERLLRQVRRRRQLARLRLLPRHRPRRRDHRHLRARLHRLLRHRPQAQRPRLPRPGSGSPPHRLRRVHGAPGHHPRHRHRHQPGQEPGRRRHLQQGQALGRPLDLLGGPSRGRCHRGLLPPVHPPGWRHQGPRLLQEQRVMSGAWLWSNGGRPTGGGP

SEQ ID NO: 8071 - protein, 215 aa, Zea mays subsp. mays
  peptide (1)..(215): Ceres Seq. ID no. 12402413
  misc_feature (1)..(40): Homolog of NCBI NO: 13447801 NR Description: plasma membrane integral protein ZmPIP2-1 [Zea
  misc_feature (1)..(40): Homolog of NCBI NO: 29650727 NR Description: aquaporin [Zea mays]
  misc_feature (1)..(40): Homolog of NCBI NO: 13447803 NR Description: plasma membrane integral protein ZmPIP2-2 [Zea
  misc_feature (1)..(40): Homolog of NCBI NO: 34901270 NR Description: putative plasma membrane intrinsic protein [Oryza
  misc_feature (1)..(40): Homolog of NCBI NO: 7441249 NR Description: probable plasma membrane intrinsic protein - rice
  misc_feature (1)..(40): Homolog of NCBI NO: 13447805 NR Description: plasma membrane integral protein ZmPIP2-3 [Zea
  misc_feature (1)..(40): Homolog of NCBI NO: 13447807 NR Description: plasma membrane integral protein ZmPIP2-4 [Zea
  misc_feature (1)..(30): Homolog of NCBI NO: 7441245 NR Description: plasma membrane intrinsic protein BPW1 - barley
  misc_feature (1)..(40): Homolog of NCBI NO: 4741931 NR Description: plasma membrane intrinsic protein [Zea mays]
  misc_feature (1)..(30): Homolog of NCBI NO: 3158476 NR Description: aquaporin 2 [Samanea saman]
MIFVLVYCTAGISGGHINPAVTFGLFLARQGLPGARAALHRGAVPRRHLRRRPRQGVPERLLRQVRRRRQLARLRLLPRHRPRRRDHRHLRARLHRLLRHRPQAQRPRLPRPGSGSPPHRLRRVHGAPGHHPRHRHRHQPGQEPGRRRHLQQGQALGRPLDLLGGPSRGRCHRGLLPPVHPPGWRHQGPRLLQEQRVMSGAWLWSNGGRPTGGGP

SEQ ID NO: 8072 - DNA, 1622 bp, Zea mays subsp. mays
  misc_feature (1)..(1622): Ceres Seq. ID no. 12384174
  misc_feature: MA Experiment ID: 108504 Result: Down-regulated in Transcription
  misc_feature: MA Experiment 108504 PARAMETER Experiment Name: Zm_Drought_P Parameter: Age (day) Value: 8
  misc_feature: MA Experiment 108504 PARAMETER Experiment Name: Zm_Drought_P Parameter: Organism Value: Zea mays
  misc_feature: MA Experiment 108504 PARAMETER Experiment Name: Zm_Drought_P Parameter: Plant Line Value: 35A19
  misc_feature: MA Experiment 108504 PARAMETER Experiment Name: Zm_Drought_P Parameter: Timepoint (hr) Value: 12
  misc_feature: MA Experiment 108504 PARAMETER Experiment Name: Zm_Drought_P Parameter: Tissue Value: Aerial
  misc_feature: MA Experiment 108504 PARAMETER Experiment Name: Zm_Drought_P Parameter: Treatment Value: Drought vs. No Drought
  misc_feature: MA Experiment ID: 108513 Result: Down-regulated in Transcription
  misc_feature: MA Experiment 108513 PARAMETER Experiment Name: Zm_100uM_ABA_P Parameter: Age (day) Value: 8
  misc_feature: MA Experiment 108513 PARAMETER Experiment Name: Zm_100uM_ABA_P Parameter: Organism Value: Zea mays
  misc_feature: MA Experiment 108513 PARAMETER Experiment Name: Zm_100uM_ABA_P Parameter: Plant Line Value: 35A19
  misc_feature: MA Experiment 108513 PARAMETER Experiment Name: Zm_100uM_ABA_P Parameter: Timepoint (hr) Value: 6
  misc_feature: MA Experiment 108513 PARAMETER Experiment Name: Zm_100uM_ABA_P Parameter: Tissue Value: Aerial
  misc_feature: MA Experiment 108513 PARAMETER Experiment Name: Zm_100uM_ABA_P Parameter: Treatment Value: 100uM ABA vs. No Treatment
  misc_feature: MA Experiment ID: 108522 Result: Down-regulated in Transcription
  misc_feature: MA Experiment 108522 PARAMETER Experiment Name: Zm_42deg_Heat_P Parameter: Age (day) Value: 8
  misc_feature: MA Experiment 108522 PARAMETER Experiment Name: Zm_42deg_Heat_P Parameter: Organism Value: Zea mays
  misc_feature: MA Experiment 108522 PARAMETER Experiment Name: Zm_42deg_Heat_P Parameter: Plant Line Value: 35A19
  misc_feature: MA Experiment 108522 PARAMETER Experiment Name: Zm_42deg_Heat_P Parameter: Temperature (deg C) Value: 42 vs. 22
  misc_feature: MA Experiment 108522 PARAMETER Experiment Name: Zm_42deg_Heat_P Parameter: Timepoint (hr) Value: 1
  misc_feature: MA Experiment 108522 PARAMETER Experiment Name: Zm_42deg_Heat_P Parameter: Tissue Value: Aerial
  misc_feature: MA Experiment ID: 108523 Result: Up-regulated in Transcription
  misc_feature: MA Experiment 108523 PARAMETER Experiment Name: Zm_42deg_Heat_P Parameter: Age (day) Value: 8
  misc_feature: MA Experiment 108523 PARAMETER Experiment Name: Zm_42deg_Heat_P Parameter: Organism Value: Zea mays
  misc_feature: MA Experiment 108523 PARAMETER Experiment Name: Zm_42deg_Heat_P Parameter: Plant Line Value: 35A19
  misc_feature: MA Experiment 108523 PARAMETER Experiment Name: Zm_42deg_Heat_P Parameter: Temperature (deg C) Value: 42 vs. 22
  misc_feature: MA Experiment 108523 PARAMETER Experiment Name: Zm_42deg_Heat_P Parameter: Timepoint (hr) Value: 6
  misc_feature: MA Experiment 108523 PARAMETER Experiment Name: Zm_42deg_Heat_P Parameter: Tissue Value: Aerial
  misc_feature: MA Experiment ID: 108526 Result: Up-regulated in Transcription
  misc_feature: MA Experiment 108526 PARAMETER Experiment Name: Zm_5mM_NO_P Parameter: Age (day) Value: 8
  misc_feature: MA Experiment 108526 PARAMETER Experiment Name: Zm_5mM_NO_P Parameter: Organism Value: Zea mays
  misc_feature: MA Experiment 108526 PARAMETER Experiment Name: Zm_5mM_NO_P Parameter: Plant Line Value: 35A19
  misc_feature: MA Experiment 108526 PARAMETER Experiment Name: Zm_5mM_NO_P Parameter: Timepoint (hr) Value: 1
  misc_feature: MA Experiment 108526 PARAMETER Experiment Name: Zm_5mM_NO_P Parameter: Tissue Value: Aerial
  misc_feature: MA Experiment 108526 PARAMETER Experiment Name: Zm_5mM_NO_P Parameter: Treatment Value: 5mM NO vs. No Treatment
  misc_feature: MA Experiment ID: 108527 Result: Up-regulated in Transcription
  misc_feature: MA Experiment 108527 PARAMETER Experiment Name: Zm_5mM_NO_P Parameter: Age (day) Value: 8
  misc_feature: MA Experiment 108527 PARAMETER Experiment Name: Zm_5mM_NO_P Parameter: Organism Value: Zea mays
  misc_feature: MA Experiment 108527 PARAMETER Experiment Name: Zm_5mM_NO_P Parameter: Plant Line Value: 35A19
  misc_feature: MA Experiment 108527 PARAMETER Experiment Name: Zm_5mM_NO_P Parameter: Timepoint (hr) Value: 6
  misc_feature: MA Experiment 108527 PARAMETER Experiment Name: Zm_5mM_NO_P Parameter: Tissue Value: Aerial
  misc_feature: MA Experiment 108527 PARAMETER Experiment Name: Zm_5mM_NO_P Parameter: Treatment Value: 5mM NO vs. No Treatment
  misc_feature: MA Experiment ID: 108529 Result: Down-regulated in Transcription
  misc_feature: MA Experiment 108529 PARAMETER Experiment Name: Zm_Imbibed_Seeds_P Parameter: Age (day) Value: 5 vs. 2
  misc_feature: MA Experiment 108529 PARAMETER Experiment Name: Zm_Imbibed_Seeds_P Parameter: Organism Value: Zea mays
  misc_feature: MA Experiment 108529 PARAMETER Experiment Name: Zm_Imbibed_Seeds_P Parameter: Plant Line Value: 35A19
  misc_feature: MA Experiment 108529 PARAMETER Experiment Name: Zm_Imbibed_Seeds_P Parameter: Tissue Value: Roots vs. Embryo
  misc_feature: MA Experiment ID: 108540 Result: Down-regulated in Transcription
  misc_feature: MA Experiment 108540 PARAMETER Experiment Name: Zm_20percent_PEG_P Parameter: Age (day) Value: 8
  misc_feature: MA Experiment 108540 PARAMETER Experiment Name: Zm_20percent_PEG_P Parameter: Organism Value: Zea mays
  misc_feature: MA Experiment 108540 PARAMETER Experiment Name: Zm_20percent_PEG_P Parameter: Plant Line Value: 35A19
  misc_feature: MA Experiment 108540 PARAMETER Experiment Name: Zm_20percent_PEG_P Parameter: Timepoint (hr) Value: 6
  misc_feature: MA Experiment 108540 PARAMETER Experiment Name: Zm_20percent_PEG_P Parameter: Tissue Value: Aerial
  misc_feature: MA Experiment 108540 PARAMETER Experiment Name: Zm_20percent_PEG_P Parameter: Treatment Value: 20percent PEG vs. No Treatment
  misc_feature: MA Experiment ID: 108546 Result: Down-regulated in Transcription
  misc_feature: MA Experiment 108546 PARAMETER Experiment Name: Zm_Imbibed_Seeds_P Parameter: Age (day) Value: 3 vs. 2
  misc_feature: MA Experiment 108546 PARAMETER Experiment Name: Zm_Imbibed_Seeds_P Parameter: Organism Value: Zea mays
  misc_feature: MA Experiment 108546 PARAMETER Experiment Name: Zm_Imbibed_Seeds_P Parameter: Plant Line Value: 35A19
  misc_feature: MA Experiment 108546 PARAMETER Experiment Name: Zm_Imbibed_Seeds_P Parameter: Tissue Value: Roots vs. Embryo
  misc_feature: MA Experiment ID: 108556 Result: Down-regulated in Transcription
  misc_feature: MA Experiment 108556 PARAMETER Experiment Name: Zm_Drought_P Parameter: Age (day) Value: 9
  misc_feature: MA Experiment 108556 PARAMETER Experiment Name: Zm_Drought_P Parameter: Organism Value: Zea mays
  misc_feature: MA Experiment 108556 PARAMETER Experiment Name: Zm_Drought_P Parameter: Plant Line Value: 35A19
  misc_feature: MA Experiment 108556 PARAMETER Experiment Name: Zm_Drought_P Parameter: Timepoint (hr) Value: 24
  misc_feature: MA Experiment 108556 PARAMETER Experiment Name: Zm_Drought_P Parameter: Tissue Value: Aerial
  misc_feature: MA Experiment 108556 PARAMETER Experiment Name: Zm_Drought_P Parameter: Treatment Value: Drought vs. No Drought
  misc_feature: MA Experiment ID: 108597 Result: Down-regulated in Transcription
  misc_feature: MA Experiment 108597 PARAMETER Experiment Name: Zm_100uM_ABA_P Parameter: Age (day) Value: 9
  misc_feature: MA Experiment 108597 PARAMETER Experiment Name: Zm_100uM_ABA_P Parameter: Organism Value: Zea mays
  misc_feature: MA Experiment 108597 PARAMETER Experiment Name: Zm_100uM_ABA_P Parameter: Plant Line Value: 35A19
  misc_feature: MA Experiment 108597 PARAMETER Experiment Name: Zm_100uM_ABA_P Parameter: Timepoint (hr) Value: 24
  misc_feature: MA Experiment 108597 PARAMETER Experiment Name: Zm_100uM_ABA_P Parameter: Tissue Value: Aerial
  misc_feature: MA Experiment 108597 PARAMETER Experiment Name: Zm_100uM_ABA_P Parameter: Treatment Value: 100uM ABA vs. No Treatment
  misc_feature: MA Experiment ID: 108687 Result: Up-regulated in Transcription
  misc_feature: MA Experiment 108687 PARAMETER Experiment Name: Zm_Embryos-Flowers__P Parameter: Tissue Value: Embryo vs. Aerial+
  misc_feature: MA Experiment ID: 108688 Result: Down-regulated in Transcription
  misc_feature: MA Experiment 108688 PARAMETER Experiment Name: Zm_Embryos-Flowers__P Parameter: Tissue Value: Immature Flowers vs. Aerial+
  misc_feature: MA Experiment ID: 20000479 Result: Down-regulated in Transcription
  misc_feature: MA Experiment 20000479 PARAMETER Experiment Name: Zm_Drought_P Parameter: Age (day) Value: 10
  misc_feature: MA Experiment 20000479 PARAMETER Experiment Name: Zm_Drought_P Parameter: Organism Value: Zea mays
  misc_feature: MA Experiment 20000479 PARAMETER Experiment Name: Zm_Drought_P Parameter: Plant Line Value: 35A19
  misc_feature: MA Experiment 20000479 PARAMETER Experiment Name: Zm_Drought_P Parameter: Timepoint (hr) Value: 48
  misc_feature: MA Experiment 20000479 PARAMETER Experiment Name: Zm_Drought_P Parameter: Tissue Value: Aerial
  misc_feature: MA Experiment 20000479 PARAMETER Experiment Name: Zm_Drought_P Parameter: Treatment Value: Drought vs. No Drought
  misc_feature: MA Experiment ID: 20000487 Result: Up-regulated in Transcription
  misc_feature: MA Experiment 20000487 PARAMETER Experiment Name: Zm_50mM_NH4NO3_L_to_H_P Parameter: Organism Value: Zea mays
  misc_feature: MA Experiment 20000487 PARAMETER Experiment Name: Zm_50mM_NH4NO3_L_to_H_P Parameter: Timepoint (hr) Value: 4
  misc_feature: MA Experiment 20000487 PARAMETER Experiment Name: Zm_50mM_NH4NO3_L_to_H_P Parameter: Tissue Value: Leaves
  misc_feature: MA Experiment 20000487 PARAMETER Experiment Name: Zm_50mM_NH4NO3_L_to_H_P Parameter: Treatment Value: 50mM NH4NO3 vs. 100mM Mannitol
  misc_feature: MA Experiment ID: 20000492 Result: Up-regulated in Transcription
  misc_feature: MA Experiment 20000492 PARAMETER Experiment Name: Zm_Hybrid_Seed_Dev_P Parameter: DAP Value: 12
  misc_feature: MA Experiment 20000492 PARAMETER Experiment Name: Zm_Hybrid_Seed_Dev_P Parameter: Organism Value: Zea mays
  misc_feature: MA Experiment 20000492 PARAMETER Experiment Name: Zm_Hybrid_Seed_Dev_P Parameter: Plant Line Value: 35A19
  misc_feature: MA Experiment 20000492 PARAMETER Experiment Name: Zm_Hybrid_Seed_Dev_P Parameter: Tissue Value: Fert Kernel vs. Unfert Floret
  misc_feature: MA Experiment ID: 20000535 Result: Up-regulated in Transcription
  misc_feature: MA Experiment 20000535 PARAMETER Experiment Name: Zm_Hybrid_Seed_Dev_P Parameter: DAP Value: 30 vs. 12
  misc_feature: MA Experiment 20000535 PARAMETER Experiment Name: Zm_Hybrid_Seed_Dev_P Parameter: Organism Value: Zea mays
  misc_feature: MA Experiment 20000535 PARAMETER Experiment Name: Zm_Hybrid_Seed_Dev_P Parameter: Plant Line Value: 35A19
  misc_feature: MA Experiment 20000535 PARAMETER Experiment Name: Zm_Hybrid_Seed_Dev_P Parameter: Tissue Value: Embryo vs. Unfert Floret
  misc_feature: MA Experiment ID: 20001605 Result: Up-regulated in Transcription
  misc_feature: MA Experiment 20001605 PARAMETER Experiment Name: Zm_50ppm_KNO3_L-to-H_P Parameter: Age (day) Value: 19
  misc_feature: MA Experiment 20001605 PARAMETER Experiment Name: Zm_50ppm_KNO3_L-to-H_P Parameter: Organism Value: Zea mays
  misc_feature: MA Experiment 20001605 PARAMETER Experiment Name: Zm_50ppm_KNO3_L-to-H_P Parameter: Plant Line Value: 35A19
  misc_feature: MA Experiment 20001605 PARAMETER Experiment Name: Zm_50ppm_KNO3_L-to-H_P Parameter: Timepoint (hr) Value: 4
  misc_feature: MA Experiment 20001605 PARAMETER Experiment Name: Zm_50ppm_KNO3_L-to-H_P Parameter: Tissue Value: Shoots
  misc_feature: MA Experiment 20001605 PARAMETER Experiment Name: Zm_50ppm_KNO3_L-to-H_P Parameter: Treatment Value: 50ppm KNO3 vs. 50ppm KCl
  misc_feature: MA Experiment ID: 20001606 Result: Up-regulated in Transcription
  misc_feature: MA Experiment 20001606 PARAMETER Experiment Name: Zm_50ppm_KNO3_L-to-H_P Parameter: Age (day) Value: 19
  misc_feature: MA Experiment 20001606 PARAMETER Experiment Name: Zm_50ppm_KNO3_L-to-H_P Parameter: Organism Value: Zea mays
  misc_feature: MA Experiment 20001606 PARAMETER Experiment Name: Zm_50ppm_KNO3_L-to-H_P Parameter: Plant Line Value: 35A19
  misc_feature: MA Experiment 20001606 PARAMETER Experiment Name: Zm_50ppm_KNO3_L-to-H_P Parameter: Timepoint (hr) Value: 8
  misc_feature: MA Experiment 20001606 PARAMETER Experiment Name: Zm_50ppm_KNO3_L-to-H_P Parameter: Tissue Value: Shoots
  misc_feature: MA Experiment 20001606 PARAMETER Experiment Name: Zm_50ppm_KNO3_L-to-H_P Parameter: Treatment Value: 50ppm KNO3 vs. 50ppm KCl
attcccatcagagaagagataaccacacgtccacacaccacagaccacacgcacggtacagcctctccgcagctgcaggtgcctgctgttctccgacgagaccccaagaactcgccaacctatcccaattcccagccacccttccctctttcacaatgctggcctccgccgccaccgtcaagccctccaccgccgcggccgcggccacctgcaaggcggccttcaagccgctccacctccctcccctccccgccgccgccggcctcaggccgctctccctctccgtctccgcgcgcccgctgtaccgtcaggagcatgtcctggcatccgtggcggtggcggcggctgggcgcaacgaacgcgccacgtcccccgcgccgccgtccgccaccgctgacggcgcccggccgctggaggtcgccgcgccggcggagacgggtcggcgcgccaagatcggggtctacttccacgtggtgggcgctgaacgttatcttcaacatctacaacaagaaggtcctcaacgcgttcccgtacccgtggctcacgtcgacgctctccctcgccgccggctccgccatcatgctcgcgtcctgggccaccaggatcgccgaggcgccccagacggacctcgatttctggaaggcgctgactcccgttgcgatcgcgcacacgatcgggcacgtggcggcgacggtgagcatggccaaggtggccgtgtcgttcacgcacatcatcaagagcggggagccggcattcagcgtgctcgtctccaggttcttcctcggcgagcacttcccggcgccggtctacttctccctcctccccatcatcggcggatgcgcgctcgccgccgtcaccgagctcaacttcaacatggttggattcatgggggcaatgatctccaacctggcattcgtcgtccggaccatcttctccaagaaggggatgaagggcaagtccgtgagcgggatgaactactacgcctgcctctccatcatgtcgctggtgatcctcctgcccttcgccgtcgccatggaggggcccaaggtgtgggcagcgggctggcagacagcagtcgccgagatcggtcccaacttcgtctggtgggtggcggcgcagagcgtgttctaccacctgtacaaccaggtgtcctacatgtccctggacgagatctcgcccctcaccttctccatcggcaacaccatgaagcgcatctccgtcatcgtcgcgtccatcatcatcttccagacgcccgtccagcccatcaacgcgctcggggccgccatcgccatcctcggaaccttcatctactcccaggccaagcagtagccgcccttggcgcgcgcgtctggctctcaggcctcagttcagttcaccgccgaatcagctcggcgctcgaagatataacagattatataacttttgaggatatctacctagcttgtataatagtattattactagatcctctcttctttttttcgtattttcttttttcctaggactagcttattactagatcatttcgtcgtcgtgttttcactatgactatgatggcgtagagagagagagagagatggatccatctaaataaaaaaaaaggtaccggatcttgttttgtt

SEQ ID NO: 8073 - protein, 499 aa, Zea mays subsp. mays
  peptide (1)..(499): Ceres Seq. ID no. 12384175
  misc_feature (52)..(155): Homolog of NCBI NO: 28564755 NR Description: putative glucose-6-phosphate/phosphate-transloca
SHQRRDNHTSTHHRPHARYSLSAAAGACCSPTRPQELANLSQFPATLPSFTMLASAATVKPSTAAAAATCKAAFKPLHLPPLPAAAGLRPLSLSVSARPLYRQEHVLASVAVAAAGRNERATSPAPPSATADGARPLEVAAPAETGRRAKIGVYFHVVGAERYLQHLQQEGPQRVPVPVAHVDALPRRRLRHHARVLGHQDRRGAPDGPRFLEGADSRCDRAHDRARGGDGEHGQGGRVVHAHHQERGAGIQRARLQVLPRRALPGAGLLLPPPHHRRMRARRRHRAQLQHGWIHGGNDLQPGIRRPDHLLQEGDEGQVRERDELLRLPLHHVAGDPPALRRRHGGAQGVGSGLADSSRRDRSQLRLVGGGAERVLPPVQPGVLHVPGRDLAPHLLHRQHHEAHLRHRRVHHHLPDARPAHQRARGRHRHPRNLHLLPGQAVAALGARVWLSGLSSVHRRISSALEDITDYITFEDIYLACIIVLLLDPLFFFSYFLFS

SEQ ID NO: 8074 - protein, 448 aa, Zea mays subsp. mays
  peptide (1)..(448): Ceres Seq. ID no. 12384176
  misc_feature (1)..(104): Homolog of NCBI NO: 28564755 NR Description: putative glucose-6-phosphate/phosphate-transloca
MLASAATVKPSTAAAAATCKAAFKPLHLPPLPAAAGLRPLSLSVSARPLYRQEHVLASVAVAAAGRNERATSPAPPSATADGARPLEVAAPAETGRRAKIGVYFHVVGAERYLQHLQQEGPQRVPVPVAHVDALPRRRLRHHARVLGHQDRRGAPDGPRFLEGADSRCDRAHDRARGGDGEHGQGGRVVHAHHQERGAGIQRARLQVLPRRALPGAGLLLPPPHHRRMRARRRHRAQLQHGWIHGGNDLQPGIRRPDHLLQEGDEGQVRERDELLRLPLHHVAGDPPALRRRHGGAQGVGSGLADSSRRDRSQLRLVGGGAERVLPPVQPGVLHVPGRDLAPHLLHRQHHEAHLRHRRVHHHLPDARPAHQRARGRHRHPRNLHLLPGQAVAALGARVWLSGLSSVHRRISSALEDITDYITFEDIYLACIIVLLLDPLFFFSYFLFS

SEQ ID NO: 8075 - protein, 442 aa, Zea mays subsp. mays
  peptide (1)..(442): Ceres Seq. ID no. 12384177
  misc_feature (160)..(285): Pfam Name: Integral membrane protein DUF6 Pfam Description: Integral membrane protein DUF6
  misc_feature (118)..(442): Homolog of NCBI NO: 28564755 NR Description: putative glucose-6-phosphate/phosphate-transloca
  misc_feature (156)..(442): Homolog of NCBI NO: 14150753 NR Description: glucose-6-phosphate/phosphate translocator [Oryza
  misc_feature (67)..(441): Homolog of NCBI NO: 7489744 NR Description: glucose-6-phosphate/phosphate-translocator
  misc_feature (156)..(442): Homolog of NCBI NO: 7488807 NR Description: glucose-6-phosphate/phosphate-translocator
  misc_feature (156)..(442): Homolog of NCBI NO: 18407336 NR Description: glucose-6-phosphate/phosphate-translocator putative; protein id: At1g61800.1, supported by cDNA:
  misc_feature (156)..(442): Homolog of NCBI NO: 14596173 NR Description: Similar to
  misc_feature (156)..(442): Homolog of NCBI NO: 7484980 NR Description: glucose-6-phosphate/phosphate translocator
  misc_feature (124)..(442): Homolog of NCBI NO: 9295277 NR Description: glucose-6P/phosphate translocator precursor
  misc_feature (156)..(442): Homolog of NCBI NO: 32401390 NR Description: glucose-6-phosphate/phosphate translocator
  misc_feature (156)..(442): Homolog of NCBI NO: 7489258 NR Description: probable
IPIREEITTRPHTTDHTHGTASPQLQVPAVLRRDPKNSPTYPNSQPPFPLSQCWPPPPPSSPPPPRPRPPARRPSSRSTSLPSPPPPASGRSPSPSPRARCTVRSMSWHPWRWRRLGATNAPRPPRRRPPPLTAPGRWRSPRRRRRVGAPRSGSTSTWWALNVIFNIYNKKVLNAFPYPWLTSTLSLAAGSAIMLASWATRIAEAPQTDLDFWKALTPVAIAHTIGHVAATVSMAKVAVSFTHIIKSGEPAFSVLVSRFFLGEHFPAPVYFSLLPIIGGCALAAVTELNFNMVGFMGAMISNLAFVVRTIFSKKGMKGKSVSGMNYYACLSIMSLVILLPFAVAMEGPKVWAAGWQTAVAEIGPNFVWWVAAQSVFYHLYNQVSYMSLDEISPLTFSIGNTMKRISVIVASIIIFQTPVQPINALGAAIAILGTFIYSQAKQ

SEQ ID NO: 8076 - DNA, 1353 bp, Zea mays subsp. mays
  misc_feature (1)..(1353): Ceres Seq. ID no. 12407178
  misc_feature: MA Experiment ID: 108522 Result: Down-regulated in Transcription
  misc_feature: MA Experiment 108522 PARAMETER Experiment Name: Zm_42deg_Heat_P Parameter: Age (day) Value: 8
  misc_feature: MA Experiment 108522 PARAMETER Experiment Name: Zm_42deg_Heat_P Parameter: Organism Value: Zea mays
  misc_feature: MA Experiment 108522 PARAMETER Experiment Name: Zm_42deg_Heat_P Parameter: Plant Line Value: 35A19
  misc_feature: MA Experiment 108522 PARAMETER Experiment Name: Zm_42deg_Heat_P Parameter: Temperature (deg C) Value: 42 vs. 22
  misc_feature: MA Experiment 108522 PARAMETER Experiment Name: Zm_42deg_Heat_P Parameter: Timepoint (hr) Value: 1
  misc_feature: MA Experiment 108522 PARAMETER Experiment Name: Zm_42deg_Heat_P Parameter: Tissue Value: Aerial
  misc_feature: MA Experiment ID: 108528 Result: Down-regulated in Transcription
  misc_feature: MA Experiment 108528 PARAMETER Experiment Name: Zm_Imbibed_Seeds_P Parameter: Age (day) Value: 5 vs. 2
  misc_feature: MA Experiment 108528 PARAMETER Experiment Name: Zm_Imbibed_Seeds_P Parameter: Organism Value: Zea mays
  misc_feature: MA Experiment 108528 PARAMETER Experiment Name: Zm_Imbibed_Seeds_P Parameter: Plant Line Value: 35A19
  misc_feature: MA Experiment 108528 PARAMETER Experiment Name: Zm_Imbibed_Seeds_P Parameter: Tissue Value: Aerial vs. Embryo
  misc_feature: MA Experiment ID: 108536 Result: Up-regulated in Transcription
  misc_feature: MA Experiment 108536 PARAMETER Experiment Name: Zm_Meristem_P Parameter: Age (day) Value: 8
  misc_feature: MA Experiment 108536 PARAMETER Experiment Name: Zm_Meristem_P Parameter: Organism Value: Zea mays
  misc_feature: MA Experiment 108536 PARAMETER Experiment Name: Zm_Meristem_P Parameter: Plant Line Value: 35A19
  misc_feature: MA Experiment 108536 PARAMETER Experiment Name: Zm_Meristem_P Parameter: Tissue Value: Shoot Meristem vs. Above Shoot Meristem
  misc_feature: MA Experiment ID: 108544 Result: Up-regulated in Transcription
  misc_feature: MA Experiment ID: 108545 Result: Down-regulated in Transcription
  misc_feature: MA Experiment 108545 PARAMETER Experiment Name: Zm_Imbibed_Seeds_P Parameter: Age (day) Value: 3 vs. 2
  misc_feature: MA Experiment 108545 PARAMETER Experiment Name: Zm_Imbibed_Seeds_P Parameter: Organism Value: Zea mays
  misc_feature: MA Experiment 108545 PARAMETER Experiment Name: Zm_Imbibed_Seeds_P Parameter: Plant Line Value: 35A19
  misc_feature: MA Experiment 108545 PARAMETER Experiment Name: Zm_Imbibed_Seeds_P Parameter: Tissue Value: Aerial vs. Embryo
  misc_feature: MA Experiment ID: 108547 Result: Down-regulated in Transcription
  misc_feature: MA Experiment 108547 PARAMETER Experiment Name: Zm_Imbibed_Seeds_P Parameter: Age (day) Value: 4 vs. 2
  misc_feature: MA Experiment 108547 PARAMETER Experiment Name: Zm_Imbibed_Seeds_P Parameter: Organism Value: Zea mays
  misc_feature: MA Experiment 108547 PARAMETER Experiment Name: Zm_Imbibed_Seeds_P Parameter: Plant Line Value: 35A19
  misc_feature: MA Experiment 108547 PARAMETER Experiment Name: Zm_Imbibed_Seeds_P Parameter: Tissue Value: Aerial vs. Embryo
  misc_feature: MA Experiment ID: 108687 Result: Down-regulated in Transcription
  misc_feature: MA Experiment 108687 PARAMETER Experiment Name: Zm_Embryos-Flowers__P Parameter: Tissue Value: Embryo vs. Aerial+
  misc_feature: MA Experiment ID: 20000535 Result: Down-regulated in Transcription
  misc_feature: MA Experiment 20000535 PARAMETER Experiment Name: Zm_Hybrid_Seed_Dev_P Parameter: DAP Value: 30 vs. 12
  misc_feature: MA Experiment 20000535 PARAMETER Experiment Name: Zm_Hybrid_Seed_Dev_P Parameter: Organism Value: Zea mays
  misc_feature: MA Experiment 20000535 PARAMETER Experiment Name: Zm_Hybrid_Seed_Dev_P Parameter: Plant Line Value: 35A19
  misc_feature: MA Experiment 20000535 PARAMETER Experiment Name: Zm_Hybrid_Seed_Dev_P Parameter: Tissue Value: Embryo vs. Unfert Floret
gtgtgcaagcaaagcgcaaggccgatccgagggtggactgtggagggccggccatggtgatgatgatgcggtcgtgcctcggcggcggcctgctaccggtggcggtcatgctctgcctcaacgtggtggcggcggtcatggtgtcgctcgtcaaggtggccatggacggcggcatgaaaccgctcgtgatcgtcaccctgcagcagctcaccgccgccgtcttcctcgcgccaatcgcattcttcaaggagaggaagtcgaggccaaagctgacgctggagatcttcgcctacatcttcgtcagtgcggcgctcggggcagctcttcgtcagtacatgatcttcgtggccctgcgctacaccacggccaccttcgtgaccgccttctccaacatcgcccccgtgctcaccttcctcctggccgtcgctacgcggtccgaagcgctggacctcaagagcaggacggggttagcgaagctgctgggcacgctggtgtcgctggccggcgccatggtgctcaccctctacaagggcgtggcgctcacccacgcggcgttccgcctcgcaggaccagcagcagcactcccacggccggttgccgccgagcgccgccgacagccgcggcaagtggacgctgggcaccgtggccatcctgggcaactgcgtctgcctctcctgctggttcctgctccacggccgcctcgccaagaagtacccgcacgtctactcctgcaacgcgctcatgtccttgctcagcttcctccaggtcgccgtcgtcggcctctgcacccagcgcagcatctccccctggatcgtcaccagcaagttcaacatcctcaccgtcctatacgccggcatcgtcggctgcggcgtctcgttcgtgctggtgacatggtgcatcgagaagagaggagccgtgttcgtggccgccttcataccggtggtgcagatcatcgtctccgtcatcgacttctccatcctgcacgagcagctctacctcggaagcgtgctgggatcagtgctagtgataggtggcctttaccttctgctgtggggcaagaggcaggaggccctgcactgtcctcctcctcctccaaaggttgccgaagaagaccctgctgacaaagagcagcagcaagtgcagcagaactgaagacggacagcatcctctgactgtttggtcgtttggttgtaacagtgccagcaataagatctctctgcctccttttcttttcttttggtgtctcaggggggtgggcaatgttccttccttctcagatcgatcaccaacaaagtgtttagattctaatccaaaacagtagaatggtcttaaatacagtactcctgcttactg

SEQ ID NO: 8077 - protein, 372 aa, Zea mays subsp. mays
  peptide (1)..(372): Ceres Seq. ID no. 12407179
  misc_feature (26)..(203): Homolog of NCBI NO: 6815050 NR Description: ESTs AU030746(E60179) correspond to a region of the predicted to Arabidopsis thaliana BAC F11O4; similar to Medicago truncatula
  misc_feature (26)..(203): Homolog of NCBI NO: 34897774 NR Description: ESTs AU030746(E60179) correspond to a region of the predicted to Arabidopsis thaliana BAC F11O4; Medicago truncatula MtN21
  misc_feature (31)..(201): Homolog of NCBI NO: 34897816 NR Description: P0514G12.28 [Oryza sativa (japonica
  misc_feature (32)..(182): Homolog of NCBI NO: 34897814 NR Description: P0514G12.27 [Oryza sativa (japonica
  misc_feature (33)..(181): Homolog of NCBI NO: 30689857 NR Description: nodulin N21 family protein [Arabidopsis thaliana]
  misc_feature (28)..(181): Homolog of NCBI NO: 15234182 NR Description: hypothetical protein; protein id: At4g01440.1, by cDNA: 40560. [Arabidopsis thaliana] >gi|25407108|pir||G85018
  misc_feature (26)..(183): Homolog of NCBI NO: 15234185 NR Description: unknown protein; protein id: At4g01450.1
  misc_feature (33)..(177): Homolog of NCBI NO: 38605909 NR Description: OSJNBb0088C09.3 [Oryza sativa (japonica
  misc_feature (31)..(177): Homolog of NCBI NO: 28932880 NR Description: nodulin-like protein [Gossypium hirsutum]
  misc_feature (32)..(182): Homolog of NCBI NO: 15234179 NR Description: unknown protein; protein id: At4g01430.1, by cDNA: gi_20260641 [Arabidopsis thaliana]
VQAKRKADPRVDCGGPAMVMMMRSCLGGGLLPVAVMLCLNVVAAVMVSLVKVAMDGGMKPLVIVTLQQLTAAVFLAPIAFFKERKSRPKLTLEIFAYIFVSAALGAALRQYMIFVALRYTTATFVTAFSNIAPVLTFLLAVATRSEALDLKSRTGLAKLLGTLVSLAGAMVLTLYKGVALTHAAFRLAGPAAALPRPVAAERRRQPRQVDAGHRGHPGQLRLPLLLVPAPRPPRQEVPARLLLQRAHVLAQLPPGRRRRPLHPAQHLPLDRHQQVQHPHRPIRRHRRLRRLVRAGDMVHREERSRVRGRLHTGGADHRLRHRLLHPARAALPRKRAGISASDRWPLPSAVGQEAGGPALSSSSSKGCRRRPC

SEQ ID NO: 8078 - protein, 355 aa, Zea mays subsp. mays
  peptide (1)..(355): Ceres Seq. ID no. 12407180
  misc_feature (9)..(186): Homolog of NCBI NO: 6815050 NR Description: ESTs AU030746(E60179) correspond to a region of the predicted to Arabidopsis thaliana BAC F11O4; similar to Medicago truncatula
  misc_feature (9)..(186): Homolog of NCBI NO: 34897774 NR Description: ESTs AU030746(E60179) correspond to a region of the predicted to Arabidopsis thaliana BAC F11O4; Medicago truncatula MtN21
  misc_feature (14)..(184): Homolog of NCBI NO: 34897816 NR Description: P0514G12.28 [Oryza sativa (japonica
  misc_feature (15)..(165): Homolog of NCBI NO: 34897814 NR Description: P0514G12.27 [Oryza sativa (japonica
  misc_feature (16)..(164): Homolog of NCBI NO: 30689857 NR Description: nodulin N21 family protein [Arabidopsis thaliana]
  misc_feature (11)..(164): Homolog of NCBI NO: 15234182 NR Description: hypothetical protein; protein id: At4g01440.1, by cDNA: 40560. [Arabidopsis thaliana] >gi|25407108|pir||G85018
  misc_feature (9)..(166): Homolog of NCBI NO: 15234185 NR Description: unknown protein; protein id: At4g01450.1
  misc_feature (16)..(160): Homolog of NCBI NO: 38605909 NR Description: OSJNBb0088C09.3 [Oryza sativa (japonica
  misc_feature (14)..(160): Homolog of NCBI NO: 28932880 NR Description: nodulin-like protein [Gossypium hirsutum]
  misc_feature (15)..(165): Homolog of NCBI NO: 15234179 NR Description: unknown protein; protein id: At4g01430.1, by cDNA: gi_20260641 [Arabidopsis thaliana]
MVMMMRSCLGGGLLPVAVMLCLNVVAAVMVSLVKVAMDGGMKPLVIVTLQQLTAAVFLAPIAFFKERKSRPKLTLEIFAYIFVSAALGAALRQYMIFVALRYTTATFVTAFSNIAPVLTFLLAVATRSEALDLKSRTGLAKLLGTLVSLAGAMVLTLYKGVALTHAAFRLAGPAAALPRPVAAERRRQPRQVDAGHRGHPGQLRLPLLLVPAPRPPRQEVPARLLLQRAHVLAQLPPGRRRRPLHPAQHLPLDRHQQVQHPHRPIRRHRRLRRLVRAGDMVHREERSRVRGRLHTGGADHRLRHRLLHPARAALPRKRAGISASDRWPLPSAVGQEAGGPALSSSSSKGCRRRPC

SEQ ID NO: 8079 - protein, 353 aa, Zea mays subsp. mays
  peptide (1)..(353): Ceres Seq. ID no. 12407181
  misc_feature (7)..(184): Homolog of NCBI NO: 6815050 NR Description: ESTs AU030746(E60179) correspond to a region of the predicted to Arabidopsis thaliana BAC F11O4; similar to Medicago truncatula
  misc_feature (7)..(184): Homolog of NCBI NO: 34897774 NR Description: ESTs AU030746(E60179) correspond to a region of the predicted to Arabidopsis thaliana BAC F11O4; Medicago truncatula MtN21
  misc_feature (12)..(182): Homolog of NCBI NO: 34897816 NR Description: P0514G12.28 [Oryza sativa (japonica
  misc_feature (13)..(163): Homolog of NCBI NO: 34897814 NR Description: P0514G12.27 [Oryza sativa (japonica
  misc_feature (14)..(162): Homolog of NCBI NO: 30689857 NR Description: nodulin N21 family protein [Arabidopsis thaliana]
  misc_feature (9)..(162): Homolog of NCBI NO: 15234182 NR Description: hypothetical protein; protein id: At4g01440.1, by cDNA: 40560. [Arabidopsis thaliana] >gi|25407108|pir||G85018
  misc_feature (7)..(164): Homolog of NCBI NO: 15234185 NR Description: unknown protein; protein id: At4g01450.1
  misc_feature (14)..(158): Homolog of NCBI NO: 38605909 NR Description: OSJNBb0088C09.3 [Oryza sativa (japonica
  misc_feature (12)..(158): Homolog of NCBI NO: 28932880 NR Description: nodulin-like protein [Gossypium hirsutum]
  misc_feature (13)..(163): Homolog of NCBI NO: 15234179 NR Description: unknown protein; protein id: At4g01430.1, by cDNA: gi_20260641 [Arabidopsis thaliana]
MMMRSCLGGGLLPVAVMLCLNVVAAVMVSLVKVAMDGGMKPLVIVTLQQLTAAVFLAPIAFFKERKSRPKLTLEIFAYIFVSAALGAALRQYMIFVALRYTTATFVTAFSNIAPVLTFLLAVATRSEALDLKSRTGLAKLLGTLVSLAGAMVLTLYKGVALTHAAFRLAGPAAALPRPVAAERRRQPRQVDAGHRGHPGQLRLPLLLVPAPRPPRQEVPARLLLQRAHVLAQLPPGRRRRPLHPAQHLPLDRHQQVQHPHRPIRRHRRLRRLVRAGDMVHREERSRVRGRLHTGGADHRLRHRLLHPARAALPRKRAGISASDRWPLPSAVGQEAGGPALSSSSSKGCRRRPC

SEQ ID NO: 8080 - DNA, 1284 bp, Zea mays subsp. mays
  misc_feature (1)..(1284): Ceres Seq. ID no. 12386761
  misc_feature: MA Experiment ID: 108528 Result: Down-regulated in Transcription
  misc_feature: MA Experiment 108528 PARAMETER Experiment Name: Zm_Imbibed_Seeds_P Parameter: Age (day) Value: 5 vs. 2
  misc_feature: MA Experiment 108528 PARAMETER Experiment Name: Zm_Imbibed_Seeds_P Parameter: Organism Value: Zea mays
  misc_feature: MA Experiment 108528 PARAMETER Experiment Name: Zm_Imbibed_Seeds_P Parameter: Plant Line Value: 35A19
  misc_feature: MA Experiment 108528 PARAMETER Experiment Name: Zm_Imbibed_Seeds_P Parameter: Tissue Value: Aerial vs. Embryo
  misc_feature: MA Experiment ID: 108530 Result: Down-regulated in Transcription
  misc_feature: MA Experiment 108530 PARAMETER Experiment Name: Zm_Imbibed_Seeds_P Parameter: Age (day) Value: 6 vs. 2
  misc_feature: MA Experiment 108530 PARAMETER Experiment Name: Zm_Imbibed_Seeds_P Parameter: Organism Value: Zea mays
  misc_feature: MA Experiment 108530 PARAMETER Experiment Name: Zm_Imbibed_Seeds_P Parameter: Plant Line Value: 35A19
  misc_feature: MA Experiment 108530 PARAMETER Experiment Name: Zm_Imbibed_Seeds_P Parameter: Tissue Value: Aerial vs. Embryo
  misc_feature: MA Experiment ID: 108543 Result: Up-regulated in Transcription
  misc_feature: MA Experiment ID: 108545 Result: Down-regulated in Transcription
  misc_feature: MA Experiment 108545 PARAMETER Experiment Name: Zm_Imbibed_Seeds_P Parameter: Age (day) Value: 3 vs. 2
  misc_feature: MA Experiment 108545 PARAMETER Experiment Name: Zm_Imbibed_Seeds_P Parameter: Organism Value: Zea mays
  misc_feature: MA Experiment 108545 PARAMETER Experiment Name: Zm_Imbibed_Seeds_P Parameter: Plant Line Value: 35A19
  misc_feature: MA Experiment 108545 PARAMETER Experiment Name: Zm_Imbibed_Seeds_P Parameter: Tissue Value: Aerial vs. Embryo
  misc_feature: MA Experiment ID: 108546 Result: Up-regulated in Transcription
  misc_feature: MA Experiment 108546 PARAMETER Experiment Name: Zm_Imbibed_Seeds_P Parameter: Age (day) Value: 3 vs. 2
  misc_feature: MA Experiment 108546 PARAMETER Experiment Name: Zm_Imbibed_Seeds_P Parameter: Organism Value: Zea mays
  misc_feature: MA Experiment 108546 PARAMETER Experiment Name: Zm_Imbibed_Seeds_P Parameter: Plant Line Value: 35A19
  misc_feature: MA Experiment 108546 PARAMETER Experiment Name: Zm_Imbibed_Seeds_P Parameter: Tissue Value: Roots vs. Embryo
  misc_feature: MA Experiment ID: 108547 Result: Down-regulated in Transcription
  misc_feature: MA Experiment 108547 PARAMETER Experiment Name: Zm_Imbibed_Seeds_P Parameter: Age (day) Value: 4 vs. 2
  misc_feature: MA Experiment 108547 PARAMETER Experiment Name: Zm_Imbibed_Seeds_P Parameter: Organism Value: Zea mays
  misc_feature: MA Experiment 108547 PARAMETER Experiment Name: Zm_Imbibed_Seeds_P Parameter: Plant Line Value: 35A19
  misc_feature: MA Experiment 108547 PARAMETER Experiment Name: Zm_Imbibed_Seeds_P Parameter: Tissue Value: Aerial vs. Embryo
acgggaaaggagtacggagtaccggagacatcgtcaacgccatggccggaggaggtgcaacggtgtgcgtgaccggagccggcgggttcatcgcctcgtgggtagtgaagctcctgctctcccgcgggtacaccgtgcacggcaccgtccgccacctcagtgacgagaagacaggccacctgaagcgcctggagaatgctgccggaaaccttaggatcttcaaggctgacctgctggactacgacgccatggcagctgcggtcgtcgggtgccagggggttttccatgtggccactcctgtgccttcggaggacctgactgacccagagctacaaatgctgggtcctgctgttaccggcaccacgaatgtgctcaaagctgcctccagcgcgaacgtccagcgagtggtggtggtgtcgtccatggttgccgtcgagatcagccccaaagattggcctgaaggtaaggtccgagatgagaggtgctggtcagaccgagagttctgcaggagcattgagagctggtacccggtggctaagatcatctcagaggaggcggcgctggcgtacgggcagcaaaccgggctcgacgtggtgactatcaatccagggttggtgttcggccccatgctgcagccgacggtcaacacgaccatccagttcctcatctacttcctcaaaggaggccccgacccggtgaagaacaagctctggcacatcgtcgacgtccgcgatgtggccgacgccatgctgctgctctacgaggtgcctgaagcgaccggcagacacatctgcgcgcctcatgttatcagtgcccgcgacctgctggatctgctgaagagcatgtaccctgactacccttgcattgccaacgagagcatacttgacagagaccacccagcgccgatgacctctgacaagctgaagaagatcgggtggagctgccgaccgctggaggagacgatcgtggacaccgtcgagtgctgcctgcgggctggatttctggacgacgtgggtggggagacttcctgtcgcttccctcctcttttaaaccagatctagcctcggcgaaagcatgaattgtgattgcctatgctcttgcttatgttaccgtggacgacgagcgtcagcttttaaataaacgtcattgcatgctgttgtatttcttatattactgtggacaagcatcgatcagagcttttaaattgttaggatcacaggtgaaaaaggagacagagtttaacgtggaaaaaactctctaatttggaggagaaaaaatcacggg

SEQ ID NO: 8081 - protein, 352 aa, Zea mays subsp. mays
  peptide (1)..(352): Ceres Seq. ID no. 12386762
  misc_feature (21)..(207): Pfam Name: 3-beta hydroxysteroid dehydrogenase/isomerase family Pfam Description: 3-beta hydroxysteroid dehydrogenase/isomerase
  misc_feature (21)..(335): Homolog of NCBI NO: 15226134 NR Description: putative cinnamoyl-CoA reductase; protein id: supported by cDNA: 11254. [Arabidopsis thaliana]
  misc_feature (21)..(335): Homolog of NCBI NO: 15226135 NR Description: putative cinnamoyl-CoA reductase; protein id: supported by cDNA: gi_20260487 [Arabidopsis thaliana]
  misc_feature (21)..(334): Homolog of NCBI NO: 15223068 NR Description: putative cinnamoyl-CoA reductase; protein id:
  misc_feature (21)..(334): Homolog of NCBI NO: 6554472 NR Description: putative cinnamoyl-CoA reductase; 14056-15506
  misc_feature (15)..(342): Homolog of NCBI NO: 7431410 NR Description: cinnamoyl CoA reductase - maize
  misc_feature (15)..(342): Homolog of NCBI NO: 3242328 NR Description: cinnamoyl-CoA reductase [Zea mays]
  misc_feature (16)..(342): Homolog of NCBI NO: 3341511 NR Description: cinnamoyl-CoA reductase [Saccharum officinarum]
  misc_feature (10)..(334): Homolog of NCBI NO: 9964087 NR Description: cinnamoyl CoA reductase [Lolium perenne]
  misc_feature (11)..(334): Homolog of NCBI NO: 25989515 NR Description: cinnamoyl CoA reductase [Eucalyptus globulus]
  misc_feature (4)..(334): Homolog of NCBI NO: 17978549 NR Description: cinnamoyl-CoA reductase [Lolium perenne]
GKGVRSTGDIVNAMAGGGATVCVTGAGGFIASWVVKLLLSRGYTVHGTVRHLSDEKTGHLKRLENAAGNLRIFKADLLDYDAMAAAVVGCQGVFHVATPVPSEDLTDPELQMLGPAVTGTTNVLKAASSANVQRVVVVSSMVAVEISPKDWPEGKVRDERCWSDREFCRSIESWYPVAKIISEEAALAYGQQTGLDVVTINPGLVFGPMLQPTVNTTIQFLIYFLKGGPDPVKNKLWHIVDVRDVADAMLLLYEVPEATGRHICAPHVISARDLLDLLKSMYPDYPCIANESILDRDHPAPMTSDKLKKIGWSCRPLEETIVDTVECCLRAGFLDDVGGETSCRFPPLLNQI

SEQ ID NO: 8082 - protein, 339 aa, Zea mays subsp. mays
  peptide (1)..(339): Ceres Seq. ID no. 12386763
  misc_feature (8)..(194): Pfam Name: 3-beta hydroxysteroid dehydrogenase/isomerase family Pfam Description: 3-beta hydroxysteroid dehydrogenase/isomerase
  misc_feature (8)..(322): Homolog of NCBI NO: 15226134 NR Description: putative cinnamoyl-CoA reductase; protein id: supported by cDNA: 11254. [Arabidopsis thaliana]
  misc_feature (8)..(322): Homolog of NCBI NO: 15226135 NR Description: putative cinnamoyl-CoA reductase; protein id: supported by cDNA: gi_20260487 [Arabidopsis thaliana]
  misc_feature (8)..(321): Homolog of NCBI NO: 15223068 NR Description: putative cinnamoyl-CoA reductase; protein id:
  misc_feature (8)..(321): Homolog of NCBI NO: 6554472 NR Description: putative cinnamoyl-CoA reductase; 14056-15506
  misc_feature (2)..(329): Homolog of NCBI NO: 7431410 NR Description: cinnamoyl CoA reductase - maize
  misc_feature (2)..(329): Homolog of NCBI NO: 3242328 NR Description: cinnamoyl-CoA reductase [Zea mays]
  misc_feature (3)..(329): Homolog of NCBI NO: 3341511 NR Description: cinnamoyl-CoA reductase [Saccharum officinarum]
  misc_feature (1)..(321): Homolog of NCBI NO: 9964087 NR Description: cinnamoyl CoA reductase [Lolium perenne]
  misc_feature (1)..(321): Homolog of NCBI NO: 25989515 NR Description: cinnamoyl CoA reductase [Eucalyptus globulus]
  misc_feature (1)..(321): Homolog of NCBI NO: 17978549 NR Description: cinnamoyl-CoA reductase [Lolium perenne]
MAGGGATVCVTGAGGFIASWVVKLLLSRGYTVHGTVRHLSDEKTGHLKRLENAAGNLRIFKADLLDYDAMAAAVVGCQGVFHVATPVPSEDLTDPELQMLGPAVTGTTNVLKAASSANVQRVVVVSSMVAVEISPKDWPEGKVRDERCWSDREFCRSIESWYPVAKIISEEAALAYGQQTGLDVVTINPGLVFGPMLQPTVNTTIQFLIYFLKGGPDPVKNKLWHIVDVRDVADAMLLLYEVPEATGRHICAPHVISARDLLDLLKSMYPDYPCIANESILDRDHPAPMTSDKLKKIGWSCRPLEETIVDTVECCLRAGFLDDVGGETSCRFPPLLNQI

SEQ ID NO: 8083 - protein, 270 aa, Zea mays subsp. mays
  peptide (1)..(270): Ceres Seq. ID no. 12386764
  misc_feature (1)..(125): Pfam Name: 3-beta hydroxysteroid dehydrogenase/isomerase family Pfam Description: 3-beta hydroxysteroid dehydrogenase/isomerase
  misc_feature (1)..(253): Homolog of NCBI NO: 15226134 NR Description: putative cinnamoyl-CoA reductase; protein id: supported by cDNA: 11254. [Arabidopsis thaliana]
  misc_feature (1)..(253): Homolog of NCBI NO: 15226135 NR Description: putative cinnamoyl-CoA reductase; protein id: supported by cDNA: gi_20260487 [Arabidopsis thaliana]
  misc_feature (1)..(252): Homolog of NCBI NO: 15223068 NR Description: putative cinnamoyl-CoA reductase; protein id:
  misc_feature (1)..(252): Homolog of NCBI NO: 6554472 NR Description: putative cinnamoyl-CoA reductase; 14056-15506
  misc_feature (1)..(260): Homolog of NCBI NO: 7431410 NR Description: cinnamoyl CoA reductase - maize
  misc_feature (1)..(260): Homolog of NCBI NO: 3242328 NR Description: cinnamoyl-CoA reductase [Zea mays]
  misc_feature (1)..(260): Homolog of NCBI NO: 3341511 NR Description: cinnamoyl-CoA reductase [Saccharum officinarum]
  misc_feature (1)..(252): Homolog of NCBI NO: 9964087 NR Description: cinnamoyl CoA reductase [Lolium perenne]
  misc_feature (1)..(252): Homolog of NCBI NO: 25989515 NR Description: cinnamoyl CoA reductase [Eucalyptus globulus]
  misc_feature (1)..(252): Homolog of NCBI NO: 17978549 NR Description: cinnamoyl-CoA reductase [Lolium perenne]
MAAAVVGCQGVFHVATPVPSEDLTDPELQMLGPAVTGTTNVLKAASSANVQRVVVVSSMVAVEISPKDWPEGKVRDERCWSDREFCRSIESWYPVAKIISEEAALAYGQQTGLDVVTINPGLVFGPMLQPTVNTTIQFLIYFLKGGPDPVKNKLWHIVDVRDVADAMLLLYEVPEATGRHICAPHVISARDLLDLLKSMYPDYPCIANESILDRDHPAPMTSDKLKKIGWSCRPLEETIVDTVECCLRAGFLDDVGGETSCRFPPLLNQI

SEQ ID NO: 8084 - DNA, 1116 bp, Zea mays subsp. mays
  misc_feature (1)..(1116): Ceres Seq. ID no. 12356519
  misc_feature: MA Experiment ID: 108504 Result: Up-regulated in Transcription
  misc_feature: MA Experiment 108504 PARAMETER Experiment Name: Zm_Drought_P Parameter: Age (day) Value: 8
  misc_feature: MA Experiment 108504 PARAMETER Experiment Name: Zm_Drought_P Parameter: Organism Value: Zea mays
  misc_feature: MA Experiment 108504 PARAMETER Experiment Name: Zm_Drought_P Parameter: Plant Line Value: 35A19
  misc_feature: MA Experiment 108504 PARAMETER Experiment Name: Zm_Drought_P Parameter: Timepoint (hr) Value: 12
  misc_feature: MA Experiment 108504 PARAMETER Experiment Name: Zm_Drought_P Parameter: Tissue Value: Aerial
  misc_feature: MA Experiment 108504 PARAMETER Experiment Name: Zm_Drought_P Parameter: Treatment Value: Drought vs. No Drought
  misc_feature: MA Experiment ID: 108527 Result: Up-regulated in Transcription
  misc_feature: MA Experiment 108527 PARAMETER Experiment Name: Zm_5mM_NO_P Parameter: Age (day) Value: 8
  misc_feature: MA Experiment 108527 PARAMETER Experiment Name: Zm_5mM_NO_P Parameter: Organism Value: Zea mays
  misc_feature: MA Experiment 108527 PARAMETER Experiment Name: Zm_5mM_NO_P Parameter: Plant Line Value: 35A19
  misc_feature: MA Experiment 108527 PARAMETER Experiment Name: Zm_5mM_NO_P Parameter: Timepoint (hr) Value: 6
  misc_feature: MA Experiment 108527 PARAMETER Experiment Name: Zm_5mM_NO_P Parameter: Tissue Value: Aerial
  misc_feature: MA Experiment 108527 PARAMETER Experiment Name: Zm_5mM_NO_P Parameter: Treatment Value: 5mM NO vs. No Treatment
  misc_feature: MA Experiment ID: 108528 Result: Down-regulated in Transcription
  misc_feature: MA Experiment 108528 PARAMETER Experiment Name: Zm_Imbibed_Seeds_P Parameter: Age (day) Value: 5 vs. 2
  misc_feature: MA Experiment 108528 PARAMETER Experiment Name: Zm_Imbibed_Seeds_P Parameter: Organism Value: Zea mays
  misc_feature: MA Experiment 108528 PARAMETER Experiment Name: Zm_Imbibed_Seeds_P Parameter: Plant Line Value: 35A19
  misc_feature: MA Experiment 108528 PARAMETER Experiment Name: Zm_Imbibed_Seeds_P Parameter: Tissue Value: Aerial vs. Embryo
  misc_feature: MA Experiment ID: 108529 Result: Up-regulated in Transcription
  misc_feature: MA Experiment 108529 PARAMETER Experiment Name: Zm_Imbibed_Seeds_P Parameter: Age (day) Value: 5 vs. 2
  misc_feature: MA Experiment 108529 PARAMETER Experiment Name: Zm_Imbibed_Seeds_P Parameter: Organism Value: Zea mays
  misc_feature: MA Experiment 108529 PARAMETER Experiment Name: Zm_Imbibed_Seeds_P Parameter: Plant Line Value: 35A19
  misc_feature: MA Experiment 108529 PARAMETER Experiment Name: Zm_Imbibed_Seeds_P Parameter: Tissue Value: Roots vs. Embryo
  misc_feature: MA Experiment ID: 108530 Result: Down-regulated in Transcription
  misc_feature: MA Experiment 108530 PARAMETER Experiment Name: Zm_Imbibed_Seeds_P Parameter: Age (day) Value: 6 vs. 2
  misc_feature: MA Experiment 108530 PARAMETER Experiment Name: Zm_Imbibed_Seeds_P Parameter: Organism Value: Zea mays
  misc_feature: MA Experiment 108530 PARAMETER Experiment Name: Zm_Imbibed_Seeds_P Parameter: Plant Line Value: 35A19
  misc_feature: MA Experiment 108530 PARAMETER Experiment Name: Zm_Imbibed_Seeds_P Parameter: Tissue Value: Aerial vs. Embryo
  misc_feature: MA Experiment ID: 108535 Result: Down-regulated in Transcription
  misc_feature: MA Experiment 108535 PARAMETER Experiment Name: Zm_Meristem_P Parameter: Age (day) Value: 8
  misc_feature: MA Experiment 108535 PARAMETER Experiment Name: Zm_Meristem_P Parameter: Organism Value: Zea mays
  misc_feature: MA Experiment 108535 PARAMETER Experiment Name: Zm_Meristem_P Parameter: Plant Line Value: 35A19
  misc_feature: MA Experiment 108535 PARAMETER Experiment Name: Zm_Meristem_P Parameter: Tissue Value: Root Meristem vs. Above Root Meristem
  misc_feature: MA Experiment ID: 108536 Result: Up-regulated in Transcription
  misc_feature: MA Experiment 108536 PARAMETER Experiment Name: Zm_Meristem_P Parameter: Age (day) Value: 8
  misc_feature: MA Experiment 108536 PARAMETER Experiment Name: Zm_Meristem_P Parameter: Organism Value: Zea mays
  misc_feature: MA Experiment 108536 PARAMETER Experiment Name: Zm_Meristem_P Parameter: Plant Line Value: 35A19
  misc_feature: MA Experiment 108536 PARAMETER Experiment Name: Zm_Meristem_P Parameter: Tissue Value: Shoot Meristem vs. Above Shoot Meristem
  misc_feature: MA Experiment ID: 108543 Result: Up-regulated in Transcription
  misc_feature: MA Experiment ID: 108545 Result: Down-regulated in Transcription
  misc_feature: MA Experiment 108545 PARAMETER Experiment Name: Zm_Imbibed_Seeds_P Parameter: Age (day) Value: 3 vs. 2
  misc_feature: MA Experiment 108545 PARAMETER Experiment Name: Zm_Imbibed_Seeds_P Parameter: Organism Value: Zea mays
  misc_feature: MA Experiment 108545 PARAMETER Experiment Name: Zm_Imbibed_Seeds_P Parameter: Plant Line Value: 35A19
  misc_feature: MA Experiment 108545 PARAMETER Experiment Name: Zm_Imbibed_Seeds_P Parameter: Tissue Value: Aerial vs. Embryo
  misc_feature: MA Experiment ID: 108546 Result: Up-regulated in Transcription
  misc_feature: MA Experiment 108546 PARAMETER Experiment Name: Zm_Imbibed_Seeds_P Parameter: Age (day) Value: 3 vs. 2
  misc_feature: MA Experiment 108546 PARAMETER Experiment Name: Zm_Imbibed_Seeds_P Parameter: Organism Value: Zea mays
  misc_feature: MA Experiment 108546 PARAMETER Experiment Name: Zm_Imbibed_Seeds_P Parameter: Plant Line Value: 35A19
  misc_feature: MA Experiment 108546 PARAMETER Experiment Name: Zm_Imbibed_Seeds_P Parameter: Tissue Value: Roots vs. Embryo
  misc_feature: MA Experiment ID: 108547 Result: Down-regulated in Transcription
  misc_feature: MA Experiment 108547 PARAMETER Experiment Name: Zm_Imbibed_Seeds_P Parameter: Age (day) Value: 4 vs. 2
  misc_feature: MA Experiment 108547 PARAMETER Experiment Name: Zm_Imbibed_Seeds_P Parameter: Organism Value: Zea mays
  misc_feature: MA Experiment 108547 PARAMETER Experiment Name: Zm_Imbibed_Seeds_P Parameter: Plant Line Value: 35A19
  misc_feature: MA Experiment 108547 PARAMETER Experiment Name: Zm_Imbibed_Seeds_P Parameter: Tissue Value: Aerial vs. Embryo
  misc_feature: MA Experiment ID: 108556 Result: Up-regulated in Transcription
  misc_feature: MA Experiment 108556 PARAMETER Experiment Name: Zm_Drought_P Parameter: Age (day) Value: 9
  misc_feature: MA Experiment 108556 PARAMETER Experiment Name: Zm_Drought_P Parameter: Organism Value: Zea mays
  misc_feature: MA Experiment 108556 PARAMETER Experiment Name: Zm_Drought_P Parameter: Plant Line Value: 35A19
  misc_feature: MA Experiment 108556 PARAMETER Experiment Name: Zm_Drought_P Parameter: Timepoint (hr) Value: 24
  misc_feature: MA Experiment 108556 PARAMETER Experiment Name: Zm_Drought_P Parameter: Tissue Value: Aerial
  misc_feature: MA Experiment 108556 PARAMETER Experiment Name: Zm_Drought_P Parameter: Treatment Value: Drought vs. No Drought
  misc_feature: MA Experiment ID: 108597 Result: Up-regulated in Transcription
  misc_feature: MA Experiment 108597 PARAMETER Experiment Name: Zm_100uM_ABA_P Parameter: Age (day) Value: 9
  misc_feature: MA Experiment 108597 PARAMETER Experiment Name: Zm_100uM_ABA_P Parameter: Organism Value: Zea mays
  misc_feature: MA Experiment 108597 PARAMETER Experiment Name: Zm_100uM_ABA_P Parameter: Plant Line Value: 35A19
  misc_feature: MA Experiment 108597 PARAMETER Experiment Name: Zm_100uM_ABA_P Parameter: Timepoint (hr) Value: 24
  misc_feature: MA Experiment 108597 PARAMETER Experiment Name: Zm_100uM_ABA_P Parameter: Tissue Value: Aerial
  misc_feature: MA Experiment 108597 PARAMETER Experiment Name: Zm_100uM_ABA_P Parameter: Treatment Value: 100uM ABA vs. No Treatment
  misc_feature: MA Experiment ID: 20000108 Result: Down-regulated in Transcription
  misc_feature: MA Experiment 20000108 PARAMETER Experiment Name: Zm_Root-Tips_P Parameter: Age (day) Value: 12
  misc_feature: MA Experiment 20000108 PARAMETER Experiment Name: Zm_Root-Tips_P Parameter: Organism Value: Zea mays
  misc_feature: MA Experiment 20000108 PARAMETER Experiment Name: Zm_Root-Tips_P Parameter: Tissue Value: Root tips vs. Root mid region    35
  misc_feature: MA Experiment 20000108 PARAMETER Experiment Name: Zm_Root-Tips_P Parameter: Tissue Value: Root tips vs. Root mid region   Sequence Listing-Misc Features (4)
  misc_feature: MA Experiment ID: 20000478 Result: Up-regulated in Transcription
  misc_feature: MA Experiment 20000478 PARAMETER Experiment Name: Zm_5mM_SA_P Parameter: Age (day) Value: 11
  misc_feature: MA Experiment 20000478 PARAMETER Experiment Name: Zm_5mM_SA_P Parameter: Organism Value: Zea mays
  misc_feature: MA Experiment 20000478 PARAMETER Experiment Name: Zm_5mM_SA_P Parameter: Plant Line Value: 35A19
  misc_feature: MA Experiment 20000478 PARAMETER Experiment Name: Zm_5mM_SA_P Parameter: Timepoint (hr) Value: 72
  misc_feature: MA Experiment 20000478 PARAMETER Experiment Name: Zm_5mM_SA_P Parameter: Tissue Value: Aerial
  misc_feature: MA Experiment 20000478 PARAMETER Experiment Name: Zm_5mM_SA_P Parameter: Treatment Value: 5mM SA vs. No Treatment
  misc_feature: MA Experiment ID: 20000479 Result: Up-regulated in Transcription
  misc_feature: MA Experiment 20000479 PARAMETER Experiment Name: Zm_Drought_P Parameter: Age (day) Value: 10
  misc_feature: MA Experiment 20000479 PARAMETER Experiment Name: Zm_Drought_P Parameter: Organism Value: Zea mays
  misc_feature: MA Experiment 20000479 PARAMETER Experiment Name: Zm_Drought_P Parameter: Plant Line Value: 35A19
  misc_feature: MA Experiment 20000479 PARAMETER Experiment Name: Zm_Drought_P Parameter: Timepoint (hr) Value: 48
  misc_feature: MA Experiment 20000479 PARAMETER Experiment Name: Zm_Drought_P Parameter: Tissue Value: Aerial
  misc_feature: MA Experiment 20000479 PARAMETER Experiment Name: Zm_Drought_P Parameter: Treatment Value: Drought vs. No Drought
  misc_feature: MA Experiment ID: 20000480 Result: Up-regulated in Transcription
  misc_feature: MA Experiment 20000480 PARAMETER Experiment Name: Zm_Drought_P Parameter: Age (day) Value: 11
  misc_feature: MA Experiment 20000480 PARAMETER Experiment Name: Zm_Drought_P Parameter: Organism Value: Zea mays
  misc_feature: MA Experiment 20000480 PARAMETER Experiment Name: Zm_Drought_P Parameter: Plant Line Value: 35A19
  misc_feature: MA Experiment 20000480 PARAMETER Experiment Name: Zm_Drought_P Parameter: Timepoint (hr) Value: 72
  misc_feature: MA Experiment 20000480 PARAMETER Experiment Name: Zm_Drought_P Parameter: Tissue Value: Aerial
  misc_feature: MA Experiment 20000480 PARAMETER Experiment Name: Zm_Drought_P Parameter: Treatment Value: Drought vs. No Drought
  misc_feature: MA Experiment ID: 20000630 Result: Up-regulated in Transcription
  misc_feature: MA Experiment 20000630 PARAMETER Experiment Name: Zm_Herbicide-Treatments_P Parameter: Timepoint (hr) Value: 4
  misc_feature: MA Experiment 20000630 PARAMETER Experiment Name: Zm_Herbicide-Treatments_P Parameter: Tissue Value: Aerial
  misc_feature: MA Experiment 20000630 PARAMETER Experiment Name: Zm_Herbicide-Treatments_P Parameter: Treatment Value: Roundup vs. No Treatment
aaaagaccaaaggatgtcgacaccaggagccccgagcctggccacgacagcggcggctgtcctgtgcgtcctggccgcggcgctcgcggtcacggtcgcgagcggccagcagtgcgggcagcaggccggcggcgcaacgtgccgcgactgcctctgctgcagccgcttcggcttttgcggcgacacctccgagtactgcggcgccgggtgccagagccagtgcaccggctgcggcccgcgtcccgcgggccccggcgtggcatccgtcgtgccgagagacctcttcgagcggctgctcctccaccgcaacgacgcggcgtgccctgcgcgcgggttctacacctacgacgcgttcctggccgccgcggccgcgttcccggccttcggcacgacgggcggcgacgagcagcggaaacgggaggtcgcggcgttcctgggccagacctcccacgagaccacgggcgggtggccgaccgcgcccgacgggcccttctcgtggggttactgcttcaagcaggagcgcaacccgccgtcggactactgcgagccgcggccgcagtggccgtgcgcgcccggcaagaagtacttcggccgcggccccatccagatctccttcaactacaactacggcccggcggggcgagccatcggcgtggacctcctcaacaacccggacctcgtcgcgacggaccccgtgatatccttcaagacagcgctgtggttctggatgaacgcgcgggacaacaagccgtcgtgccacgccgtgatcacggggcagtggacgcccacggctgcggacagggcggccggccggggcgcgccagggtacggcgtgatcaccaacatcatcaacggtgggatcgagtgcgggcacgggacggacccccgggtcaccgaccggattggcttctacaagcgctactgcgatgtcttccgcatcggctacgggagcaatctcgattgcgacggccagaggcccttcaatagcggactggcggttgaggtggcggcgcagtgaaaacgtgtgtgtgtgtgtgtgactgtgtgttgcttcgtcggtttgaataaatttcatgtaaaaaccggtgcttcatccgaaaataaggcactttacgt

SEQ ID NO: 8085 - protein, 338 aa, Zea mays subsp. mays
  peptide (1)..(338): Ceres Seq. ID no. 12356520
  misc_feature (36)..(74): Pfam Name: Chitin recognition protein Pfam Description: Chitin recognition protein
  misc_feature (14)..(332): Homolog of NCBI NO: 38261495 NR Description: chitinase [Oryza sativa]
  misc_feature (5)..(338): Homolog of NCBI NO: 481896 NR Description: chitinase (EC 3.2.1.14) - rice
  misc_feature (5)..(338): Homolog of NCBI NO: 1076740 NR Description: chitinase (EC 3.2.1.14) - rice
  misc_feature (14)..(334): Homolog of NCBI NO: 18146827 NR Description: chitinase 2 [Triticum aestivum]
  misc_feature (5)..(338): Homolog of NCBI NO: 7435364 NR Description: probable chitinase (EC 3.2.1.14) precursor - rice
  misc_feature (17)..(334): Homolog of NCBI NO: 38371990 NR Description: chitinase; BoCHI1 [Bambusa oldhamii]
  misc_feature (17)..(327): Homolog of NCBI NO: 11344587 NR Description: seed chitinase-a [Secale cereale]
  misc_feature (20)..(329): Homolog of NCBI NO: 6164588 NR Description: chitinase [Poa pratensis]
  misc_feature (11)..(334): Homolog of NCBI NO: 7435361 NR Description: probable chitinase (EC 3.2.1.14) - barley
  misc_feature (20)..(327): Homolog of NCBI NO: 12407647 NR Description: 31.7 kDa class I endochitinase-antifreeze protein
KDQRMSTPGAPSLATTAAAVLCVLAAALAVTVASGQQCGQQAGGATCRDCLCCSRFGFCGDTSEYCGAGCQSQCTGCGPRPAGPGVASVVPRDLFERLLLHRNDAACPARGFYTYDAFLAAAAAFPAFGTTGGDEQRKREVAAFLGQTSHETTGGWPTAPDGPFSWGYCFKQERNPPSDYCEPRPQWPCAPGKKYFGRGPIQISFNYNYGPAGRAIGVDLLNNPDLVATDPVISFKTALWFWMNARDNKPSCHAVITGQWTPTAADRAAGRGAPGYGVITNIINGGIECGHGTDPRVTDRIGFYKRYCDVFRIGYGSNLDCDGQRPFNSGLAVEVAAQ

SEQ ID NO: 8086 - protein, 334 aa, Zea mays subsp. mays
  peptide (1)..(334): Ceres Seq. ID no. 12356521
  misc_feature (32)..(70): Pfam Name: Chitin recognition protein Pfam Description: Chitin recognition protein
  misc_feature (1)..(334): Homolog of NCBI NO: 481896 NR Description: chitinase (EC 3.2.1.14) - rice
  misc_feature (1)..(334): Homolog of NCBI NO: 1076740 NR Description: chitinase (EC 3.2.1.14) - rice
  misc_feature (10)..(330): Homolog of NCBI NO: 18146827 NR Description: chitinase 2 [Triticum aestivum]
  misc_feature (1)..(334): Homolog of NCBI NO: 7435364 NR Description: probable chitinase (EC 3.2.1.14) precursor - rice
  misc_feature (13)..(330): Homolog of NCBI NO: 38371990 NR Description: chitinase; BoCHI1 [Bambusa oldhamii]
  misc_feature (13)..(323): Homolog of NCBI NO: 11344587 NR Description: seed chitinase-a [Secale cereale]
  misc_feature (16)..(325): Homolog of NCBI NO: 6164588 NR Description: chitinase [Poa pratensis]
  misc_feature (7)..(330): Homolog of NCBI NO: 7435361 NR Description: probable chitinase (EC 3.2.1.14) - barley
  misc_feature (16)..(323): Homolog of NCBI NO: 12407647 NR Description: 31.7 kDa class I endochitinase-antifreeze protein
  misc_feature (10)..(328): Homolog of NCBI NO: 38261495 NR Description: chitinase [Oryza sativa]
MSTPGAPSLATTAAAVLCVLAAALAVTVASGQQCGQQAGGATCRDCLCCSRFGFCGDTSEYCGAGCQSQCTGCGPRPAGPGVASVVPRDLFERLLLHRNDAACPARGFYTYDAFLAAAAAFPAFGTTGGDEQRKREVAAFLGQTSHETTGGWPTAPDGPFSWGYCFKQERNPPSDYCEPRPQWPCAPGKKYFGRGPIQISFNYNYGPAGRAIGVDLLNNPDLVATDPVISFKTALWFWMNARDNKPSCHAVITGQWTPTAADRAAGRGAPGYGVITNIINGGIECGHGTDPRVTDRIGFYKRYCDVFRIGYGSNLDCDGQRPFNSGLAVEVAAQ

SEQ ID NO: 8087 - protein, 328 aa, Zea mays subsp. mays
  peptide (1)..(328): Ceres Seq. ID no. 12356522
KRPKDVDTRSPEPGHDSGGCPVRPGRGARGHGRERPAVRAAGRRRNVPRLPLLQPLRLLRRHLRVLRRRVPEPVHRLRPASRGPRRGIRRAERPLRAAAPPPQRRGVPCARVLHLRRVPGRRGRVPGLRHDGRRRAAETGGRGVPGPDLPRDHGRVADRARRALLVGLLLQAGAQPAVGLLRAAAAVAVRARQEVLRPRPHPDLLQLQLRPGGASHRRGPPQQPGPRRDGPRDILQDSAVVLDERAGQQAVVPRRDHGAVDAHGCGQGGRPGRARVRRDHQHHQRWDRVRARDGPPGHRPDWLLQALLRCLPHRLREQSRLRRPEALQ

SEQ ID NO: 8088 - DNA, 928 bp, Zea mays subsp. mays
  misc_feature (1)..(928): Ceres Seq. ID no. 12365717
  misc_feature: MA Experiment ID: 108528 Result: Up-regulated in Transcription
  misc_feature: MA Experiment 108528 PARAMETER Experiment Name: Zm_Imbibed_Seeds_P Parameter: Age (day) Value: 5 vs. 2
  misc_feature: MA Experiment 108528 PARAMETER Experiment Name: Zm_Imbibed_Seeds_P Parameter: Organism Value: Zea mays
  misc_feature: MA Experiment 108528 PARAMETER Experiment Name: Zm_Imbibed_Seeds_P Parameter: Plant Line Value: 35A19
  misc_feature: MA Experiment 108528 PARAMETER Experiment Name: Zm_Imbibed_Seeds_P Parameter: Tissue Value: Aerial vs. Embryo
  misc_feature: MA Experiment ID: 108529 Result: Down-regulated in Transcription
  misc_feature: MA Experiment 108529 PARAMETER Experiment Name: Zm_Imbibed_Seeds_P Parameter: Age (day) Value: 5 vs. 2
  misc_feature: MA Experiment 108529 PARAMETER Experiment Name: Zm_Imbibed_Seeds_P Parameter: Organism Value: Zea mays
  misc_feature: MA Experiment 108529 PARAMETER Experiment Name: Zm_Imbibed_Seeds_P Parameter: Plant Line Value: 35A19
  misc_feature: MA Experiment 108529 PARAMETER Experiment Name: Zm_Imbibed_Seeds_P Parameter: Tissue Value: Roots vs. Embryo
  misc_feature: MA Experiment ID: 108530 Result: Up-regulated in Transcription
  misc_feature: MA Experiment 108530 PARAMETER Experiment Name: Zm_Imbibed_Seeds_P Parameter: Age (day) Value: 6 vs. 2
  misc_feature: MA Experiment 108530 PARAMETER Experiment Name: Zm_Imbibed_Seeds_P Parameter: Organism Value: Zea mays
  misc_feature: MA Experiment 108530 PARAMETER Experiment Name: Zm_Imbibed_Seeds_P Parameter: Plant Line Value: 35A19
  misc_feature: MA Experiment 108530 PARAMETER Experiment Name: Zm_Imbibed_Seeds_P Parameter: Tissue Value: Aerial vs. Embryo
  misc_feature: MA Experiment ID: 108536 Result: Down-regulated in Transcription
  misc_feature: MA Experiment 108536 PARAMETER Experiment Name: Zm_Meristem_P Parameter: Age (day) Value: 8
  misc_feature: MA Experiment 108536 PARAMETER Experiment Name: Zm_Meristem_P Parameter: Organism Value: Zea mays
  misc_feature: MA Experiment 108536 PARAMETER Experiment Name: Zm_Meristem_P Parameter: Plant Line Value: 35A19
  misc_feature: MA Experiment 108536 PARAMETER Experiment Name: Zm_Meristem_P Parameter: Tissue Value: Shoot Meristem vs. Above Shoot Meristem
  misc_feature: MA Experiment ID: 108543 Result: Up-regulated in Transcription
  misc_feature: MA Experiment ID: 108545 Result: Up-regulated in Transcription
  misc_feature: MA Experiment 108545 PARAMETER Experiment Name: Zm_Imbibed_Seeds_P Parameter: Age (day) Value: 3 vs. 2
  misc_feature: MA Experiment 108545 PARAMETER Experiment Name: Zm_Imbibed_Seeds_P Parameter: Organism Value: Zea mays
  misc_feature: MA Experiment 108545 PARAMETER Experiment Name: Zm_Imbibed_Seeds_P Parameter: Plant Line Value: 35A19
  misc_feature: MA Experiment 108545 PARAMETER Experiment Name: Zm_Imbibed_Seeds_P Parameter: Tissue Value: Aerial vs. Embryo
  misc_feature: MA Experiment ID: 108546 Result: Down-regulated in Transcription
  misc_feature: MA Experiment 108546 PARAMETER Experiment Name: Zm_Imbibed_Seeds_P Parameter: Age (day) Value: 3 vs. 2
  misc_feature: MA Experiment 108546 PARAMETER Experiment Name: Zm_Imbibed_Seeds_P Parameter: Organism Value: Zea mays
  misc_feature: MA Experiment 108546 PARAMETER Experiment Name: Zm_Imbibed_Seeds_P Parameter: Plant Line Value: 35A19
  misc_feature: MA Experiment 108546 PARAMETER Experiment Name: Zm_Imbibed_Seeds_P Parameter: Tissue Value: Roots vs. Embryo
  misc_feature: MA Experiment ID: 108547 Result: Up-regulated in Transcription
  misc_feature: MA Experiment 108547 PARAMETER Experiment Name: Zm_Imbibed_Seeds_P Parameter: Age (day) Value: 4 vs. 2
  misc_feature: MA Experiment 108547 PARAMETER Experiment Name: Zm_Imbibed_Seeds_P Parameter: Organism Value: Zea mays
  misc_feature: MA Experiment 108547 PARAMETER Experiment Name: Zm_Imbibed_Seeds_P Parameter: Plant Line Value: 35A19
  misc_feature: MA Experiment 108547 PARAMETER Experiment Name: Zm_Imbibed_Seeds_P Parameter: Tissue Value: Aerial vs. Embryo
  misc_feature: MA Experiment ID: 108687 Result: Down-regulated in Transcription
  misc_feature: MA Experiment 108687 PARAMETER Experiment Name: Zm_Embryos-Flowers__P Parameter: Tissue Value: Embryo vs. Aerial+
  misc_feature: MA Experiment ID: 108688 Result: Down-regulated in Transcription
  misc_feature: MA Experiment 108688 PARAMETER Experiment Name: Zm_Embryos-Flowers__P Parameter: Tissue Value: Immature Flowers vs. Aerial+
  misc_feature: MA Experiment ID: 108689 Result: Down-regulated in Transcription
  misc_feature: MA Experiment 108689 PARAMETER Experiment Name: Zm_Drought_Roots_P Parameter: Age (day) Value: 9
  misc_feature: MA Experiment 108689 PARAMETER Experiment Name: Zm_Drought_Roots_P Parameter: Organism Value: Zea mays
  misc_feature: MA Experiment 108689 PARAMETER Experiment Name: Zm_Drought_Roots_P Parameter: Plant Line Value: 35A19
  misc_feature: MA Experiment 108689 PARAMETER Experiment Name: Zm_Drought_Roots_P Parameter: Timepoint (hr) Value: 24
  misc_feature: MA Experiment 108689 PARAMETER Experiment Name: Zm_Drought_Roots_P Parameter: Tissue Value: Roots
  misc_feature: MA Experiment 108689 PARAMETER Experiment Name: Zm_Drought_Roots_P Parameter: Treatment Value: Drought vs. No Drought
  misc_feature: MA Experiment ID: 20000479 Result: Down-regulated in Transcription
  misc_feature: MA Experiment 20000479 PARAMETER Experiment Name: Zm_Drought_P Parameter: Age (day) Value: 10
  misc_feature: MA Experiment 20000479 PARAMETER Experiment Name: Zm_Drought_P Parameter: Organism Value: Zea mays
  misc_feature: MA Experiment 20000479 PARAMETER Experiment Name: Zm_Drought_P Parameter: Plant Line Value: 35A19
  misc_feature: MA Experiment 20000479 PARAMETER Experiment Name: Zm_Drought_P Parameter: Timepoint (hr) Value: 48
  misc_feature: MA Experiment 20000479 PARAMETER Experiment Name: Zm_Drought_P Parameter: Tissue Value: Aerial
  misc_feature: MA Experiment 20000479 PARAMETER Experiment Name: Zm_Drought_P Parameter: Treatment Value: Drought vs. No Drought
  misc_feature: MA Experiment ID: 20000480 Result: Down-regulated in Transcription
  misc_feature: MA Experiment 20000480 PARAMETER Experiment Name: Zm_Drought_P Parameter: Age (day) Value: 11
  misc_feature: MA Experiment 20000480 PARAMETER Experiment Name: Zm_Drought_P Parameter: Organism Value: Zea mays
  misc_feature: MA Experiment 20000480 PARAMETER Experiment Name: Zm_Drought_P Parameter: Plant Line Value: 35A19
  misc_feature: MA Experiment 20000480 PARAMETER Experiment Name: Zm_Drought_P Parameter: Timepoint (hr) Value: 72
  misc_feature: MA Experiment 20000480 PARAMETER Experiment Name: Zm_Drought_P Parameter: Tissue Value: Aerial
  misc_feature: MA Experiment 20000480 PARAMETER Experiment Name: Zm_Drought_P Parameter: Treatment Value: Drought vs. No Drought
  misc_feature: MA Experiment ID: 20000488 Result: Up-regulated in Transcription
  misc_feature: MA Experiment 20000488 PARAMETER Experiment Name: Zm_50mM_NH4NO3_L_to_H_P Parameter: Organism Value: Zea mays
  misc_feature: MA Experiment 20000488 PARAMETER Experiment Name: Zm_50mM_NH4NO3_L_to_H_P Parameter: Timepoint (hr) Value: 8
  misc_feature: MA Experiment 20000488 PARAMETER Experiment Name: Zm_50mM_NH4NO3_L_to_H_P Parameter: Tissue Value: Leaves
  misc_feature: MA Experiment 20000488 PARAMETER Experiment Name: Zm_50mM_NH4NO3_L_to_H_P Parameter: Treatment Value: 50mM NH4NO3 vs. 100mM Mannitol
  misc_feature: MA Experiment ID: 20000492 Result: Up-regulated in Transcription
  misc_feature: MA Experiment 20000492 PARAMETER Experiment Name: Zm_Hybrid_Seed_Dev_P Parameter: DAP Value: 12
  misc_feature: MA Experiment 20000492 PARAMETER Experiment Name: Zm_Hybrid_Seed_Dev_P Parameter: Organism Value: Zea mays
  misc_feature: MA Experiment 20000492 PARAMETER Experiment Name: Zm_Hybrid_Seed_Dev_P Parameter: Plant Line Value: 35A19
  misc_feature: MA Experiment 20000492 PARAMETER Experiment Name: Zm_Hybrid_Seed_Dev_P Parameter: Tissue Value: Fert Kernel vs. Unfert Floret
  misc_feature: MA Experiment ID: 20000535 Result: Down-regulated in Transcription
  misc_feature: MA Experiment 20000535 PARAMETER Experiment Name: Zm_Hybrid_Seed_Dev_P Parameter: DAP Value: 30 vs. 12
  misc_feature: MA Experiment 20000535 PARAMETER Experiment Name: Zm_Hybrid_Seed_Dev_P Parameter: Organism Value: Zea mays
  misc_feature: MA Experiment 20000535 PARAMETER Experiment Name: Zm_Hybrid_Seed_Dev_P Parameter: Plant Line Value: 35A19
  misc_feature: MA Experiment 20000535 PARAMETER Experiment Name: Zm_Hybrid_Seed_Dev_P Parameter: Tissue Value: Embryo vs. Unfert Floret
  misc_feature: MA Experiment ID: 20000626 Result: Down-regulated in Transcription
  misc_feature: MA Experiment 20000626 PARAMETER Experiment Name: Zm_Herbicide-Treatments_P Parameter: Timepoint (hr) Value: 12
  misc_feature: MA Experiment 20000626 PARAMETER Experiment Name: Zm_Herbicide-Treatments_P Parameter: Tissue Value: Aerial
  misc_feature: MA Experiment 20000626 PARAMETER Experiment Name: Zm_Herbicide-Treatments_P Parameter: Treatment Value: Roundup vs. No Treatment
  misc_feature: MA Experiment ID: 20001608 Result: Up-regulated in Transcription
  misc_feature: MA Experiment 20001608 PARAMETER Experiment Name: Zm_50ppm_KNO3_L-to-H_P Parameter: Age (day) Value: 21
  misc_feature: MA Experiment 20001608 PARAMETER Experiment Name: Zm_50ppm_KNO3_L-to-H_P Parameter: Organism Value: Zea mays
  misc_feature: MA Experiment 20001608 PARAMETER Experiment Name: Zm_50ppm_KNO3_L-to-H_P Parameter: Plant Line Value: 35A19
  misc_feature: MA Experiment 20001608 PARAMETER Experiment Name: Zm_50ppm_KNO3_L-to-H_P Parameter: Timepoint (hr) Value: 48
  misc_feature: MA Experiment 20001608 PARAMETER Experiment Name: Zm_50ppm_KNO3_L-to-H_P Parameter: Tissue Value: Shoots
  misc_feature: MA Experiment 20001608 PARAMETER Experiment Name: Zm_50ppm_KNO3_L-to-H_P Parameter: Treatment Value: 50ppm KNO3 vs. 50ppm KCl
ccttctatcctctccggcacgagccgtccagttcagttcacctcggtccgggaccgcgactacaccgacggcggcgcgtccgagcccagccgacgccgagccaatggtgactccagcgacattctccctccgccccagcgcgccccccgcgccgcctcgtgccgggctgccccgcgctcgggcctgtttcgcgcccgccatccgcacctccccttccgtcgccttttcctaccagcctcggcgcttcagtggcatccgccgcgccgtggccgtcgactccgagcagggctcccccgagtctccagagcaggagaagaagcccaagacgtactacttcctggtggcaaacgccaagttcatgctggacgaggaggagcatttccaggagcaactcgccgagaagctgcgcaactacgccgagcgcgacaaggagcaggacttctggctcgtcgtggagcccaagttcctcgacaggttccccaacatcaccaagcgcctcaagcgccccgccgtcgcgcttgtctccaccgacggcaactggatcacattcatgaagttaaggctagacagggtcttacaagaccagttcgacgcagaatcagttgaagaggcattggcttctaaccctgttgagttgaaatttgagaagcctgagaaatggacagctccgtaccctaaatatgggtttggatggtgggaacccttcttgcctccaaagttcagcaatggtacggcatagagataagcagcaatccctatgaggcatgtaagattactcccctgtaagtgatgaatgtaattttaattttgatgatgaggatgtagtacttgaggttgtaccagtacagttagttgaattagttgcacagtttttgtaataccaaataatcagctgttttattttatttgagaaagtcgtggttctgtt

SEQ ID NO: 8089 - protein, 245 aa, Zea mays subsp. mays
  peptide (1)..(245): Ceres Seq. ID no. 12365718
  misc_feature (69)..(237): Homolog of NCBI NO: 15237144 NR Description: similar to unknown protein (sp|P72777); protein At5g58250.1 [Arabidopsis thaliana] >gi|8777326|dbj|BAA96916.1|
  misc_feature (102)..(207): Homolog of NCBI NO: 23129763 NR Description: hypothetical protein [Nostoc punctiforme]
  misc_feature (108)..(208): Homolog of NCBI NO: 23042740 NR Description: hypothetical protein [Trichodesmium erythraeum
  misc_feature (106)..(207): Homolog of NCBI NO: 17227712 NR Description: hypothetical protein [Nostoc sp. PCC 7120]
  misc_feature (109)..(207): Homolog of NCBI NO: 22299042 NR Description: ORF_ID:tll1499~hypothetical protein
  misc_feature (110)..(207): Homolog of NCBI NO: 33865445 NR Description: conserved hypothetical protein [Synechococcus sp.
  misc_feature (109)..(207): Homolog of NCBI NO: 16329384 NR Description: hypothetical protein [Synechocystis sp. PCC 6803]
  misc_feature (109)..(202): Homolog of NCBI NO: 33861662 NR Description: conserved hypothetical protein [Prochlorococcus subsp. pastoris str. CCMP1378] >gi|33640030|emb|CAE19565.1| hypothetical protein [Prochlorococcus marinus subsp. pastoris
  misc_feature (108)..(200): Homolog of NCBI NO: 37520451 NR Description: hypothetical protein [Gloeobacter violaceus]
  misc_feature (109)..(197): Homolog of NCBI NO: 11465670 NR Description: ORF108 [Porphyra purpurea] HYPOTHETICAL 12.7 KD PROTEIN YCF54 (ORF108)
LLSSPARAVQFSSPRSGTATTPTAARPSPADAEPMVTPATFSLRPSAPPAPPRAGLPRARACFAPAIRTSPSVAFSYQPRRFSGIRRAVAVDSEQGSPESPEQEKKPKTYYFLVANAKFMLDEEEHFQEQLAEKLRNYAERDKEQDFWLVVEPKFLDRFPNITKRLKRPAVALVSTDGNWITFMKLRLDRVLQDQFDAESVEEALASNPVELKFEKPEKWTAPYPKYGFGWWEPFLPPKFSNGTA

SEQ ID NO: 8090 - protein, 211 aa, Zea mays subsp. mays
  peptide (1)..(211): Ceres Seq. ID no. 12365719
  misc_feature (35)..(203): Homolog of NCBI NO: 15237144 NR Description: similar to unknown protein (sp|P72777); protein At5g58250.1 [Arabidopsis thaliana] >gi|8777326|dbj|BAA96916.1|
  misc_feature (68)..(173): Homolog of NCBI NO: 23129763 NR Description: hypothetical protein [Nostoc punctiforme]
  misc_feature (74)..(174): Homolog of NCBI NO: 23042740 NR Description: hypothetical protein [Trichodesmium erythraeum
  misc_feature (72)..(173): Homolog of NCBI NO: 17227712 NR Description: hypothetical protein [Nostoc sp. PCC 7120]
  misc_feature (75)..(173): Homolog of NCBI NO: 22299042 NR Description: ORF_ID:tll1499~hypothetical protein
  misc_feature (76)..(173): Homolog of NCBI NO: 33865445 NR Description: conserved hypothetical protein [Synechococcus sp.
  misc_feature (75)..(173): Homolog of NCBI NO: 16329384 NR Description: hypothetical protein [Synechocystis sp. PCC 6803]
  misc_feature (75)..(168): Homolog of NCBI NO: 33861662 NR Description: conserved hypothetical protein [Prochlorococcus subsp. pastoris str. CCMP1378] >gi|33640030|emb|CAE19565.1| hypothetical protein [Prochlorococcus marinus subsp. pastoris
  misc_feature (74)..(166): Homolog of NCBI NO: 37520451 NR Description: hypothetical protein [Gloeobacter violaceus]
  misc_feature (75)..(163): Homolog of NCBI NO: 11465670 NR Description: ORF108 [Porphyra purpurea] HYPOTHETICAL 12.7 KD PROTEIN YCF54 (ORF108)
MVTPATFSLRPSAPPAPPRAGLPRARACFAPAIRTSPSVAFSYQPRRFSGIRRAVAVDSEQGSPESPEQEKKPKTYYFLVANAKFMLDEEEHFQEQLAEKLRNYAERDKEQDFWLVVEPKFLDRFPNITKRLKRPAVALVSTDGNWITFMKLRLDRVLQDQFDAESVEEALASNPVELKFEKPEKWTAPYPKYGFGWWEPFLPPKFSNGTA

SEQ ID NO: 8091 - protein, 201 aa, Zea mays subsp. mays
  peptide (1)..(201): Ceres Seq. ID no. 12365720
PSILSGTSRPVQFTSVRDRDYTDGGASEPSRRRANGDSSDILPPPQRAPRAASCRAAPRSGLFRARHPHLPFRRLFLPASALQWHPPRRGRRLRAGLPRVSRAGEEAQDVLLPGGKRQVHAGRGGAFPGATRREAAQLRRARQGAGLLARRGAQVPRQVPQHHQAPQAPRRRACLHRRQLDHIHEVKARQGLTRPVRRRIS

SEQ ID NO: 8092 - DNA, 795 bp, Zea mays subsp. mays
  misc_feature (1)..(795): Ceres Seq. ID no. 12403108
  misc_feature: MA Experiment ID: 108523 Result: Down-regulated in Transcription
  misc_feature: MA Experiment 108523 PARAMETER Experiment Name: Zm_42deg_Heat_P Parameter: Age (day) Value: 8
  misc_feature: MA Experiment 108523 PARAMETER Experiment Name: Zm_42deg_Heat_P Parameter: Organism Value: Zea mays
  misc_feature: MA Experiment 108523 PARAMETER Experiment Name: Zm_42deg_Heat_P Parameter: Plant Line Value: 35A19
  misc_feature: MA Experiment 108523 PARAMETER Experiment Name: Zm_42deg_Heat_P Parameter: Temperature (deg C) Value: 42 vs. 22
  misc_feature: MA Experiment 108523 PARAMETER Experiment Name: Zm_42deg_Heat_P Parameter: Timepoint (hr) Value: 6
  misc_feature: MA Experiment 108523 PARAMETER Experiment Name: Zm_42deg_Heat_P Parameter: Tissue Value: Aerial
  misc_feature: MA Experiment ID: 108527 Result: Up-regulated in Transcription
  misc_feature: MA Experiment 108527 PARAMETER Experiment Name: Zm_5mM_NO_P Parameter: Age (day) Value: 8
  misc_feature: MA Experiment 108527 PARAMETER Experiment Name: Zm_5mM_NO_P Parameter: Organism Value: Zea mays
  misc_feature: MA Experiment 108527 PARAMETER Experiment Name: Zm_5mM_NO_P Parameter: Plant Line Value: 35A19
  misc_feature: MA Experiment 108527 PARAMETER Experiment Name: Zm_5mM_NO_P Parameter: Timepoint (hr) Value: 6
  misc_feature: MA Experiment 108527 PARAMETER Experiment Name: Zm_5mM_NO_P Parameter: Tissue Value: Aerial
  misc_feature: MA Experiment 108527 PARAMETER Experiment Name: Zm_5mM_NO_P Parameter: Treatment Value: 5mM NO vs. No Treatment
  misc_feature: MA Experiment ID: 108528 Result: Down-regulated in Transcription
  misc_feature: MA Experiment 108528 PARAMETER Experiment Name: Zm_Imbibed_Seeds_P Parameter: Age (day) Value: 5 vs. 2
  misc_feature: MA Experiment 108528 PARAMETER Experiment Name: Zm_Imbibed_Seeds_P Parameter: Organism Value: Zea mays
  misc_feature: MA Experiment 108528 PARAMETER Experiment Name: Zm_Imbibed_Seeds_P Parameter: Plant Line Value: 35A19
  misc_feature: MA Experiment 108528 PARAMETER Experiment Name: Zm_Imbibed_Seeds_P Parameter: Tissue Value: Aerial vs. Embryo
  misc_feature: MA Experiment ID: 108530 Result: Down-regulated in Transcription
  misc_feature: MA Experiment 108530 PARAMETER Experiment Name: Zm_Imbibed_Seeds_P Parameter: Age (day) Value: 6 vs. 2
  misc_feature: MA Experiment 108530 PARAMETER Experiment Name: Zm_Imbibed_Seeds_P Parameter: Organism Value: Zea mays
  misc_feature: MA Experiment 108530 PARAMETER Experiment Name: Zm_Imbibed_Seeds_P Parameter: Plant Line Value: 35A19
  misc_feature: MA Experiment 108530 PARAMETER Experiment Name: Zm_Imbibed_Seeds_P Parameter: Tissue Value: Aerial vs. Embryo
  misc_feature: MA Experiment ID: 108535 Result: Down-regulated in Transcription
  misc_feature: MA Experiment 108535 PARAMETER Experiment Name: Zm_Meristem_P Parameter: Age (day) Value: 8
  misc_feature: MA Experiment 108535 PARAMETER Experiment Name: Zm_Meristem_P Parameter: Organism Value: Zea mays
  misc_feature: MA Experiment 108535 PARAMETER Experiment Name: Zm_Meristem_P Parameter: Plant Line Value: 35A19
  misc_feature: MA Experiment 108535 PARAMETER Experiment Name: Zm_Meristem_P Parameter: Tissue Value: Root Meristem vs. Above Root Meristem
  misc_feature: MA Experiment ID: 108536 Result: Up-regulated in Transcription
  misc_feature: MA Experiment 108536 PARAMETER Experiment Name: Zm_Meristem_P Parameter: Age (day) Value: 8
  misc_feature: MA Experiment 108536 PARAMETER Experiment Name: Zm_Meristem_P Parameter: Organism Value: Zea mays
  misc_feature: MA Experiment 108536 PARAMETER Experiment Name: Zm_Meristem_P Parameter: Plant Line Value: 35A19
  misc_feature: MA Experiment 108536 PARAMETER Experiment Name: Zm_Meristem_P Parameter: Tissue Value: Shoot Meristem vs. Above Shoot Meristem
  misc_feature: MA Experiment ID: 108543 Result: Down-regulated in Transcription
  misc_feature: MA Experiment ID: 108545 Result: Down-regulated in Transcription
  misc_feature: MA Experiment 108545 PARAMETER Experiment Name: Zm_Imbibed_Seeds_P Parameter: Age (day) Value: 3 vs. 2
  misc_feature: MA Experiment 108545 PARAMETER Experiment Name: Zm_Imbibed_Seeds_P Parameter: Organism Value: Zea mays
  misc_feature: MA Experiment 108545 PARAMETER Experiment Name: Zm_Imbibed_Seeds_P Parameter: Plant Line Value: 35A19
  misc_feature: MA Experiment 108545 PARAMETER Experiment Name: Zm_Imbibed_Seeds_P Parameter: Tissue Value: Aerial vs. Embryo
  misc_feature: MA Experiment ID: 108547 Result: Down-regulated in Transcription
  misc_feature: MA Experiment 108547 PARAMETER Experiment Name: Zm_Imbibed_Seeds_P Parameter: Age (day) Value: 4 vs. 2
  misc_feature: MA Experiment 108547 PARAMETER Experiment Name: Zm_Imbibed_Seeds_P Parameter: Organism Value: Zea mays
  misc_feature: MA Experiment 108547 PARAMETER Experiment Name: Zm_Imbibed_Seeds_P Parameter: Plant Line Value: 35A19
  misc_feature: MA Experiment 108547 PARAMETER Experiment Name: Zm_Imbibed_Seeds_P Parameter: Tissue Value: Aerial vs. Embryo
  misc_feature: MA Experiment ID: 108559 Result: Up-regulated in Transcription
  misc_feature: MA Experiment 108559 PARAMETER Experiment Name: Zm_5mM_NO_P Parameter: Age (day) Value: 8
  misc_feature: MA Experiment 108559 PARAMETER Experiment Name: Zm_5mM_NO_P Parameter: Organism Value: Zea mays
  misc_feature: MA Experiment 108559 PARAMETER Experiment Name: Zm_5mM_NO_P Parameter: Plant Line Value: 35A19
  misc_feature: MA Experiment 108559 PARAMETER Experiment Name: Zm_5mM_NO_P Parameter: Timepoint (hr) Value: 12
  misc_feature: MA Experiment 108559 PARAMETER Experiment Name: Zm_5mM_NO_P Parameter: Tissue Value: Aerial
  misc_feature: MA Experiment 108559 PARAMETER Experiment Name: Zm_5mM_NO_P Parameter: Treatment Value: 5mM NO vs. No Treatment
  misc_feature: MA Experiment ID: 108688 Result: Down-regulated in Transcription
  misc_feature: MA Experiment 108688 PARAMETER Experiment Name: Zm_Embryos-Flowers__P Parameter: Tissue Value: Immature Flowers vs. Aerial+
  misc_feature: MA Experiment ID: 20000108 Result: Down-regulated in Transcription
  misc_feature: MA Experiment 20000108 PARAMETER Experiment Name: Zm_Root-Tips_P Parameter: Age (day) Value: 12
  misc_feature: MA Experiment 20000108 PARAMETER Experiment Name: Zm_Root-Tips_P Parameter: Organism Value: Zea mays
  misc_feature: MA Experiment 20000108 PARAMETER Experiment Name: Zm_Root-Tips_P Parameter: Tissue Value: Root tips vs. Root mid region    35
  misc_feature: MA Experiment 20000108 PARAMETER Experiment Name: Zm_Root-Tips_P Parameter: Tissue Value: Root tips vs. Root mid region   Sequence Listing-Misc Features (4)
  misc_feature: MA Experiment ID: 20000477 Result: Up-regulated in Transcription
  misc_feature: MA Experiment 20000477 PARAMETER Experiment Name: Zm_5mM_SA_P Parameter: Age (day) Value: 10
  misc_feature: MA Experiment 20000477 PARAMETER Experiment Name: Zm_5mM_SA_P Parameter: Organism Value: Zea mays
  misc_feature: MA Experiment 20000477 PARAMETER Experiment Name: Zm_5mM_SA_P Parameter: Plant Line Value: 35A19
  misc_feature: MA Experiment 20000477 PARAMETER Experiment Name: Zm_5mM_SA_P Parameter: Timepoint (hr) Value: 48
  misc_feature: MA Experiment 20000477 PARAMETER Experiment Name: Zm_5mM_SA_P Parameter: Tissue Value: Aerial
  misc_feature: MA Experiment 20000477 PARAMETER Experiment Name: Zm_5mM_SA_P Parameter: Treatment Value: 5mM SA vs. No Treatment
  misc_feature: MA Experiment ID: 20000478 Result: Up-regulated in Transcription
  misc_feature: MA Experiment 20000478 PARAMETER Experiment Name: Zm_5mM_SA_P Parameter: Age (day) Value: 11
  misc_feature: MA Experiment 20000478 PARAMETER Experiment Name: Zm_5mM_SA_P Parameter: Organism Value: Zea mays
  misc_feature: MA Experiment 20000478 PARAMETER Experiment Name: Zm_5mM_SA_P Parameter: Plant Line Value: 35A19
  misc_feature: MA Experiment 20000478 PARAMETER Experiment Name: Zm_5mM_SA_P Parameter: Timepoint (hr) Value: 72
  misc_feature: MA Experiment 20000478 PARAMETER Experiment Name: Zm_5mM_SA_P Parameter: Tissue Value: Aerial
  misc_feature: MA Experiment 20000478 PARAMETER Experiment Name: Zm_5mM_SA_P Parameter: Treatment Value: 5mM SA vs. No Treatment
  misc_feature: MA Experiment ID: 20000480 Result: Up-regulated in Transcription
  misc_feature: MA Experiment 20000480 PARAMETER Experiment Name: Zm_Drought_P Parameter: Age (day) Value: 11
  misc_feature: MA Experiment 20000480 PARAMETER Experiment Name: Zm_Drought_P Parameter: Organism Value: Zea mays
  misc_feature: MA Experiment 20000480 PARAMETER Experiment Name: Zm_Drought_P Parameter: Plant Line Value: 35A19
  misc_feature: MA Experiment 20000480 PARAMETER Experiment Name: Zm_Drought_P Parameter: Timepoint (hr) Value: 72
  misc_feature: MA Experiment 20000480 PARAMETER Experiment Name: Zm_Drought_P Parameter: Tissue Value: Aerial
  misc_feature: MA Experiment 20000480 PARAMETER Experiment Name: Zm_Drought_P Parameter: Treatment Value: Drought vs. No Drought
  misc_feature: MA Experiment ID: 20000532 Result: Up-regulated in Transcription
  misc_feature: MA Experiment 20000532 PARAMETER Experiment Name: Zm_0.001percent_MeJA_P Parameter: Age (day) Value: 10
  misc_feature: MA Experiment 20000532 PARAMETER Experiment Name: Zm_0.001percent_MeJA_P Parameter: Organism Value: Zea mays
  misc_feature: MA Experiment 20000532 PARAMETER Experiment Name: Zm_0.001percent_MeJA_P Parameter: Plant Line Value: 35A19
  misc_feature: MA Experiment 20000532 PARAMETER Experiment Name: Zm_0.001percent_MeJA_P Parameter: Timepoint (hr) Value: 48
  misc_feature: MA Experiment 20000532 PARAMETER Experiment Name: Zm_0.001percent_MeJA_P Parameter: Tissue Value: Aerial
  misc_feature: MA Experiment 20000532 PARAMETER Experiment Name: Zm_0.001percent_MeJA_P Parameter: Treatment Value: 0.001percent MeJA vs. No Treatment
  misc_feature: MA Experiment ID: 20000534 Result: Down-regulated in Transcription
  misc_feature: MA Experiment 20000534 PARAMETER Experiment Name: Zm_Hybrid_Pollen_P Parameter: Age (day) Value: 8
  misc_feature: MA Experiment 20000534 PARAMETER Experiment Name: Zm_Hybrid_Pollen_P Parameter: Organism Value: Zea mays
  misc_feature: MA Experiment 20000534 PARAMETER Experiment Name: Zm_Hybrid_Pollen_P Parameter: Plant Line Value: 35A19
  misc_feature: MA Experiment 20000534 PARAMETER Experiment Name: Zm_Hybrid_Pollen_P Parameter: Tissue Value: Pollen vs. Aerial
  misc_feature: MA Experiment ID: 20000535 Result: Down-regulated in Transcription
  misc_feature: MA Experiment 20000535 PARAMETER Experiment Name: Zm_Hybrid_Seed_Dev_P Parameter: DAP Value: 30 vs. 12
  misc_feature: MA Experiment 20000535 PARAMETER Experiment Name: Zm_Hybrid_Seed_Dev_P Parameter: Organism Value: Zea mays
  misc_feature: MA Experiment 20000535 PARAMETER Experiment Name: Zm_Hybrid_Seed_Dev_P Parameter: Plant Line Value: 35A19
  misc_feature: MA Experiment 20000535 PARAMETER Experiment Name: Zm_Hybrid_Seed_Dev_P Parameter: Tissue Value: Embryo vs. Unfert Floret
  misc_feature: MA Experiment ID: 20000626 Result: Up-regulated in Transcription
  misc_feature: MA Experiment 20000626 PARAMETER Experiment Name: Zm_Herbicide-Treatments_P Parameter: Timepoint (hr) Value: 12
  misc_feature: MA Experiment 20000626 PARAMETER Experiment Name: Zm_Herbicide-Treatments_P Parameter: Tissue Value: Aerial
  misc_feature: MA Experiment 20000626 PARAMETER Experiment Name: Zm_Herbicide-Treatments_P Parameter: Treatment Value: Roundup vs. No Treatment
aacgcaagcagaagctacaatcctaaaaccatctgcttcagccttcagctagccccaagtttagtcggccgatcgatcactgaagtagtaatggcctccgccaacagctggaccctcgagatcgcgtcgccggtggctccgcagcgcctgttccgcgccgccgtgatggactggcacaccctggcgcccaaggtcgcctcccacgtcgtcgccagcgcgcagcccgtggagggcgacggcggcgttggcagcgtcaggcagttcaacttcacctcagtcatgccgttcagcttcatgaaggagaggctcgagttcctggacgcggacaagtgcgagtgcaagaacacgctcatcgagggcggcggcatcggcgtcgccatcgaaacggcgacgtcgcacatcaaggtggagcccgcggccggcggcgggagcgtggtgaaggtcgaatccacttacaagctgctgccgggcgtggaggtgaaggacgagatcgccaaggccaaggagtccgtcaccgccatcttcaagggtgccgaggcctacctcgtcgccaaccccgacgcctacaactaaaccattggactgggatgagcttcatttcccttccgtcttgtttggatatacaagggtattgtgtacggagattgggttttctttccccttcttttttgttttcatacaaaataaaataaagctgctctaaagcagcgtgcggtttttggactcgagatggtatgattatatatatgtacgtgctgtccttgtgttgtataccgtcatggttttctgtgtggg

SEQ ID NO: 8093 - protein, 190 aa, Zea mays subsp. mays
  peptide (1)..(190): Ceres Seq. ID no. 12403109
  misc_feature (32)..(185): Pfam Name: Pathogenesis-related protein Bet v I family Pfam Description: Pathogenesis-related protein Bet v I family
  misc_feature (31)..(190): Homolog of NCBI NO: 16589076 NR Description: pathogen-related protein [Oryza sativa]
  misc_feature (31)..(190): Homolog of NCBI NO: 7442203 NR Description: pathogenesis-related protein - sorghum
  misc_feature (33)..(189): Homolog of NCBI NO: 1572683 NR Description: early flowering protein 1 [Asparagus officinalis]
  misc_feature (37)..(189): Homolog of NCBI NO: 4325333 NR Description: intracellular pathogenesis-related protein PR-107
  misc_feature (36)..(189): Homolog of NCBI NO: 939857 NR Description: pathogenesis related protein [Asparagus
  misc_feature (33)..(189): Homolog of NCBI NO: 4210626 NR Description: intracellular pathogenesis-related protein,
  misc_feature (37)..(189): Homolog of NCBI NO: 6649902 NR Description: intracellular pathogenesis-related protein PR-105
  misc_feature (37)..(189): Homolog of NCBI NO: 6649904 NR Description: intracellular pathogenesis-related protein PR-106
  misc_feature (33)..(189): Homolog of NCBI NO: 548591 NR Description: Pathogenesis-related protein 1 (AOPR1)
  misc_feature (33)..(189): Homolog of NCBI NO: 4210624 NR Description: intracellular pathogenesis-related protein,
NASRSYNPKTICFSLQLAPSLVGRSITEVVMASANSWTLEIASPVAPQRLFRAAVMDWHTLAPKVASHVVASAQPVEGDGGVGSVRQFNFTSVMPFSFMKERLEFLDADKCECKNTLIEGGGIGVAIETATSHIKVEPAAGGGSVVKVESTYKLLPGVEVKDEIAKAKESVTAIFKGAEAYLVANPDAYN

SEQ ID NO: 8094 - protein, 160 aa, Zea mays subsp. mays
  peptide (1)..(160): Ceres Seq. ID no. 12403110
  misc_feature (2)..(155): Pfam Name: Pathogenesis-related protein Bet v I family Pfam Description: Pathogenesis-related protein Bet v I family
  misc_feature (1)..(160): Homolog of NCBI NO: 16589076 NR Description: pathogen-related protein [Oryza sativa]
  misc_feature (1)..(160): Homolog of NCBI NO: 7442203 NR Description: pathogenesis-related protein - sorghum
  misc_feature (3)..(159): Homolog of NCBI NO: 1572683 NR Description: early flowering protein 1 [Asparagus officinalis]
  misc_feature (7)..(159): Homolog of NCBI NO: 4325333 NR Description: intracellular pathogenesis-related protein PR-107
  misc_feature (6)..(159): Homolog of NCBI NO: 939857 NR Description: pathogenesis related protein [Asparagus
  misc_feature (3)..(159): Homolog of NCBI NO: 4210626 NR Description: intracellular pathogenesis-related protein,
  misc_feature (7)..(159): Homolog of NCBI NO: 6649902 NR Description: intracellular pathogenesis-related protein PR-105
  misc_feature (7)..(159): Homolog of NCBI NO: 6649904 NR Description: intracellular pathogenesis-related protein PR-106
  misc_feature (3)..(159): Homolog of NCBI NO: 548591 NR Description: Pathogenesis-related protein 1 (AOPR1)
  misc_feature (3)..(159): Homolog of NCBI NO: 4210624 NR Description: intracellular pathogenesis-related protein,
MASANSWTLEIASPVAPQRLFRAAVMDWHTLAPKVASHVVASAQPVEGDGGVGSVRQFNFTSVMPFSFMKERLEFLDADKCECKNTLIEGGGIGVAIETATSHIKVEPAAGGGSVVKVESTYKLLPGVEVKDEIAKAKESVTAIFKGAEAYLVANPDAYN

SEQ ID NO: 8095 - protein, 135 aa, Zea mays subsp. mays
  peptide (1)..(135): Ceres Seq. ID no. 12403111
  misc_feature (1)..(130): Pfam Name: Pathogenesis-related protein Bet v I family Pfam Description: Pathogenesis-related protein Bet v I family
  misc_feature (1)..(135): Homolog of NCBI NO: 16589076 NR Description: pathogen-related protein [Oryza sativa]
  misc_feature (1)..(135): Homolog of NCBI NO: 7442203 NR Description: pathogenesis-related protein - sorghum
  misc_feature (1)..(134): Homolog of NCBI NO: 1572683 NR Description: early flowering protein 1 [Asparagus officinalis]
  misc_feature (1)..(134): Homolog of NCBI NO: 4325333 NR Description: intracellular pathogenesis-related protein PR-107
  misc_feature (1)..(134): Homolog of NCBI NO: 939857 NR Description: pathogenesis related protein [Asparagus
  misc_feature (1)..(134): Homolog of NCBI NO: 4210626 NR Description: intracellular pathogenesis-related protein,
  misc_feature (1)..(134): Homolog of NCBI NO: 6649902 NR Description: intracellular pathogenesis-related protein PR-105
  misc_feature (1)..(134): Homolog of NCBI NO: 6649904 NR Description: intracellular pathogenesis-related protein PR-106
  misc_feature (1)..(134): Homolog of NCBI NO: 548591 NR Description: Pathogenesis-related protein 1 (AOPR1)
  misc_feature (1)..(134): Homolog of NCBI NO: 4210624 NR Description: intracellular pathogenesis-related protein,
MDWHTLAPKVASHVVASAQPVEGDGGVGSVRQFNFTSVMPFSFMKERLEFLDADKCECKNTLIEGGGIGVAIETATSHIKVEPAAGGGSVVKVESTYKLLPGVEVKDEIAKAKESVTAIFKGAEAYLVANPDAYN

SEQ ID NO: 8096 - DNA, 1102 bp, Zea mays subsp. mays
  misc_feature (1)..(1102): Ceres Seq. ID no. 12362589
  misc_feature: MA Experiment ID: 108527 Result: Up-regulated in Transcription
  misc_feature: MA Experiment 108527 PARAMETER Experiment Name: Zm_5mM_NO_P Parameter: Age (day) Value: 8
  misc_feature: MA Experiment 108527 PARAMETER Experiment Name: Zm_5mM_NO_P Parameter: Organism Value: Zea mays
  misc_feature: MA Experiment 108527 PARAMETER Experiment Name: Zm_5mM_NO_P Parameter: Plant Line Value: 35A19
  misc_feature: MA Experiment 108527 PARAMETER Experiment Name: Zm_5mM_NO_P Parameter: Timepoint (hr) Value: 6
  misc_feature: MA Experiment 108527 PARAMETER Experiment Name: Zm_5mM_NO_P Parameter: Tissue Value: Aerial
  misc_feature: MA Experiment 108527 PARAMETER Experiment Name: Zm_5mM_NO_P Parameter: Treatment Value: 5mM NO vs. No Treatment
  misc_feature: MA Experiment ID: 108528 Result: Down-regulated in Transcription
  misc_feature: MA Experiment 108528 PARAMETER Experiment Name: Zm_Imbibed_Seeds_P Parameter: Age (day) Value: 5 vs. 2
  misc_feature: MA Experiment 108528 PARAMETER Experiment Name: Zm_Imbibed_Seeds_P Parameter: Organism Value: Zea mays
  misc_feature: MA Experiment 108528 PARAMETER Experiment Name: Zm_Imbibed_Seeds_P Parameter: Plant Line Value: 35A19
  misc_feature: MA Experiment 108528 PARAMETER Experiment Name: Zm_Imbibed_Seeds_P Parameter: Tissue Value: Aerial vs. Embryo
  misc_feature: MA Experiment ID: 108534 Result: Up-regulated in Transcription
  misc_feature: MA Experiment 108534 PARAMETER Experiment Name: Zm_4deg_Cold_P Parameter: Age (hr) Value: 8
  misc_feature: MA Experiment 108534 PARAMETER Experiment Name: Zm_4deg_Cold_P Parameter: Organism Value: Zea mays
  misc_feature: MA Experiment 108534 PARAMETER Experiment Name: Zm_4deg_Cold_P Parameter: Plant Line Value: 35A19
  misc_feature: MA Experiment 108534 PARAMETER Experiment Name: Zm_4deg_Cold_P Parameter: Temperature (deg C) Value: 4 vs. 22
  misc_feature: MA Experiment 108534 PARAMETER Experiment Name: Zm_4deg_Cold_P Parameter: Timepoint (hr) Value: 6
  misc_feature: MA Experiment 108534 PARAMETER Experiment Name: Zm_4deg_Cold_P Parameter: Tissue Value: Aerial
  misc_feature: MA Experiment ID: 108535 Result: Up-regulated in Transcription
  misc_feature: MA Experiment 108535 PARAMETER Experiment Name: Zm_Meristem_P Parameter: Age (day) Value: 8
  misc_feature: MA Experiment 108535 PARAMETER Experiment Name: Zm_Meristem_P Parameter: Organism Value: Zea mays
  misc_feature: MA Experiment 108535 PARAMETER Experiment Name: Zm_Meristem_P Parameter: Plant Line Value: 35A19
  misc_feature: MA Experiment 108535 PARAMETER Experiment Name: Zm_Meristem_P Parameter: Tissue Value: Root Meristem vs. Above Root Meristem
  misc_feature: MA Experiment ID: 108544 Result: Down-regulated in Transcription
  misc_feature: MA Experiment ID: 20000478 Result: Down-regulated in Transcription
  misc_feature: MA Experiment 20000478 PARAMETER Experiment Name: Zm_5mM_SA_P Parameter: Age (day) Value: 11
  misc_feature: MA Experiment 20000478 PARAMETER Experiment Name: Zm_5mM_SA_P Parameter: Organism Value: Zea mays
  misc_feature: MA Experiment 20000478 PARAMETER Experiment Name: Zm_5mM_SA_P Parameter: Plant Line Value: 35A19
  misc_feature: MA Experiment 20000478 PARAMETER Experiment Name: Zm_5mM_SA_P Parameter: Timepoint (hr) Value: 72
  misc_feature: MA Experiment 20000478 PARAMETER Experiment Name: Zm_5mM_SA_P Parameter: Tissue Value: Aerial
  misc_feature: MA Experiment 20000478 PARAMETER Experiment Name: Zm_5mM_SA_P Parameter: Treatment Value: 5mM SA vs. No Treatment
  misc_feature: MA Experiment ID: 20000479 Result: Down-regulated in Transcription
  misc_feature: MA Experiment 20000479 PARAMETER Experiment Name: Zm_Drought_P Parameter: Age (day) Value: 10
  misc_feature: MA Experiment 20000479 PARAMETER Experiment Name: Zm_Drought_P Parameter: Organism Value: Zea mays
  misc_feature: MA Experiment 20000479 PARAMETER Experiment Name: Zm_Drought_P Parameter: Plant Line Value: 35A19
  misc_feature: MA Experiment 20000479 PARAMETER Experiment Name: Zm_Drought_P Parameter: Timepoint (hr) Value: 48
  misc_feature: MA Experiment 20000479 PARAMETER Experiment Name: Zm_Drought_P Parameter: Tissue Value: Aerial
  misc_feature: MA Experiment 20000479 PARAMETER Experiment Name: Zm_Drought_P Parameter: Treatment Value: Drought vs. No Drought
  misc_feature: MA Experiment ID: 20000480 Result: Down-regulated in Transcription
  misc_feature: MA Experiment 20000480 PARAMETER Experiment Name: Zm_Drought_P Parameter: Age (day) Value: 11
  misc_feature: MA Experiment 20000480 PARAMETER Experiment Name: Zm_Drought_P Parameter: Organism Value: Zea mays
  misc_feature: MA Experiment 20000480 PARAMETER Experiment Name: Zm_Drought_P Parameter: Plant Line Value: 35A19
  misc_feature: MA Experiment 20000480 PARAMETER Experiment Name: Zm_Drought_P Parameter: Timepoint (hr) Value: 72
  misc_feature: MA Experiment 20000480 PARAMETER Experiment Name: Zm_Drought_P Parameter: Tissue Value: Aerial
  misc_feature: MA Experiment 20000480 PARAMETER Experiment Name: Zm_Drought_P Parameter: Treatment Value: Drought vs. No Drought
  misc_feature: MA Experiment ID: 20000535 Result: Up-regulated in Transcription
  misc_feature: MA Experiment 20000535 PARAMETER Experiment Name: Zm_Hybrid_Seed_Dev_P Parameter: DAP Value: 30 vs. 12
  misc_feature: MA Experiment 20000535 PARAMETER Experiment Name: Zm_Hybrid_Seed_Dev_P Parameter: Organism Value: Zea mays
  misc_feature: MA Experiment 20000535 PARAMETER Experiment Name: Zm_Hybrid_Seed_Dev_P Parameter: Plant Line Value: 35A19
  misc_feature: MA Experiment 20000535 PARAMETER Experiment Name: Zm_Hybrid_Seed_Dev_P Parameter: Tissue Value: Embryo vs. Unfert Floret
aactccccccatcctccccgccacctctcaccccccgcaagcgagtcagccaagccaagcgacgcccaacccccgcctccattcccgggccggagacgcgcctgcctggccgcgacgccgccagccatgggaatggggccgctcgacaacgccgcgtcggccgcgctggaggccgccgccgccgccgccgccgccccctcgcgggcgggctcgtacgcggtgctgcagtgcggcgaggactcggagtacgtgcggcagaagtacggcggctacttcgccgtcttccgcgcgctgctggaggaggacggcgagaggtggcgggtgtacagcggccgtccgcggggagctccccgccgacgccgaggcagccgggttcgacgggttcgtcatctccgggagctgcgccgacgcgcacggcgacgagccctggatcctcgcgctcgtcgacctcacccgccgcgtccacgccgccggcaagcgcgtcctcggcgtctgcttcggccaccagatcctgtgccgggcgctgggcgggcgcacggggcggtcggccaagggctgggacatcggggtgagctgcatccacccgacggcggcggcggcgcggctgttcgcgccgctgaagctgcccgtgcacatgccggtgatcgagttccaccaggacgaggtgtgggagctgccccccggcgccgaggcgctggcgcggtcggacaagacccgcgtcgagatgttccgcctcggcgcccgcgccatgggcgtccagggccacccggagtacagcaaggacgtcctcatgagcatcgccgaccgcctcctccgccacaaccacatactggactgccaggtggacgtggccaaggcgagcttcgacgtgcggcagccggacaaggagttgtggagcaaggtgtgcaggggcttcctcaagggaaggctccagtcgtcgcagcagcaaggtgtggcgctatagcaggaggaaattggggggcattggatgcctaggttaatccgtcatattgtttgtttttttattatatgtgcttcagaactcaagagttgtacagaaactgctatcttcgtccgaagcattaataaaaaaaaaggaggg

SEQ ID NO: 8097 - protein, 331 aa, Zea mays subsp. mays
  peptide (1)..(331): Ceres Seq. ID no. 12362590
  misc_feature (43)..(109): Homolog of NCBI NO: 13174241 NR Description: putative glutamine synthetase [Oryza sativa]
  misc_feature (72)..(109): Homolog of NCBI NO: 15224079 NR Description: unknown protein; protein id: At2g23970.1
  misc_feature (80)..(109): Homolog of NCBI NO: 17381294 NR Description: AT4g30550/F17I23_110 [Arabidopsis thaliana]
  misc_feature (80)..(109): Homolog of NCBI NO: 15234767 NR Description: putative protein; protein id: At4g30550.1, by cDNA: 29388., supported by cDNA: gi_17381293 [Arabidopsis >gi|25407659|pir||D85357 hypothetical protein AT4g30550
  misc_feature (80)..(112): Homolog of NCBI NO: 21555885 NR Description: unknown [Arabidopsis thaliana]
  misc_feature (72)..(111): Homolog of NCBI NO: 15234763 NR Description: putative protein; protein id: At4g30530.1, by cDNA: 37987., supported by cDNA: gi_15294151, supported by gi_20147268 [Arabidopsis thaliana] >gi|25407655|pir||B85357
  misc_feature (72)..(111): Homolog of NCBI NO: 14009290 NR Description: defense-related protein [Brassica carinata]
  misc_feature (72)..(111): Homolog of NCBI NO: 21593315 NR Description: defense-related protein [Arabidopsis thaliana]
  misc_feature (72)..(114): Homolog of NCBI NO: 15234765 NR Description: putative protein; protein id: At4g30540.1
  misc_feature (72)..(111): Homolog of NCBI NO: 15224078 NR Description: unknown protein; protein id: At2g23960.1
NSPHPPRHLSPPASESAKPSDAQPPPPFPGRRRACLAATPPAMGMGPLDNAASAALEAAAAAAAAPSRAGSYAVLQCGEDSEYVRQKYGGYFAVFRALLEEDGERWRVYSGRPRGAPRRRRGSRVRRVRHLRELRRRARRRALDPRARRPHPPRPRRRQARPRRLLRPPDPVPGAGRAHGAVGQGLGHRGELHPPDGGGGAAVRAAEAARAHAGDRVPPGRGVGAAPRRRGAGAVGQDPRRDVPPRRPRHGRPGPPGVQQGRPHEHRRPPPPPQPHTGLPGGRGQGELRRAAAGQGVVEQGVQGLPQGKAPVVAAARCGAIAGGNWGALDA

SEQ ID NO: 8098 - protein, 320 aa, Zea mays subsp. mays
  peptide (1)..(320): Ceres Seq. ID no. 12362591
  misc_feature (111)..(278): Pfam Name: Glutamine amidotransferase class-I Pfam Description: Glutamine amidotransferase class-I
  misc_feature (111)..(315): Homolog of NCBI NO: 13174241 NR Description: putative glutamine synthetase [Oryza sativa]
  misc_feature (112)..(309): Homolog of NCBI NO: 15224079 NR Description: unknown protein; protein id: At2g23970.1
  misc_feature (112)..(308): Homolog of NCBI NO: 17381294 NR Description: AT4g30550/F17I23_110 [Arabidopsis thaliana]
  misc_feature (112)..(308): Homolog of NCBI NO: 15234767 NR Description: putative protein; protein id: At4g30550.1, by cDNA: 29388., supported by cDNA: gi_17381293 [Arabidopsis >gi|25407659|pir||D85357 hypothetical protein AT4g30550
  misc_feature (112)..(308): Homolog of NCBI NO: 21555885 NR Description: unknown [Arabidopsis thaliana]
  misc_feature (112)..(313): Homolog of NCBI NO: 15234763 NR Description: putative protein; protein id: At4g30530.1, by cDNA: 37987., supported by cDNA: gi_15294151, supported by gi_20147268 [Arabidopsis thaliana] >gi|25407655|pir||B85357
  misc_feature (112)..(313): Homolog of NCBI NO: 14009290 NR Description: defense-related protein [Brassica carinata]
  misc_feature (112)..(313): Homolog of NCBI NO: 21593315 NR Description: defense-related protein [Arabidopsis thaliana]
  misc_feature (112)..(309): Homolog of NCBI NO: 15234765 NR Description: putative protein; protein id: At4g30540.1
  misc_feature (112)..(276): Homolog of NCBI NO: 15224078 NR Description: unknown protein; protein id: At2g23960.1
TPPILPATSHPPQASQPSQATPNPRLHSRAGDAPAWPRRRQPWEWGRSTTPRRPRWRPPPPPPPPPRGRARTRCCSAARTRSTCGRSTAATSPSSARCWRRTARGGGCTAAVRGELPADAEAAGFDGFVISGSCADAHGDEPWILALVDLTRRVHAAGKRVLGVCFGHQILCRALGGRTGRSAKGWDIGVSCIHPTAAAARLFAPLKLPVHMPVIEFHQDEVWELPPGAEALARSDKTRVEMFRLGARAMGVQGHPEYSKDVLMSIADRLLRHNHILDCQVDVAKASFDVRQPDKELWSKVCRGFLKGRLQSSQQQGVAL

SEQ ID NO: 8099 - protein, 289 aa, Zea mays subsp. mays
  peptide (1)..(289): Ceres Seq. ID no. 12362592
  misc_feature (1)..(67): Homolog of NCBI NO: 13174241 NR Description: putative glutamine synthetase [Oryza sativa]
  misc_feature (30)..(67): Homolog of NCBI NO: 15224079 NR Description: unknown protein; protein id: At2g23970.1
  misc_feature (38)..(67): Homolog of NCBI NO: 17381294 NR Description: AT4g30550/F17I23_110 [Arabidopsis thaliana]
  misc_feature (38)..(67): Homolog of NCBI NO: 15234767 NR Description: putative protein; protein id: At4g30550.1, by cDNA: 29388., supported by cDNA: gi_17381293 [Arabidopsis >gi|25407659|pir||D85357 hypothetical protein AT4g30550
  misc_feature (38)..(70): Homolog of NCBI NO: 21555885 NR Description: unknown [Arabidopsis thaliana]
  misc_feature (30)..(69): Homolog of NCBI NO: 15234763 NR Description: putative protein; protein id: At4g30530.1, by cDNA: 37987., supported by cDNA: gi_15294151, supported by gi_20147268 [Arabidopsis thaliana] >gi|25407655|pir||B85357
  misc_feature (30)..(69): Homolog of NCBI NO: 14009290 NR Description: defense-related protein [Brassica carinata]
  misc_feature (30)..(69): Homolog of NCBI NO: 21593315 NR Description: defense-related protein [Arabidopsis thaliana]
  misc_feature (30)..(72): Homolog of NCBI NO: 15234765 NR Description: putative protein; protein id: At4g30540.1
  misc_feature (30)..(69): Homolog of NCBI NO: 15224078 NR Description: unknown protein; protein id: At2g23960.1
MGMGPLDNAASAALEAAAAAAAAPSRAGSYAVLQCGEDSEYVRQKYGGYFAVFRALLEEDGERWRVYSGRPRGAPRRRRGSRVRRVRHLRELRRRARRRALDPRARRPHPPRPRRRQARPRRLLRPPDPVPGAGRAHGAVGQGLGHRGELHPPDGGGGAAVRAAEAARAHAGDRVPPGRGVGAAPRRRGAGAVGQDPRRDVPPRRPRHGRPGPPGVQQGRPHEHRRPPPPPQPHTGLPGGRGQGELRRAAAGQGVVEQGVQGLPQGKAPVVAAARCGAIAGGNWGALDA

SEQ ID NO: 8100 - DNA, 917 bp, Zea mays subsp. mays
  misc_feature (1)..(917): Ceres Seq. ID no. 13493285
  misc_feature: MA Experiment ID: 108530 Result: Down-regulated in Transcription
  misc_feature: MA Experiment 108530 PARAMETER Experiment Name: Zm_Imbibed_Seeds_P Parameter: Age (day) Value: 6 vs. 2
  misc_feature: MA Experiment 108530 PARAMETER Experiment Name: Zm_Imbibed_Seeds_P Parameter: Organism Value: Zea mays
  misc_feature: MA Experiment 108530 PARAMETER Experiment Name: Zm_Imbibed_Seeds_P Parameter: Plant Line Value: 35A19
  misc_feature: MA Experiment 108530 PARAMETER Experiment Name: Zm_Imbibed_Seeds_P Parameter: Tissue Value: Aerial vs. Embryo
  misc_feature: MA Experiment ID: 108535 Result: Up-regulated in Transcription
  misc_feature: MA Experiment 108535 PARAMETER Experiment Name: Zm_Meristem_P Parameter: Age (day) Value: 8
  misc_feature: MA Experiment 108535 PARAMETER Experiment Name: Zm_Meristem_P Parameter: Organism Value: Zea mays
  misc_feature: MA Experiment 108535 PARAMETER Experiment Name: Zm_Meristem_P Parameter: Plant Line Value: 35A19
  misc_feature: MA Experiment 108535 PARAMETER Experiment Name: Zm_Meristem_P Parameter: Tissue Value: Root Meristem vs. Above Root Meristem
  misc_feature: MA Experiment ID: 108544 Result: Down-regulated in Transcription
  misc_feature: MA Experiment ID: 20000478 Result: Down-regulated in Transcription
  misc_feature: MA Experiment 20000478 PARAMETER Experiment Name: Zm_5mM_SA_P Parameter: Age (day) Value: 11
  misc_feature: MA Experiment 20000478 PARAMETER Experiment Name: Zm_5mM_SA_P Parameter: Organism Value: Zea mays
  misc_feature: MA Experiment 20000478 PARAMETER Experiment Name: Zm_5mM_SA_P Parameter: Plant Line Value: 35A19
  misc_feature: MA Experiment 20000478 PARAMETER Experiment Name: Zm_5mM_SA_P Parameter: Timepoint (hr) Value: 72
  misc_feature: MA Experiment 20000478 PARAMETER Experiment Name: Zm_5mM_SA_P Parameter: Tissue Value: Aerial
  misc_feature: MA Experiment 20000478 PARAMETER Experiment Name: Zm_5mM_SA_P Parameter: Treatment Value: 5mM SA vs. No Treatment
  misc_feature: MA Experiment ID: 20000487 Result: Up-regulated in Transcription
  misc_feature: MA Experiment 20000487 PARAMETER Experiment Name: Zm_50mM_NH4NO3_L_to_H_P Parameter: Organism Value: Zea mays
  misc_feature: MA Experiment 20000487 PARAMETER Experiment Name: Zm_50mM_NH4NO3_L_to_H_P Parameter: Timepoint (hr) Value: 4
  misc_feature: MA Experiment 20000487 PARAMETER Experiment Name: Zm_50mM_NH4NO3_L_to_H_P Parameter: Tissue Value: Leaves
  misc_feature: MA Experiment 20000487 PARAMETER Experiment Name: Zm_50mM_NH4NO3_L_to_H_P Parameter: Treatment Value: 50mM NH4NO3 vs. 100mM Mannitol
  misc_feature: MA Experiment ID: 20001606 Result: Up-regulated in Transcription
  misc_feature: MA Experiment 20001606 PARAMETER Experiment Name: Zm_50ppm_KNO3_L-to-H_P Parameter: Age (day) Value: 19
  misc_feature: MA Experiment 20001606 PARAMETER Experiment Name: Zm_50ppm_KNO3_L-to-H_P Parameter: Organism Value: Zea mays
  misc_feature: MA Experiment 20001606 PARAMETER Experiment Name: Zm_50ppm_KNO3_L-to-H_P Parameter: Plant Line Value: 35A19
  misc_feature: MA Experiment 20001606 PARAMETER Experiment Name: Zm_50ppm_KNO3_L-to-H_P Parameter: Timepoint (hr) Value: 8
  misc_feature: MA Experiment 20001606 PARAMETER Experiment Name: Zm_50ppm_KNO3_L-to-H_P Parameter: Tissue Value: Shoots
  misc_feature: MA Experiment 20001606 PARAMETER Experiment Name: Zm_50ppm_KNO3_L-to-H_P Parameter: Treatment Value: 50ppm KNO3 vs. 50ppm KCl
  misc_feature: MA Experiment ID: 20001612 Result: Up-regulated in Transcription
  misc_feature: MA Experiment 20001612 PARAMETER Experiment Name: Zm_50ppm_KNO3_L-to-H_P Parameter: Age (day) Value: 19
  misc_feature: MA Experiment 20001612 PARAMETER Experiment Name: Zm_50ppm_KNO3_L-to-H_P Parameter: Organism Value: Zea mays
  misc_feature: MA Experiment 20001612 PARAMETER Experiment Name: Zm_50ppm_KNO3_L-to-H_P Parameter: Plant Line Value: 35A19
  misc_feature: MA Experiment 20001612 PARAMETER Experiment Name: Zm_50ppm_KNO3_L-to-H_P Parameter: Timepoint (hr) Value: 8
  misc_feature: MA Experiment 20001612 PARAMETER Experiment Name: Zm_50ppm_KNO3_L-to-H_P Parameter: Tissue Value: Roots
  misc_feature: MA Experiment 20001612 PARAMETER Experiment Name: Zm_50ppm_KNO3_L-to-H_P Parameter: Treatment Value: 50ppm KNO3 vs. 50ppm KCl
tcttcacccacattataaagatcctccacttcgcactttcgccgccgcctctctccttcccgagcaggaggcggacaaggtaagcagcaatcgcaggaaccctagcgccgccgcacccgcaggaatgggtatcgacctcgtcgccggtgggaggaataagaagaccaagcgcactgcgcccaagtctgacgatgtctacctcaagctcctcgtcaagctctaccgtttcttggtcaggaggaccaagagcaatttcaacgctgtcattctcaagaggcttttcatgagtaaaaccaaccgaccaccaatctccatgcgccgccttgtcaagtttatggaaggaaaggagaagaacattgctgtcattgttggcacagtcacagatgacaaaaggatccaggaggttccagcaatgaaggttactgccctgaggttcacggagacagcaagggccaggattgtcaatgctggtggcgagtgcctcacatttgaccagcttgctcttcgtgctccacttggcgagaacacggtcctcttgaggggccccaagaatgcccgtgaggcagtgaggcactttggcaaggctcctggagtgccgcacagccacaccaagccgtatgtgcgctccaagggaaggaagttcgagaaggctcgtggcaggaggaacagccgtggattcaaggtttaaaacaaattgtggccctccgtgttgccatcagcatagtgcaaccgttgtgtttgatcagtcgacagtaattagtcatcactctgtaccgagattagtagcacaatttgttgtcctggtttgaattttggaagatatttgatgtcgtctccttattatctactcgttactggttgagcacgaagattgttttgtgatactcctacatgatttaagacggttcccgacgttc

SEQ ID NO: 8101 - protein, 228 aa, Zea mays subsp. mays
  peptide (1)..(228): Ceres Seq. ID no. 13493286
  misc_feature (42)..(228): Homolog of NCBI NO: 34897628 NR Description: cytoplasmic ribosomal protein L18 [Oryza sativa]
  misc_feature (42)..(228): Homolog of NCBI NO: 34393858 NR Description: putative cytoplasmic ribosomal protein L18 [Oryza
  misc_feature (42)..(228): Homolog of NCBI NO: 606970 NR Description: cytoplasmic ribosomal protein L18
  misc_feature (42)..(228): Homolog of NCBI NO: 15241061 NR Description: 60S ribosomal protein L18 (RPL18C) [Arabidopsis >gi|15810153|gb|AAL07220.1| putative 60S ribosomal protein thaliana] >gi|21689771|gb|AAM67529.1| putative 60S ribosomal
  misc_feature (42)..(228): Homolog of NCBI NO: 15230011 NR Description: 60S ribosomal protein L18 (RPL18B) [Arabidopsis >gi|21431838|sp|P42791|RL18_ARATH 60S ribosomal protein L18 putative 60S ribosomal protein L18 [Arabidopsis thaliana]
  misc_feature (45)..(228): Homolog of NCBI NO: 6094021 NR Description: 60S RIBOSOMAL PROTEIN L18
  misc_feature (43)..(228): Homolog of NCBI NO: 7440855 NR Description: ribosomal protein L18, cytosolic - Arabidopsis
  misc_feature (42)..(204): Homolog of NCBI NO: 28798549 NR Description: 60S ribosomal protein [Medicago sativa]
  misc_feature (42)..(227): Homolog of NCBI NO: 28630356 NR Description: ribosomal protein L18 [Petromyzon marinus]
  misc_feature (42)..(227): Homolog of NCBI NO: 4506607 NR Description: ribosomal protein L18; 60S ribosomal protein L18 sapiens] >gi|548749|sp|Q07020|RL18_HUMAN 60S ribosomal protein
  misc_feature (42)..(228): Homolog of NCBI NO: 34897628 NR Description: cytoplasmic ribosomal protein L18 [Oryza sativa]
  misc_feature (42)..(228): Homolog of NCBI NO: 34393858 NR Description: putative cytoplasmic ribosomal protein L18 [Oryza
  misc_feature (42)..(228): Homolog of NCBI NO: 606970 NR Description: cytoplasmic ribosomal protein L18
  misc_feature (42)..(228): Homolog of NCBI NO: 15241061 NR Description: 60S ribosomal protein L18 (RPL18C) [Arabidopsis >gi|15810153|gb|AAL07220.1| putative 60S ribosomal protein thaliana] >gi|21689771|gb|AAM67529.1| putative 60S ribosomal
  misc_feature (42)..(228): Homolog of NCBI NO: 15230011 NR Description: 60S ribosomal protein L18 (RPL18B) [Arabidopsis >gi|21431838|sp|P42791|RL18_ARATH 60S ribosomal protein L18 putative 60S ribosomal protein L18 [Arabidopsis thaliana]
  misc_feature (45)..(228): Homolog of NCBI NO: 6094021 NR Description: 60S RIBOSOMAL PROTEIN L18
  misc_feature (43)..(228): Homolog of NCBI NO: 7440855 NR Description: ribosomal protein L18, cytosolic - Arabidopsis
  misc_feature (42)..(204): Homolog of NCBI NO: 28798549 NR Description: 60S ribosomal protein [Medicago sativa]
  misc_feature (42)..(227): Homolog of NCBI NO: 28630356 NR Description: ribosomal protein L18 [Petromyzon marinus]
  misc_feature (42)..(227): Homolog of NCBI NO: 4506607 NR Description: ribosomal protein L18; 60S ribosomal protein L18 sapiens] >gi|548749|sp|Q07020|RL18_HUMAN 60S ribosomal protein
LHPHYKDPPLRTFAAASLLPEQEADKVSSNRRNPSAAAPAGMGIDLVAGGRNKKTKRTAPKSDDVYLKLLVKLYRFLVRRTKSNFNAVILKRLFMSKTNRPPISMRRLVKFMEGKEKNIAVIVGTVTDDKRIQEVPAMKVTALRFTETARARIVNAGGECLTFDQLALRAPLGENTVLLRGPKNAREAVRHFGKAPGVPHSHTKPYVRSKGRKFEKARGRRNSRGFKV

SEQ ID NO: 8102 - protein, 187 aa, Zea mays subsp. mays
  peptide (1)..(187): Ceres Seq. ID no. 13493287
  misc_feature (1)..(187): Homolog of NCBI NO: 15230011 NR Description: 60S ribosomal protein L18 (RPL18B) [Arabidopsis >gi|21431838|sp|P42791|RL18_ARATH 60S ribosomal protein L18 putative 60S ribosomal protein L18 [Arabidopsis thaliana]
  misc_feature (4)..(187): Homolog of NCBI NO: 6094021 NR Description: 60S RIBOSOMAL PROTEIN L18
  misc_feature (2)..(187): Homolog of NCBI NO: 7440855 NR Description: ribosomal protein L18, cytosolic - Arabidopsis
  misc_feature (1)..(163): Homolog of NCBI NO: 28798549 NR Description: 60S ribosomal protein [Medicago sativa]
  misc_feature (1)..(186): Homolog of NCBI NO: 28630356 NR Description: ribosomal protein L18 [Petromyzon marinus]
  misc_feature (1)..(186): Homolog of NCBI NO: 4506607 NR Description: ribosomal protein L18; 60S ribosomal protein L18 sapiens] >gi|548749|sp|Q07020|RL18_HUMAN 60S ribosomal protein
  misc_feature (1)..(187): Homolog of NCBI NO: 34897628 NR Description: cytoplasmic ribosomal protein L18 [Oryza sativa]
  misc_feature (1)..(187): Homolog of NCBI NO: 34393858 NR Description: putative cytoplasmic ribosomal protein L18 [Oryza
  misc_feature (1)..(187): Homolog of NCBI NO: 606970 NR Description: cytoplasmic ribosomal protein L18
  misc_feature (1)..(187): Homolog of NCBI NO: 15241061 NR Description: 60S ribosomal protein L18 (RPL18C) [Arabidopsis >gi|15810153|gb|AAL07220.1| putative 60S ribosomal protein thaliana] >gi|21689771|gb|AAM67529.1| putative 60S ribosomal
  misc_feature (1)..(187): Homolog of NCBI NO: 34897628 NR Description: cytoplasmic ribosomal protein L18 [Oryza sativa]
  misc_feature (1)..(187): Homolog of NCBI NO: 34393858 NR Description: putative cytoplasmic ribosomal protein L18 [Oryza
  misc_feature (1)..(187): Homolog of NCBI NO: 606970 NR Description: cytoplasmic ribosomal protein L18
  misc_feature (1)..(187): Homolog of NCBI NO: 15241061 NR Description: 60S ribosomal protein L18 (RPL18C) [Arabidopsis >gi|15810153|gb|AAL07220.1| putative 60S ribosomal protein thaliana] >gi|21689771|gb|AAM67529.1| putative 60S ribosomal
  misc_feature (1)..(187): Homolog of NCBI NO: 15230011 NR Description: 60S ribosomal protein L18 (RPL18B) [Arabidopsis >gi|21431838|sp|P42791|RL18_ARATH 60S ribosomal protein L18 putative 60S ribosomal protein L18 [Arabidopsis thaliana]
  misc_feature (4)..(187): Homolog of NCBI NO: 6094021 NR Description: 60S RIBOSOMAL PROTEIN L18
  misc_feature (2)..(187): Homolog of NCBI NO: 7440855 NR Description: ribosomal protein L18, cytosolic - Arabidopsis
  misc_feature (1)..(163): Homolog of NCBI NO: 28798549 NR Description: 60S ribosomal protein [Medicago sativa]
  misc_feature (1)..(186): Homolog of NCBI NO: 28630356 NR Description: ribosomal protein L18 [Petromyzon marinus]
  misc_feature (1)..(186): Homolog of NCBI NO: 4506607 NR Description: ribosomal protein L18; 60S ribosomal protein L18 sapiens] >gi|548749|sp|Q07020|RL18_HUMAN 60S ribosomal protein
MGIDLVAGGRNKKTKRTAPKSDDVYLKLLVKLYRFLVRRTKSNFNAVILKRLFMSKTNRPPISMRRLVKFMEGKEKNIAVIVGTVTDDKRIQEVPAMKVTALRFTETARARIVNAGGECLTFDQLALRAPLGENTVLLRGPKNAREAVRHFGKAPGVPHSHTKPYVRSKGRKFEKARGRRNSRGFKV

SEQ ID NO: 8103 - protein, 134 aa, Zea mays subsp. mays
  peptide (1)..(134): Ceres Seq. ID no. 13493288
  misc_feature (1)..(134): Homolog of NCBI NO: 34897628 NR Description: cytoplasmic ribosomal protein L18 [Oryza sativa]
  misc_feature (1)..(134): Homolog of NCBI NO: 34393858 NR Description: putative cytoplasmic ribosomal protein L18 [Oryza
  misc_feature (1)..(134): Homolog of NCBI NO: 606970 NR Description: cytoplasmic ribosomal protein L18
  misc_feature (1)..(134): Homolog of NCBI NO: 15241061 NR Description: 60S ribosomal protein L18 (RPL18C) [Arabidopsis >gi|15810153|gb|AAL07220.1| putative 60S ribosomal protein thaliana] >gi|21689771|gb|AAM67529.1| putative 60S ribosomal
  misc_feature (1)..(134): Homolog of NCBI NO: 15230011 NR Description: 60S ribosomal protein L18 (RPL18B) [Arabidopsis >gi|21431838|sp|P42791|RL18_ARATH 60S ribosomal protein L18 putative 60S ribosomal protein L18 [Arabidopsis thaliana]
  misc_feature (1)..(134): Homolog of NCBI NO: 6094021 NR Description: 60S RIBOSOMAL PROTEIN L18
  misc_feature (1)..(134): Homolog of NCBI NO: 7440855 NR Description: ribosomal protein L18, cytosolic - Arabidopsis
  misc_feature (1)..(110): Homolog of NCBI NO: 28798549 NR Description: 60S ribosomal protein [Medicago sativa]
  misc_feature (1)..(133): Homolog of NCBI NO: 28630356 NR Description: ribosomal protein L18 [Petromyzon marinus]
  misc_feature (1)..(133): Homolog of NCBI NO: 4506607 NR Description: ribosomal protein L18; 60S ribosomal protein L18 sapiens] >gi|548749|sp|Q07020|RL18_HUMAN 60S ribosomal protein
  misc_feature (1)..(134): Homolog of NCBI NO: 15230011 NR Description: 60S ribosomal protein L18 (RPL18B) [Arabidopsis >gi|21431838|sp|P42791|RL18_ARATH 60S ribosomal protein L18 putative 60S ribosomal protein L18 [Arabidopsis thaliana]
  misc_feature (1)..(134): Homolog of NCBI NO: 6094021 NR Description: 60S RIBOSOMAL PROTEIN L18
  misc_feature (1)..(134): Homolog of NCBI NO: 7440855 NR Description: ribosomal protein L18, cytosolic - Arabidopsis
  misc_feature (1)..(110): Homolog of NCBI NO: 28798549 NR Description: 60S ribosomal protein [Medicago sativa]
  misc_feature (1)..(133): Homolog of NCBI NO: 28630356 NR Description: ribosomal protein L18 [Petromyzon marinus]
  misc_feature (1)..(133): Homolog of NCBI NO: 4506607 NR Description: ribosomal protein L18; 60S ribosomal protein L18 sapiens] >gi|548749|sp|Q07020|RL18_HUMAN 60S ribosomal protein
  misc_feature (1)..(134): Homolog of NCBI NO: 34897628 NR Description: cytoplasmic ribosomal protein L18 [Oryza sativa]
  misc_feature (1)..(134): Homolog of NCBI NO: 34393858 NR Description: putative cytoplasmic ribosomal protein L18 [Oryza
  misc_feature (1)..(134): Homolog of NCBI NO: 606970 NR Description: cytoplasmic ribosomal protein L18
  misc_feature (1)..(134): Homolog of NCBI NO: 15241061 NR Description: 60S ribosomal protein L18 (RPL18C) [Arabidopsis >gi|15810153|gb|AAL07220.1| putative 60S ribosomal protein thaliana] >gi|21689771|gb|AAM67529.1| putative 60S ribosomal
MSKTNRPPISMRRLVKFMEGKEKNIAVIVGTVTDDKRIQEVPAMKVTALRFTETARARIVNAGGECLTFDQLALRAPLGENTVLLRGPKNAREAVRHFGKAPGVPHSHTKPYVRSKGRKFEKARGRRNSRGFKV

SEQ ID NO: 8104 - DNA, 1185 bp, Zea mays subsp. mays
  misc_feature (1)..(1185): Ceres Seq. ID no. 12372341
  misc_feature: MA Experiment ID: 108535 Result: Down-regulated in Transcription
  misc_feature: MA Experiment 108535 PARAMETER Experiment Name: Zm_Meristem_P Parameter: Age (day) Value: 8
  misc_feature: MA Experiment 108535 PARAMETER Experiment Name: Zm_Meristem_P Parameter: Organism Value: Zea mays
  misc_feature: MA Experiment 108535 PARAMETER Experiment Name: Zm_Meristem_P Parameter: Plant Line Value: 35A19
  misc_feature: MA Experiment 108535 PARAMETER Experiment Name: Zm_Meristem_P Parameter: Tissue Value: Root Meristem vs. Above Root Meristem
  misc_feature: MA Experiment ID: 108544 Result: Up-regulated in Transcription
  misc_feature: MA Experiment ID: 20000535 Result: Down-regulated in Transcription
  misc_feature: MA Experiment 20000535 PARAMETER Experiment Name: Zm_Hybrid_Seed_Dev_P Parameter: DAP Value: 30 vs. 12
  misc_feature: MA Experiment 20000535 PARAMETER Experiment Name: Zm_Hybrid_Seed_Dev_P Parameter: Organism Value: Zea mays
  misc_feature: MA Experiment 20000535 PARAMETER Experiment Name: Zm_Hybrid_Seed_Dev_P Parameter: Plant Line Value: 35A19
  misc_feature: MA Experiment 20000535 PARAMETER Experiment Name: Zm_Hybrid_Seed_Dev_P Parameter: Tissue Value: Embryo vs. Unfert Floret
  misc_feature: MA Experiment ID: 20001614 Result: Up-regulated in Transcription
  misc_feature: MA Experiment 20001614 PARAMETER Experiment Name: Zm_50ppm_KNO3_L-to-H_P Parameter: Age (day) Value: 21
  misc_feature: MA Experiment 20001614 PARAMETER Experiment Name: Zm_50ppm_KNO3_L-to-H_P Parameter: Organism Value: Zea mays
  misc_feature: MA Experiment 20001614 PARAMETER Experiment Name: Zm_50ppm_KNO3_L-to-H_P Parameter: Plant Line Value: 35A19
  misc_feature: MA Experiment 20001614 PARAMETER Experiment Name: Zm_50ppm_KNO3_L-to-H_P Parameter: Timepoint (hr) Value: 48
  misc_feature: MA Experiment 20001614 PARAMETER Experiment Name: Zm_50ppm_KNO3_L-to-H_P Parameter: Tissue Value: Roots
  misc_feature: MA Experiment 20001614 PARAMETER Experiment Name: Zm_50ppm_KNO3_L-to-H_P Parameter: Treatment Value: 50ppm KNO3 vs. 50ppm KCl
attgctggtaccgacccgtccccaccagtccagtctataagagcgacgggatcacggaaacctgttcaccgctgcgccgcctcactattgactgtcggattccccactcgccggcgacaaccgccgcgcccgatccgtctgctaggtcttgcacctccgggctctggccatggctgccgaagctggcccaatctccaaggtcctcatcgtcgtagcgatgcagacggaggcgatgccgctcgtccacaagttcaagctcgtcgaggcgcccgcccacgaatccacatttcctaaaggtgccccatgggttaggtaccatggcaactacaaaggcctccacattgaccttgtattgcctggaaaggatgctgttttaggagtcgacagtgttggtacggtatcggcagctcttttgactagtttttccattcaaacattgaagccagaccttatcattaatgctggcactgctggtggcttcaaggccaaaggggcaagcattggagatgtattcctggcatcagatgtttcattccatgacaggaggataccaatacctgtttttgacatgtatggaattggagcacggaaaacttctgcagttcctaatatcttgaaggaactcaatttgaagattggcaaattgtcgactggggattctctggatatgtctccccaggatgagaaggtgatactgagcaatgatgctacagtaaaggatatggagggagctgctgtggcatatgtcgccgacatgttttcaacgccagcgatctttgtgaaagctgtgactgatatcgtggatggggataagccaacatctgaggagtttctgcagaacctgattgccgtgacggcggcactggacctggcagtcaccaaagtggtggatttcatcagcgggaaacgcatctctgatctttgaaggctgtcatgaaatacgacacccccactgctctgatgcacgatgctaggctacgaacaatacaacattgggtcaacgattttttgtgaggtgttttctatgtgaggttaaaccttcttaaccctgtgtacaaaattcctgccaattgctatgggccggccatagcgtggaattttatagaataatttgcaaaatgtattttgtggtgcaaatatcgatatataataatatgctgggggacgggatccccgtgggattag

SEQ ID NO: 8105 - protein, 251 aa, Zea mays subsp. mays
  peptide (1)..(251): Ceres Seq. ID no. 12372342
  misc_feature (10)..(235): Pfam Name: Phosphorylase family Pfam Description: Phosphorylase family
  misc_feature (5)..(251): Homolog of NCBI NO: 34897892 NR Description: ESTs C28489(C61317),AU031689(R0560) correspond to region of the predicted gene.~Similar to Arabidopsis thaliana DNA
  misc_feature (5)..(251): Homolog of NCBI NO: 18087497 NR Description: methylthioadenosine/S-adenosyl homocysteine
  misc_feature (1)..(251): Homolog of NCBI NO: 7406708 NR Description: putative ripening-related protein [Vitis vinifera]
  misc_feature (7)..(251): Homolog of NCBI NO: 15234791 NR Description: putative protein; protein id: At4g38800.1, by cDNA: gi_13878068 [Arabidopsis thaliana]
  misc_feature (4)..(251): Homolog of NCBI NO: 30690140 NR Description: expressed protein [Arabidopsis thaliana]
  misc_feature (53)..(251): Homolog of NCBI NO: 7486865 NR Description: hypothetical protein T11I11.80 - Arabidopsis >gi|5123701|emb|CAB45445.1| putative protein [Arabidopsis >gi|7270435|emb|CAB80201.1| putative protein [Arabidopsis
  misc_feature (62)..(216): Homolog of NCBI NO: 24372900 NR Description: 5-methylthioadenosine
  misc_feature (65)..(222): Homolog of NCBI NO: 23467396 NR Description: hypothetical protein [Haemophilus somnus 129PT]
  misc_feature (64)..(222): Homolog of NCBI NO: 23037085 NR Description: hypothetical protein [Oenococcus oeni MCW]
  misc_feature (64)..(238): Homolog of NCBI NO: 16079781 NR Description: similar to purine nucleoside phosphorylase
MAAEAGPISKVLIVVAMQTEAMPLVHKFKLVEAPAHESTFPKGAPWVRYHGNYKGLHIDLVLPGKDAVLGVDSVGTVSAALLTSFSIQTLKPDLIINAGTAGGFKAKGASIGDVFLASDVSFHDRRIPIPVFDMYGIGARKTSAVPNILKELNLKIGKLSTGDSLDMSPQDEKVILSNDATVKDMEGAAVAYVADMFSTPAIFVKAVTDIVDGDKPTSEEFLQNLIAVTAALDLAVTKVVDFISGKRISDL

SEQ ID NO: 8106 - protein, 235 aa, Zea mays subsp. mays
  peptide (1)..(235): Ceres Seq. ID no. 12372343
  misc_feature (1)..(219): Pfam Name: Phosphorylase family Pfam Description: Phosphorylase family
  misc_feature (1)..(235): Homolog of NCBI NO: 34897892 NR Description: ESTs C28489(C61317),AU031689(R0560) correspond to region of the predicted gene.~Similar to Arabidopsis thaliana DNA
  misc_feature (1)..(235): Homolog of NCBI NO: 18087497 NR Description: methylthioadenosine/S-adenosyl homocysteine
  misc_feature (1)..(235): Homolog of NCBI NO: 7406708 NR Description: putative ripening-related protein [Vitis vinifera]
  misc_feature (1)..(235): Homolog of NCBI NO: 15234791 NR Description: putative protein; protein id: At4g38800.1, by cDNA: gi_13878068 [Arabidopsis thaliana]
  misc_feature (1)..(235): Homolog of NCBI NO: 30690140 NR Description: expressed protein [Arabidopsis thaliana]
  misc_feature (37)..(235): Homolog of NCBI NO: 7486865 NR Description: hypothetical protein T11I11.80 - Arabidopsis >gi|5123701|emb|CAB45445.1| putative protein [Arabidopsis >gi|7270435|emb|CAB80201.1| putative protein [Arabidopsis
  misc_feature (46)..(200): Homolog of NCBI NO: 24372900 NR Description: 5-methylthioadenosine
  misc_feature (49)..(206): Homolog of NCBI NO: 23467396 NR Description: hypothetical protein [Haemophilus somnus 129PT]
  misc_feature (48)..(206): Homolog of NCBI NO: 23037085 NR Description: hypothetical protein [Oenococcus oeni MCW]
  misc_feature (48)..(222): Homolog of NCBI NO: 16079781 NR Description: similar to purine nucleoside phosphorylase
MQTEAMPLVHKFKLVEAPAHESTFPKGAPWVRYHGNYKGLHIDLVLPGKDAVLGVDSVGTVSAALLTSFSIQTLKPDLIINAGTAGGFKAKGASIGDVFLASDVSFHDRRIPIPVFDMYGIGARKTSAVPNILKELNLKIGKLSTGDSLDMSPQDEKVILSNDATVKDMEGAAVAYVADMFSTPAIFVKAVTDIVDGDKPTSEEFLQNLIAVTAALDLAVTKVVDFISGKRISDL

SEQ ID NO: 8107 - protein, 230 aa, Zea mays subsp. mays
  peptide (1)..(230): Ceres Seq. ID no. 12372344
  misc_feature (1)..(214): Pfam Name: Phosphorylase family Pfam Description: Phosphorylase family
  misc_feature (1)..(230): Homolog of NCBI NO: 34897892 NR Description: ESTs C28489(C61317),AU031689(R0560) correspond to region of the predicted gene.~Similar to Arabidopsis thaliana DNA
  misc_feature (1)..(230): Homolog of NCBI NO: 18087497 NR Description: methylthioadenosine/S-adenosyl homocysteine
  misc_feature (1)..(230): Homolog of NCBI NO: 7406708 NR Description: putative ripening-related protein [Vitis vinifera]
  misc_feature (1)..(230): Homolog of NCBI NO: 15234791 NR Description: putative protein; protein id: At4g38800.1, by cDNA: gi_13878068 [Arabidopsis thaliana]
  misc_feature (1)..(230): Homolog of NCBI NO: 30690140 NR Description: expressed protein [Arabidopsis thaliana]
  misc_feature (32)..(230): Homolog of NCBI NO: 7486865 NR Description: hypothetical protein T11I11.80 - Arabidopsis >gi|5123701|emb|CAB45445.1| putative protein [Arabidopsis >gi|7270435|emb|CAB80201.1| putative protein [Arabidopsis
  misc_feature (41)..(195): Homolog of NCBI NO: 24372900 NR Description: 5-methylthioadenosine
  misc_feature (44)..(201): Homolog of NCBI NO: 23467396 NR Description: hypothetical protein [Haemophilus somnus 129PT]
  misc_feature (43)..(201): Homolog of NCBI NO: 23037085 NR Description: hypothetical protein [Oenococcus oeni MCW]
  misc_feature (43)..(217): Homolog of NCBI NO: 16079781 NR Description: similar to purine nucleoside phosphorylase
MPLVHKFKLVEAPAHESTFPKGAPWVRYHGNYKGLHIDLVLPGKDAVLGVDSVGTVSAALLTSFSIQTLKPDLIINAGTAGGFKAKGASIGDVFLASDVSFHDRRIPIPVFDMYGIGARKTSAVPNILKELNLKIGKLSTGDSLDMSPQDEKVILSNDATVKDMEGAAVAYVADMFSTPAIFVKAVTDIVDGDKPTSEEFLQNLIAVTAALDLAVTKVVDFISGKRISDL

SEQ ID NO: 8108 - DNA, 1186 bp, Zea mays subsp. mays
  misc_feature (1)..(1186): Ceres Seq. ID no. 12402393
  misc_feature: MA Experiment ID: 108528 Result: Up-regulated in Transcription
  misc_feature: MA Experiment 108528 PARAMETER Experiment Name: Zm_Imbibed_Seeds_P Parameter: Age (day) Value: 5 vs. 2
  misc_feature: MA Experiment 108528 PARAMETER Experiment Name: Zm_Imbibed_Seeds_P Parameter: Organism Value: Zea mays
  misc_feature: MA Experiment 108528 PARAMETER Experiment Name: Zm_Imbibed_Seeds_P Parameter: Plant Line Value: 35A19
  misc_feature: MA Experiment 108528 PARAMETER Experiment Name: Zm_Imbibed_Seeds_P Parameter: Tissue Value: Aerial vs. Embryo
  misc_feature: MA Experiment ID: 108530 Result: Up-regulated in Transcription
  misc_feature: MA Experiment 108530 PARAMETER Experiment Name: Zm_Imbibed_Seeds_P Parameter: Age (day) Value: 6 vs. 2
  misc_feature: MA Experiment 108530 PARAMETER Experiment Name: Zm_Imbibed_Seeds_P Parameter: Organism Value: Zea mays
  misc_feature: MA Experiment 108530 PARAMETER Experiment Name: Zm_Imbibed_Seeds_P Parameter: Plant Line Value: 35A19
  misc_feature: MA Experiment 108530 PARAMETER Experiment Name: Zm_Imbibed_Seeds_P Parameter: Tissue Value: Aerial vs. Embryo
  misc_feature: MA Experiment ID: 108536 Result: Down-regulated in Transcription
  misc_feature: MA Experiment 108536 PARAMETER Experiment Name: Zm_Meristem_P Parameter: Age (day) Value: 8
  misc_feature: MA Experiment 108536 PARAMETER Experiment Name: Zm_Meristem_P Parameter: Organism Value: Zea mays
  misc_feature: MA Experiment 108536 PARAMETER Experiment Name: Zm_Meristem_P Parameter: Plant Line Value: 35A19
  misc_feature: MA Experiment 108536 PARAMETER Experiment Name: Zm_Meristem_P Parameter: Tissue Value: Shoot Meristem vs. Above Shoot Meristem
  misc_feature: MA Experiment ID: 108544 Result: Up-regulated in Transcription
  misc_feature: MA Experiment ID: 108545 Result: Up-regulated in Transcription
  misc_feature: MA Experiment 108545 PARAMETER Experiment Name: Zm_Imbibed_Seeds_P Parameter: Age (day) Value: 3 vs. 2
  misc_feature: MA Experiment 108545 PARAMETER Experiment Name: Zm_Imbibed_Seeds_P Parameter: Organism Value: Zea mays
  misc_feature: MA Experiment 108545 PARAMETER Experiment Name: Zm_Imbibed_Seeds_P Parameter: Plant Line Value: 35A19
  misc_feature: MA Experiment 108545 PARAMETER Experiment Name: Zm_Imbibed_Seeds_P Parameter: Tissue Value: Aerial vs. Embryo
  misc_feature: MA Experiment ID: 108546 Result: Down-regulated in Transcription
  misc_feature: MA Experiment 108546 PARAMETER Experiment Name: Zm_Imbibed_Seeds_P Parameter: Age (day) Value: 3 vs. 2
  misc_feature: MA Experiment 108546 PARAMETER Experiment Name: Zm_Imbibed_Seeds_P Parameter: Organism Value: Zea mays
  misc_feature: MA Experiment 108546 PARAMETER Experiment Name: Zm_Imbibed_Seeds_P Parameter: Plant Line Value: 35A19
  misc_feature: MA Experiment 108546 PARAMETER Experiment Name: Zm_Imbibed_Seeds_P Parameter: Tissue Value: Roots vs. Embryo
  misc_feature: MA Experiment ID: 108547 Result: Up-regulated in Transcription
  misc_feature: MA Experiment 108547 PARAMETER Experiment Name: Zm_Imbibed_Seeds_P Parameter: Age (day) Value: 4 vs. 2
  misc_feature: MA Experiment 108547 PARAMETER Experiment Name: Zm_Imbibed_Seeds_P Parameter: Organism Value: Zea mays
  misc_feature: MA Experiment 108547 PARAMETER Experiment Name: Zm_Imbibed_Seeds_P Parameter: Plant Line Value: 35A19
  misc_feature: MA Experiment 108547 PARAMETER Experiment Name: Zm_Imbibed_Seeds_P Parameter: Tissue Value: Aerial vs. Embryo
  misc_feature: MA Experiment ID: 108559 Result: Down-regulated in Transcription
  misc_feature: MA Experiment 108559 PARAMETER Experiment Name: Zm_5mM_NO_P Parameter: Age (day) Value: 8
  misc_feature: MA Experiment 108559 PARAMETER Experiment Name: Zm_5mM_NO_P Parameter: Organism Value: Zea mays
  misc_feature: MA Experiment 108559 PARAMETER Experiment Name: Zm_5mM_NO_P Parameter: Plant Line Value: 35A19
  misc_feature: MA Experiment 108559 PARAMETER Experiment Name: Zm_5mM_NO_P Parameter: Timepoint (hr) Value: 12
  misc_feature: MA Experiment 108559 PARAMETER Experiment Name: Zm_5mM_NO_P Parameter: Tissue Value: Aerial
  misc_feature: MA Experiment 108559 PARAMETER Experiment Name: Zm_5mM_NO_P Parameter: Treatment Value: 5mM NO vs. No Treatment
  misc_feature: MA Experiment ID: 108687 Result: Down-regulated in Transcription
  misc_feature: MA Experiment 108687 PARAMETER Experiment Name: Zm_Embryos-Flowers__P Parameter: Tissue Value: Embryo vs. Aerial+
  misc_feature: MA Experiment ID: 108688 Result: Down-regulated in Transcription
  misc_feature: MA Experiment 108688 PARAMETER Experiment Name: Zm_Embryos-Flowers__P Parameter: Tissue Value: Immature Flowers vs. Aerial+
  misc_feature: MA Experiment ID: 108689 Result: Up-regulated in Transcription
  misc_feature: MA Experiment 108689 PARAMETER Experiment Name: Zm_Drought_Roots_P Parameter: Age (day) Value: 9
  misc_feature: MA Experiment 108689 PARAMETER Experiment Name: Zm_Drought_Roots_P Parameter: Organism Value: Zea mays
  misc_feature: MA Experiment 108689 PARAMETER Experiment Name: Zm_Drought_Roots_P Parameter: Plant Line Value: 35A19
  misc_feature: MA Experiment 108689 PARAMETER Experiment Name: Zm_Drought_Roots_P Parameter: Timepoint (hr) Value: 24
  misc_feature: MA Experiment 108689 PARAMETER Experiment Name: Zm_Drought_Roots_P Parameter: Tissue Value: Roots
  misc_feature: MA Experiment 108689 PARAMETER Experiment Name: Zm_Drought_Roots_P Parameter: Treatment Value: Drought vs. No Drought
ctcctcctcatggctctgtcgtccgccggctcgttcgtggcctgcagcctccggccaagcggatagcatccatgccccgaggtcgacttcgcacctgaagccgggtgctgcggcggcgtcgttcacgaggacgccgcagcgccgggcgaacgcgaccaagggcggcgtgtccaccgtgtgcgagccgctgggccccgaccggccgatctggttccccggcagctcccctccgccgtggctcgacggaagccttccaggagactttggatttgaccctctcggactaggttcggagccggagctgctgcggtggttcgcgcaggcggagctgatgcacgggcggtgggcgatgctggcggcggcgggcatccttatcccggacctgctggcgcggtggggcttcatcgacgcggggttctcgtggttcgacgccgggtcccgcgagtacttcgcggacccctggacgctgttcgtgtcgcagatggcgctgatggggtgggcggaggggcggcggtgggcggactacctgaggcccgggtgcgtggacatcgagccgcgcttcccgaaccgcaagaacccggtccccgacgtggggtaccccggcgggctgtggttcgactgggccaactggggccgcgggtccccggagcccgtgatggtgctgcgcaccaaggagatcaagaacggccgcctcgccatgctcgccttcgtcggcttctggttccaggccgtgtacacggggcagggccccatcgacaacctgctcgcgcacctcgccgaccccggccactgcaacatcttctccggcgttcacgtcccactgatccgatgttgcttcggagctggcggagagactgcgaagaattaaaaaaaaaagtgcatcctgttgagggagaaagaacttcgcttggtcggtatcattttggccctgctggacatgtcaacattttgtttgtagtacctgcgtagaaatgtcaaaccacctgtacaaacgtacaaataccaccccagggatcgcgatgatgctagccagcagtccagcacacactagcttgtcctgaagatccatgcaacaccgtatacgagacaattgtatttttgggactacaaacagtgtgctttgcaataatgtcattccaaacaattagctcgcagaaatgggattataaagatcttataattgatt

SEQ ID NO: 8109 - protein, 288 aa, Zea mays subsp. mays
  peptide (1)..(288): Ceres Seq. ID no. 12402394
  misc_feature (75)..(243): Pfam Name: Chlorophyll A-B binding protein Pfam Description: Chlorophyll A-B binding protein
  misc_feature (27)..(268): Homolog of NCBI NO: 27754356 NR Description: putative light-harvesting chlorophyll a/b binding
  misc_feature (33)..(268): Homolog of NCBI NO: 15221956 NR Description: light-harvesting chlorophyll a/b binding protein; id: At1g19150.1, supported by cDNA: 252299., supported by cDNA:
  misc_feature (33)..(268): Homolog of NCBI NO: 25299032 NR Description: hypothetical protein T29M8.2 - Arabidopsis
  misc_feature (37)..(268): Homolog of NCBI NO: 1084336 NR Description: chlorophyll a/b-binding protein type II -
  misc_feature (25)..(267): Homolog of NCBI NO: 34393511 NR Description: putative photosystem I antenna protein [Oryza
  misc_feature (20)..(268): Homolog of NCBI NO: 2129879 NR Description: chlorophyll a/b-binding protein type II precursor,
  misc_feature (35)..(268): Homolog of NCBI NO: 115765 NR Description: Chlorophyll A-B binding protein 7, chloroplast
  misc_feature (35)..(268): Homolog of NCBI NO: 99486 NR Description: chlorophyll a/b-binding protein (clone pINEab 31)
  misc_feature (35)..(268): Homolog of NCBI NO: 115766 NR Description: Chlorophyll A-B binding protein, chloroplast
  misc_feature (15)..(268): Homolog of NCBI NO: 18376587 NR Description: putative chlorophyll A-B binding protein of LHCI
SSSWLCRPPARSWPAASGQADSIHAPRSTSHLKPGAAAASFTRTPQRRANATKGGVSTVCEPLGPDRPIWFPGSSPPPWLDGSLPGDFGFDPLGLGSEPELLRWFAQAELMHGRWAMLAAAGILIPDLLARWGFIDAGFSWFDAGSREYFADPWTLFVSQMALMGWAEGRRWADYLRPGCVDIEPRFPNRKNPVPDVGYPGGLWFDWANWGRGSPEPVMVLRTKEIKNGRLAMLAFVGFWFQAVYTGQGPIDNLLAHLADPGHCNIFSGVHVPLIRCCFGAGGETAKN

SEQ ID NO: 8110 - protein, 178 aa, Zea mays subsp. mays
  peptide (1)..(178): Ceres Seq. ID no. 12402395
  misc_feature (1)..(133): Pfam Name: Chlorophyll A-B binding protein Pfam Description: Chlorophyll A-B binding protein
  misc_feature (1)..(158): Homolog of NCBI NO: 27754356 NR Description: putative light-harvesting chlorophyll a/b binding
  misc_feature (1)..(158): Homolog of NCBI NO: 15221956 NR Description: light-harvesting chlorophyll a/b binding protein; id: At1g19150.1, supported by cDNA: 252299., supported by cDNA:
  misc_feature (1)..(158): Homolog of NCBI NO: 25299032 NR Description: hypothetical protein T29M8.2 - Arabidopsis
  misc_feature (1)..(158): Homolog of NCBI NO: 1084336 NR Description: chlorophyll a/b-binding protein type II -
  misc_feature (1)..(157): Homolog of NCBI NO: 34393511 NR Description: putative photosystem I antenna protein [Oryza
  misc_feature (1)..(158): Homolog of NCBI NO: 2129879 NR Description: chlorophyll a/b-binding protein type II precursor,
  misc_feature (1)..(158): Homolog of NCBI NO: 115765 NR Description: Chlorophyll A-B binding protein 7, chloroplast
  misc_feature (1)..(158): Homolog of NCBI NO: 99486 NR Description: chlorophyll a/b-binding protein (clone pINEab 31)
  misc_feature (1)..(158): Homolog of NCBI NO: 115766 NR Description: Chlorophyll A-B binding protein, chloroplast
  misc_feature (1)..(158): Homolog of NCBI NO: 18376587 NR Description: putative chlorophyll A-B binding protein of LHCI
MHGRWAMLAAAGILIPDLLARWGFIDAGFSWFDAGSREYFADPWTLFVSQMALMGWAEGRRWADYLRPGCVDIEPRFPNRKNPVPDVGYPGGLWFDWANWGRGSPEPVMVLRTKEIKNGRLAMLAFVGFWFQAVYTGQGPIDNLLAHLADPGHCNIFSGVHVPLIRCCFGAGGETAKN

SEQ ID NO: 8111 - protein, 172 aa, Zea mays subsp. mays
  peptide (1)..(172): Ceres Seq. ID no. 12402396
  misc_feature (1)..(127): Pfam Name: Chlorophyll A-B binding protein Pfam Description: Chlorophyll A-B binding protein
  misc_feature (1)..(152): Homolog of NCBI NO: 27754356 NR Description: putative light-harvesting chlorophyll a/b binding
  misc_feature (1)..(152): Homolog of NCBI NO: 15221956 NR Description: light-harvesting chlorophyll a/b binding protein; id: At1g19150.1, supported by cDNA: 252299., supported by cDNA:
  misc_feature (1)..(152): Homolog of NCBI NO: 25299032 NR Description: hypothetical protein T29M8.2 - Arabidopsis
  misc_feature (1)..(152): Homolog of NCBI NO: 1084336 NR Description: chlorophyll a/b-binding protein type II -
  misc_feature (1)..(151): Homolog of NCBI NO: 34393511 NR Description: putative photosystem I antenna protein [Oryza
  misc_feature (1)..(152): Homolog of NCBI NO: 2129879 NR Description: chlorophyll a/b-binding protein type II precursor,
  misc_feature (1)..(152): Homolog of NCBI NO: 115765 NR Description: Chlorophyll A-B binding protein 7, chloroplast
  misc_feature (1)..(152): Homolog of NCBI NO: 99486 NR Description: chlorophyll a/b-binding protein (clone pINEab 31)
  misc_feature (1)..(152): Homolog of NCBI NO: 115766 NR Description: Chlorophyll A-B binding protein, chloroplast
  misc_feature (1)..(152): Homolog of NCBI NO: 18376587 NR Description: putative chlorophyll A-B binding protein of LHCI
MLAAAGILIPDLLARWGFIDAGFSWFDAGSREYFADPWTLFVSQMALMGWAEGRRWADYLRPGCVDIEPRFPNRKNPVPDVGYPGGLWFDWANWGRGSPEPVMVLRTKEIKNGRLAMLAFVGFWFQAVYTGQGPIDNLLAHLADPGHCNIFSGVHVPLIRCCFGAGGETAKN

SEQ ID NO: 8112 - DNA, 2092 bp, Zea mays subsp. mays
  misc_feature (1)..(2092): Ceres Seq. ID no. 12359759
  misc_feature: MA Experiment ID: 108523 Result: Up-regulated in Transcription
  misc_feature: MA Experiment 108523 PARAMETER Experiment Name: Zm_42deg_Heat_P Parameter: Age (day) Value: 8
  misc_feature: MA Experiment 108523 PARAMETER Experiment Name: Zm_42deg_Heat_P Parameter: Organism Value: Zea mays
  misc_feature: MA Experiment 108523 PARAMETER Experiment Name: Zm_42deg_Heat_P Parameter: Plant Line Value: 35A19
  misc_feature: MA Experiment 108523 PARAMETER Experiment Name: Zm_42deg_Heat_P Parameter: Temperature (deg C) Value: 42 vs. 22
  misc_feature: MA Experiment 108523 PARAMETER Experiment Name: Zm_42deg_Heat_P Parameter: Timepoint (hr) Value: 6
  misc_feature: MA Experiment 108523 PARAMETER Experiment Name: Zm_42deg_Heat_P Parameter: Tissue Value: Aerial
aaaaaagtgtgggccgagaaacatgtcgtctcacctcgccgcggccgcttccgcccttcctctccctcttcctccgccggcggtcgccgcgccttcccgcgccctccgagctctaatcctgtcccggggcggcgccgccgccgtatgctccagtctgcgccgcggcggcacgccggcatgcctcgtgcgtcgcctgtgctcccaccactccgccgcggcggcggcaacggcgttggaggaggcgcggcgcgggcggaagcagctcggaatgacgcctgcgctctacgactacctcctcgccaacgtccgcgagcaccccattctccgggagcttcgcgaggagaccgcggctatgagagggagccagatgcaggtttctcccgctcaggctcagctgttgtcaatgcttgtgcaaatccttggggcgcgccgttgcattgaagttggtgtgtttactgggtattcatcattagctgttgcactggcccttcctgaatctggtcacttggttgcttgtgagagggatgacagatgcctagaagttgccaagaagtactaccaacgtgctggtgttgcacataagattgatgtgaaacatgctttggctgcggattctctaagatcacttcttgattgcggcgaagcttccagctatgacttcgcatttgttgatgctgacaagagaatgtatgaggaatattatgaacttctactgaagctagtaagagttggtggtttaattgtaatggacaatgtcctttggtatggaagggttgccgatctactggttgatgatcaaaagacgatcagtataaggaacttcaataagaaagttttagaggacaagcgtgttgatatcagcatggtgccaattggagatgggatgacaatttgccggaagctagtagatacttgaattcaatatccatgatatcatcagtatatttgctatggttcgcaaaggttacaagaataacaacattgccaagctttgcgaggatcttgggcttgcagacagggccacaggtttaattgactatatgattggaaatgggcagcatcccgaagtttttcatttggtacaaaattttaatttggaggacaagtatcctccattttctcttctgaagggatacattcagaaggccaagcagacttttgtggagatgtttaaaaagagtcaaacacacgagtccttgaactgggctataccaaaggaactatggattgcacattatctagctgagcagaaactcactgattctaagcaacgcagtgctatcatggcagaaattaaatatttgatgagtggatatgaaaagaaacaaaggtcagaaaatctctcaacatgggcttcacagcatccgccaacggaatctaaaaggaggaacaggaagcgcaaggaggaggagcaggagcaccatgaagcacaatacaaccagcagcagcaggaacagaatgaaaacaagttaattcaaggaaagcggcatcagctgcatcaagaagaaaatatggcgcaagtgacacagcagcagcatatgcaaccgacaacaaggccagctactcttaagcttccgacgcctgctattcctctggttctgaatgcagctcagatccaaaactttgcgcgtccagcttacgccgctgtgcctggagttcacaattaccctgcccagccaggttggcctgcagctcaaggaagtccattcgtaccacagttcatgtcaccgcagtatatgggtctgccatttaatccctttggccttcatcctacttgctatcccagacgcagatagcgtagagagttctggcgttccgcgtccatttgctgagtgaaactgtggtgaagcgtacaagttatatgaaacagaccggtatcggttaactggttttgtgttcgtttgttatgctgtctgatggttccttttcgcgacatggtgatcactttgcattgatttgttgttcagccaagtggtggaatgcttggtgcttgcaatctgaaatgtacgcacggtaacaggaattgtagtacttttcaatcaattacataatggcatttcacaaatacctgaacggtgaacatcaatccctg

SEQ ID NO: 8113 - protein, 304 aa, Zea mays subsp. mays
  peptide (1)..(304): Ceres Seq. ID no. 12359760
  misc_feature (100)..(300): Pfam Name: O-methyltransferase Pfam Description: O-methyltransferase
  misc_feature (63)..(300): Homolog of NCBI NO: 15228652 NR Description: O-methyltransferase, family 3 family; protein id: supported by cDNA: gi_17979263, supported by cDNA: gi_20334815 thaliana] >gi|11357587|pir||T47992 hypothetical protein
  misc_feature (72)..(300): Homolog of NCBI NO: 15228651 NR Description: O-methyltransferase, family 3 family; protein id: supported by cDNA: 40117., supported by cDNA: gi_20260545 thaliana] >gi|11357586|pir||T47991 hypothetical protein
  misc_feature (72)..(300): Homolog of NCBI NO: 21593560 NR Description: unknown [Arabidopsis thaliana]
  misc_feature (86)..(300): Homolog of NCBI NO: 17232671 NR Description: O-methyltransferase [Nostoc sp. PCC 7120]
  misc_feature (88)..(300): Homolog of NCBI NO: 23126866 NR Description: hypothetical protein [Nostoc punctiforme]
  misc_feature (85)..(300): Homolog of NCBI NO: 23129851 NR Description: hypothetical protein [Nostoc punctiforme]
  misc_feature (90)..(300): Homolog of NCBI NO: 7463011 NR Description: probable O-methyltransferase (EC 2.1.1.-) safC -
  misc_feature (94)..(300): Homolog of NCBI NO: 23043526 NR Description: hypothetical protein [Trichodesmium erythraeum
  misc_feature (86)..(301): Homolog of NCBI NO: 3452357 NR Description: unknown [Legionella pneumophila]
  misc_feature (86)..(302): Homolog of NCBI NO: 5257275 NR Description: ESTs AU030740(E60171),AU030739(E60171) correspond
KKCGPRNMSSHLAAAASALPLPLPPPAVAAPSRALRALILSRGGAAAVCSSLRRGGTPACLVRRLCSHHSAAAAATALEEARRGRKQLGMTPALYDYLLANVREHPILRELREETAAMRGSQMQVSPAQAQLLSMLVQILGARRCIEVGVFTGYSSLAVALALPESGHLVACERDDRCLEVAKKYYQRAGVAHKIDVKHALAADSLRSLLDCGEASSYDFAFVDADKRMYEEYYELLLKLVRVGGLIVMDNVLWYGRVADLLVDDQKTISIRNFNKKVLEDKRVDISMVPIGDGMTICRKLVDT

SEQ ID NO: 8114 - protein, 297 aa, Zea mays subsp. mays
  peptide (1)..(297): Ceres Seq. ID no. 12359761
  misc_feature (93)..(293): Pfam Name: O-methyltransferase Pfam Description: O-methyltransferase
  misc_feature (56)..(293): Homolog of NCBI NO: 15228652 NR Description: O-methyltransferase, family 3 family; protein id: supported by cDNA: gi_17979263, supported by cDNA: gi_20334815 thaliana] >gi|11357587|pir||T47992 hypothetical protein
  misc_feature (65)..(293): Homolog of NCBI NO: 15228651 NR Description: O-methyltransferase, family 3 family; protein id: supported by cDNA: 40117., supported by cDNA: gi_20260545 thaliana] >gi|11357586|pir||T47991 hypothetical protein
  misc_feature (65)..(293): Homolog of NCBI NO: 21593560 NR Description: unknown [Arabidopsis thaliana]
  misc_feature (79)..(293): Homolog of NCBI NO: 17232671 NR Description: O-methyltransferase [Nostoc sp. PCC 7120]
  misc_feature (81)..(293): Homolog of NCBI NO: 23126866 NR Description: hypothetical protein [Nostoc punctiforme]
  misc_feature (78)..(293): Homolog of NCBI NO: 23129851 NR Description: hypothetical protein [Nostoc punctiforme]
  misc_feature (83)..(293): Homolog of NCBI NO: 7463011 NR Description: probable O-methyltransferase (EC 2.1.1.-) safC -
  misc_feature (87)..(293): Homolog of NCBI NO: 23043526 NR Description: hypothetical protein [Trichodesmium erythraeum
  misc_feature (79)..(294): Homolog of NCBI NO: 3452357 NR Description: unknown [Legionella pneumophila]
  misc_feature (79)..(295): Homolog of NCBI NO: 5257275 NR Description: ESTs AU030740(E60171),AU030739(E60171) correspond
MSSHLAAAASALPLPLPPPAVAAPSRALRALILSRGGAAAVCSSLRRGGTPACLVRRLCSHHSAAAAATALEEARRGRKQLGMTPALYDYLLANVREHPILRELREETAAMRGSQMQVSPAQAQLLSMLVQILGARRCIEVGVFTGYSSLAVALALPESGHLVACERDDRCLEVAKKYYQRAGVAHKIDVKHALAADSLRSLLDCGEASSYDFAFVDADKRMYEEYYELLLKLVRVGGLIVMDNVLWYGRVADLLVDDQKTISIRNFNKKVLEDKRVDISMVPIGDGMTICRKLVDT

SEQ ID NO: 8115 - protein, 281 aa, Zea mays subsp. mays
  peptide (1)..(281): Ceres Seq. ID no. 12359762
MVRKGYKNNNIAKLCEDLGLADRATGLIDYMIGNGQHPEVFHLVQNFNLEDKYPPFSLLKGYIQKAKQTFVEMFKKSQTHESLNWAIPKELWIAHYLAEQKLTDSKQRSAIMAEIKYLMSGYEKKQRSENLSTWASQHPPTESKRRNRKRKEEEQEHHEAQYNQQQQEQNENKLIQGKRHQLHQEENMAQVTQQQHMQPTTRPATLKLPTPAIPLVLNAAQIQNFARPAYAAVPGVHNYPAQPGWPAAQGSPFVPQFMSPQYMGLPFNPFGLHPTCYPRRR

SEQ ID NO: 8116 - DNA, 750 bp, Zea mays subsp. mays
  misc_feature (1)..(750): Ceres Seq. ID no. 12341819
  misc_feature: MA Experiment ID: 108528 Result: Down-regulated in Transcription
  misc_feature: MA Experiment 108528 PARAMETER Experiment Name: Zm_Imbibed_Seeds_P Parameter: Age (day) Value: 5 vs. 2
  misc_feature: MA Experiment 108528 PARAMETER Experiment Name: Zm_Imbibed_Seeds_P Parameter: Organism Value: Zea mays
  misc_feature: MA Experiment 108528 PARAMETER Experiment Name: Zm_Imbibed_Seeds_P Parameter: Plant Line Value: 35A19
  misc_feature: MA Experiment 108528 PARAMETER Experiment Name: Zm_Imbibed_Seeds_P Parameter: Tissue Value: Aerial vs. Embryo
  misc_feature: MA Experiment ID: 108535 Result: Down-regulated in Transcription
  misc_feature: MA Experiment 108535 PARAMETER Experiment Name: Zm_Meristem_P Parameter: Age (day) Value: 8
  misc_feature: MA Experiment 108535 PARAMETER Experiment Name: Zm_Meristem_P Parameter: Organism Value: Zea mays
  misc_feature: MA Experiment 108535 PARAMETER Experiment Name: Zm_Meristem_P Parameter: Plant Line Value: 35A19
  misc_feature: MA Experiment 108535 PARAMETER Experiment Name: Zm_Meristem_P Parameter: Tissue Value: Root Meristem vs. Above Root Meristem
acacctcatcgatatagctttatttcccttgcccttttccagggcacaccccctccagctctccgccgtcggccatgggtcaagcctggggtaatctccaagataggctccaagggcggcggtggaaggagcaccaggtgaggaagatcaccgacaaggtgttcgaccgcctcacggaggacgcccagaagcgcgacaaggaggccctcagattcgaggaggtctacatcgccgtcctctgcgtctacaatgacatcaataagtacttgccggggccgcaccacgaccccccgtccaaggagaagctcagggccatgatggaggagtacgacgtgaacctggacgggctcctggaccgcgaggagttcgcggagttcatccggaagctgaccgcggactcgctgtgctcgatcagcgtgaagctgctgatcacgctggtggcggcgccggcgctggcgatggcgaccaagcgggcgacggagggcgtccccggcgtgggcaaggtggtacgcaaggtgcccaacgcgctctacgcctccgccatcaccctgggcgttgtgctgttgcagagatcaaccgagggcgtcgagtgactcgcgctgctgaaactgcaatgtcgtcggctgtgtagatggagcagcgtatctaggataggtgttggttctttacggcttgtgcggtgaattgatctgtgtatcaattcgatgtgatttatcctggatttgggacaaatagttgtggatccttgtg

SEQ ID NO: 8117 - protein, 172 aa, Zea mays subsp. mays
  peptide (1)..(172): Ceres Seq. ID no. 12341820
  misc_feature (1)..(172): Homolog of NCBI NO: 38344137 NR Description: OSJNBa0041A02.4 [Oryza sativa (japonica
  misc_feature (6)..(162): Homolog of NCBI NO: 18408144 NR Description: expressed protein; protein id: At1g64850.1, by cDNA: 30753., supported by cDNA: gi_17979273, supported by gi_20856382 [Arabidopsis thaliana] >gi|25373162|pir||G96671
  misc_feature (1)..(165): Homolog of NCBI NO: 38344138 NR Description: OSJNBa0041A02.5 [Oryza sativa (japonica
  misc_feature (38)..(159): Homolog of NCBI NO: 18420040 NR Description: Expressed protein; protein id: At4g37445.1,
  misc_feature (38)..(159): Homolog of NCBI NO: 26453144 NR Description: unknown protein [Arabidopsis thaliana]
MGQAWGNLQDRLQGRRWKEHQVRKITDKVFDRLTEDAQKRDKEALRFEEVYIAVLCVYNDINKYLPGPHHDPPSKEKLRAMMEEYDVNLDGLLDREEFAEFIRKLTADSLCSISVKLLITLVAAPALAMATKRATEGVPGVGKVVRKVPNALYASAITLGVVLLQRSTEGVE

SEQ ID NO: 8118 - protein, 92 aa, Zea mays subsp. mays
  peptide (1)..(92): Ceres Seq. ID no. 12341821
  misc_feature (1)..(92): Homolog of NCBI NO: 38344137 NR Description: OSJNBa0041A02.4 [Oryza sativa (japonica
  misc_feature (1)..(82): Homolog of NCBI NO: 18408144 NR Description: expressed protein; protein id: At1g64850.1, by cDNA: 30753., supported by cDNA: gi_17979273, supported by gi_20856382 [Arabidopsis thaliana] >gi|25373162|pir||G96671
  misc_feature (1)..(85): Homolog of NCBI NO: 38344138 NR Description: OSJNBa0041A02.5 [Oryza sativa (japonica
  misc_feature (1)..(79): Homolog of NCBI NO: 18420040 NR Description: Expressed protein; protein id: At4g37445.1,
  misc_feature (1)..(79): Homolog of NCBI NO: 26453144 NR Description: unknown protein [Arabidopsis thaliana]
MMEEYDVNLDGLLDREEFAEFIRKLTADSLCSISVKLLITLVAAPALAMATKRATEGVPGVGKVVRKVPNALYASAITLGVVLLQRSTEGVE

SEQ ID NO: 8119 - protein, 91 aa, Zea mays subsp. mays
  peptide (1)..(91): Ceres Seq. ID no. 12341822
  misc_feature (1)..(91): Homolog of NCBI NO: 38344137 NR Description: OSJNBa0041A02.4 [Oryza sativa (japonica
  misc_feature (1)..(81): Homolog of NCBI NO: 18408144 NR Description: expressed protein; protein id: At1g64850.1, by cDNA: 30753., supported by cDNA: gi_17979273, supported by gi_20856382 [Arabidopsis thaliana] >gi|25373162|pir||G96671
  misc_feature (1)..(84): Homolog of NCBI NO: 38344138 NR Description: OSJNBa0041A02.5 [Oryza sativa (japonica
  misc_feature (1)..(78): Homolog of NCBI NO: 18420040 NR Description: Expressed protein; protein id: At4g37445.1,
  misc_feature (1)..(78): Homolog of NCBI NO: 26453144 NR Description: unknown protein [Arabidopsis thaliana]
MEEYDVNLDGLLDREEFAEFIRKLTADSLCSISVKLLITLVAAPALAMATKRATEGVPGVGKVVRKVPNALYASAITLGVVLLQRSTEGVE

SEQ ID NO: 8120 - DNA, 849 bp, Zea mays subsp. mays
  misc_feature (1)..(849): Ceres Seq. ID no. 12402386
  misc_feature: MA Experiment ID: 108504 Result: Up-regulated in Transcription
  misc_feature: MA Experiment 108504 PARAMETER Experiment Name: Zm_Drought_P Parameter: Age (day) Value: 8
  misc_feature: MA Experiment 108504 PARAMETER Experiment Name: Zm_Drought_P Parameter: Organism Value: Zea mays
  misc_feature: MA Experiment 108504 PARAMETER Experiment Name: Zm_Drought_P Parameter: Plant Line Value: 35A19
  misc_feature: MA Experiment 108504 PARAMETER Experiment Name: Zm_Drought_P Parameter: Timepoint (hr) Value: 12
  misc_feature: MA Experiment 108504 PARAMETER Experiment Name: Zm_Drought_P Parameter: Tissue Value: Aerial
  misc_feature: MA Experiment 108504 PARAMETER Experiment Name: Zm_Drought_P Parameter: Treatment Value: Drought vs. No Drought
  misc_feature: MA Experiment ID: 108523 Result: Down-regulated in Transcription
  misc_feature: MA Experiment 108523 PARAMETER Experiment Name: Zm_42deg_Heat_P Parameter: Age (day) Value: 8
  misc_feature: MA Experiment 108523 PARAMETER Experiment Name: Zm_42deg_Heat_P Parameter: Organism Value: Zea mays
  misc_feature: MA Experiment 108523 PARAMETER Experiment Name: Zm_42deg_Heat_P Parameter: Plant Line Value: 35A19
  misc_feature: MA Experiment 108523 PARAMETER Experiment Name: Zm_42deg_Heat_P Parameter: Temperature (deg C) Value: 42 vs. 22
  misc_feature: MA Experiment 108523 PARAMETER Experiment Name: Zm_42deg_Heat_P Parameter: Timepoint (hr) Value: 6
  misc_feature: MA Experiment 108523 PARAMETER Experiment Name: Zm_42deg_Heat_P Parameter: Tissue Value: Aerial
  misc_feature: MA Experiment ID: 108528 Result: Up-regulated in Transcription
  misc_feature: MA Experiment 108528 PARAMETER Experiment Name: Zm_Imbibed_Seeds_P Parameter: Age (day) Value: 5 vs. 2
  misc_feature: MA Experiment 108528 PARAMETER Experiment Name: Zm_Imbibed_Seeds_P Parameter: Organism Value: Zea mays
  misc_feature: MA Experiment 108528 PARAMETER Experiment Name: Zm_Imbibed_Seeds_P Parameter: Plant Line Value: 35A19
  misc_feature: MA Experiment 108528 PARAMETER Experiment Name: Zm_Imbibed_Seeds_P Parameter: Tissue Value: Aerial vs. Embryo
  misc_feature: MA Experiment ID: 108529 Result: Up-regulated in Transcription
  misc_feature: MA Experiment 108529 PARAMETER Experiment Name: Zm_Imbibed_Seeds_P Parameter: Age (day) Value: 5 vs. 2
  misc_feature: MA Experiment 108529 PARAMETER Experiment Name: Zm_Imbibed_Seeds_P Parameter: Organism Value: Zea mays
  misc_feature: MA Experiment 108529 PARAMETER Experiment Name: Zm_Imbibed_Seeds_P Parameter: Plant Line Value: 35A19
  misc_feature: MA Experiment 108529 PARAMETER Experiment Name: Zm_Imbibed_Seeds_P Parameter: Tissue Value: Roots vs. Embryo
  misc_feature: MA Experiment ID: 108530 Result: Up-regulated in Transcription
  misc_feature: MA Experiment 108530 PARAMETER Experiment Name: Zm_Imbibed_Seeds_P Parameter: Age (day) Value: 6 vs. 2
  misc_feature: MA Experiment 108530 PARAMETER Experiment Name: Zm_Imbibed_Seeds_P Parameter: Organism Value: Zea mays
  misc_feature: MA Experiment 108530 PARAMETER Experiment Name: Zm_Imbibed_Seeds_P Parameter: Plant Line Value: 35A19
  misc_feature: MA Experiment 108530 PARAMETER Experiment Name: Zm_Imbibed_Seeds_P Parameter: Tissue Value: Aerial vs. Embryo
  misc_feature: MA Experiment ID: 108545 Result: Up-regulated in Transcription
  misc_feature: MA Experiment 108545 PARAMETER Experiment Name: Zm_Imbibed_Seeds_P Parameter: Age (day) Value: 3 vs. 2
  misc_feature: MA Experiment 108545 PARAMETER Experiment Name: Zm_Imbibed_Seeds_P Parameter: Organism Value: Zea mays
  misc_feature: MA Experiment 108545 PARAMETER Experiment Name: Zm_Imbibed_Seeds_P Parameter: Plant Line Value: 35A19
  misc_feature: MA Experiment 108545 PARAMETER Experiment Name: Zm_Imbibed_Seeds_P Parameter: Tissue Value: Aerial vs. Embryo
  misc_feature: MA Experiment ID: 108546 Result: Up-regulated in Transcription
  misc_feature: MA Experiment 108546 PARAMETER Experiment Name: Zm_Imbibed_Seeds_P Parameter: Age (day) Value: 3 vs. 2
  misc_feature: MA Experiment 108546 PARAMETER Experiment Name: Zm_Imbibed_Seeds_P Parameter: Organism Value: Zea mays
  misc_feature: MA Experiment 108546 PARAMETER Experiment Name: Zm_Imbibed_Seeds_P Parameter: Plant Line Value: 35A19
  misc_feature: MA Experiment 108546 PARAMETER Experiment Name: Zm_Imbibed_Seeds_P Parameter: Tissue Value: Roots vs. Embryo
  misc_feature: MA Experiment ID: 108547 Result: Up-regulated in Transcription
  misc_feature: MA Experiment 108547 PARAMETER Experiment Name: Zm_Imbibed_Seeds_P Parameter: Age (day) Value: 4 vs. 2
  misc_feature: MA Experiment 108547 PARAMETER Experiment Name: Zm_Imbibed_Seeds_P Parameter: Organism Value: Zea mays
  misc_feature: MA Experiment 108547 PARAMETER Experiment Name: Zm_Imbibed_Seeds_P Parameter: Plant Line Value: 35A19
  misc_feature: MA Experiment 108547 PARAMETER Experiment Name: Zm_Imbibed_Seeds_P Parameter: Tissue Value: Aerial vs. Embryo
  misc_feature: MA Experiment ID: 108556 Result: Up-regulated in Transcription
  misc_feature: MA Experiment 108556 PARAMETER Experiment Name: Zm_Drought_P Parameter: Age (day) Value: 9
  misc_feature: MA Experiment 108556 PARAMETER Experiment Name: Zm_Drought_P Parameter: Organism Value: Zea mays
  misc_feature: MA Experiment 108556 PARAMETER Experiment Name: Zm_Drought_P Parameter: Plant Line Value: 35A19
  misc_feature: MA Experiment 108556 PARAMETER Experiment Name: Zm_Drought_P Parameter: Timepoint (hr) Value: 24
  misc_feature: MA Experiment 108556 PARAMETER Experiment Name: Zm_Drought_P Parameter: Tissue Value: Aerial
  misc_feature: MA Experiment 108556 PARAMETER Experiment Name: Zm_Drought_P Parameter: Treatment Value: Drought vs. No Drought
  misc_feature: MA Experiment ID: 20000480 Result: Up-regulated in Transcription
  misc_feature: MA Experiment 20000480 PARAMETER Experiment Name: Zm_Drought_P Parameter: Age (day) Value: 11
  misc_feature: MA Experiment 20000480 PARAMETER Experiment Name: Zm_Drought_P Parameter: Organism Value: Zea mays
  misc_feature: MA Experiment 20000480 PARAMETER Experiment Name: Zm_Drought_P Parameter: Plant Line Value: 35A19
  misc_feature: MA Experiment 20000480 PARAMETER Experiment Name: Zm_Drought_P Parameter: Timepoint (hr) Value: 72
  misc_feature: MA Experiment 20000480 PARAMETER Experiment Name: Zm_Drought_P Parameter: Tissue Value: Aerial
  misc_feature: MA Experiment 20000480 PARAMETER Experiment Name: Zm_Drought_P Parameter: Treatment Value: Drought vs. No Drought
  misc_feature: MA Experiment ID: 20000492 Result: Down-regulated in Transcription
  misc_feature: MA Experiment 20000492 PARAMETER Experiment Name: Zm_Hybrid_Seed_Dev_P Parameter: DAP Value: 12
  misc_feature: MA Experiment 20000492 PARAMETER Experiment Name: Zm_Hybrid_Seed_Dev_P Parameter: Organism Value: Zea mays
  misc_feature: MA Experiment 20000492 PARAMETER Experiment Name: Zm_Hybrid_Seed_Dev_P Parameter: Plant Line Value: 35A19
  misc_feature: MA Experiment 20000492 PARAMETER Experiment Name: Zm_Hybrid_Seed_Dev_P Parameter: Tissue Value: Fert Kernel vs. Unfert Floret
  misc_feature: MA Experiment ID: 20000535 Result: Down-regulated in Transcription
  misc_feature: MA Experiment 20000535 PARAMETER Experiment Name: Zm_Hybrid_Seed_Dev_P Parameter: DAP Value: 30 vs. 12
  misc_feature: MA Experiment 20000535 PARAMETER Experiment Name: Zm_Hybrid_Seed_Dev_P Parameter: Organism Value: Zea mays
  misc_feature: MA Experiment 20000535 PARAMETER Experiment Name: Zm_Hybrid_Seed_Dev_P Parameter: Plant Line Value: 35A19
  misc_feature: MA Experiment 20000535 PARAMETER Experiment Name: Zm_Hybrid_Seed_Dev_P Parameter: Tissue Value: Embryo vs. Unfert Floret
atccctcgtggcctctctcccctcctcacacaggcacacacgcactttctgtcagcttcctcccctgcgccgataagcaagcccgtgagccaacagtggtgccagcggcccgagcggcgaggatgcacagcggagcgaggaagctcatgtgggggaccagcccggacaggcccgacgaccacgacgtggtcatcgtgctcgcctcgctgctgtgcgcgctcatcaccgtcctcggcatcggcctcgtggcgcggtgcgcgtgcgcgcgcgggcccagcgcgcaggcggcggccgccgccaacaggggcgtcaagaagtcggtgctgcgcaggatccccaccgtgccctacgccgcctccgccgccgcctgcagccaaggggaaggggacgacgcggacgagtgcgccatctgcctggcggagttcgaggagggcgagcccacccgcgtgctgccccagtgcggccacgccttccacgccgcctgcgtcgacaggtggctgcgcgcccactcgtcctgcccctcctgccgccggatcctctccctccagctgccgcccggcgagcggtgccgccgctgcggcgcgcggcccctggacgacggggacgctgggtggaagcccacctactacagcgccatgccgccgttcctggcgtaagcggcggaggaatcgcccgatccggaagcaaagcaaagcaaacctgtatcaattaggggatcaattaggttgtttgttgcagctgaaaacactgcactgcagcgtgcgtagtagtagtactagtaccaggctggcgtgtacagtacagtttgtaaatactcaagtaattaatatgcatgcgatgagttttggt

SEQ ID NO: 8121 - protein, 283 aa, Zea mays subsp. mays
  peptide (1)..(283): Ceres Seq. ID no. 12402387
  misc_feature (20)..(186): Pfam Name: Glycoprotein GG/GX Pfam Description: Glycoprotein GG/GX
  misc_feature (1)..(219): Homolog of NCBI NO: 11360318 NR Description: probable mucin DKFZp434C196.1 - human (fragment)
  misc_feature (59)..(231): Homolog of NCBI NO: 34395167 NR Description: hypothetical protein [Oryza sativa (japonica
IPRGLSPLLTQAHTHFLSASSPAPISKPVSQQWCQRPERRGCTAERGSSCGGPARTGPTTTTWSSCSPRCCARSSPSSASASWRGARARAGPARRRRPPPTGASRSRCCAGSPPCPTPPPPPPAAKGKGTTRTSAPSAWRSSRRASPPACCPSAATPSTPPASTGGCAPTRPAPPAAGSSPSSCRPASGAAAAARGPWTTGTLGGSPPTTAPCRRSWRKRRRNRPIRKQSKANLYQLGDQLGCLLQLKTLHCSVRSSSTSTRLACTVQFVNTQVINMHAMSFG

SEQ ID NO: 8122 - protein, 217 aa, Zea mays subsp. mays
  peptide (1)..(217): Ceres Seq. ID no. 12402388
  misc_feature (134)..(175): Pfam Name: Zinc finger, C3HC4 type (RING finger) Pfam Description: Zinc finger, C3HC4 type (RING finger)
  misc_feature (61)..(196): Homolog of NCBI NO: 15218042 NR Description: similar to putative RING zinc finger protein; id: At1g20823.1 [Arabidopsis thaliana] >gi|25402932|pir||F86340
  misc_feature (58)..(216): Homolog of NCBI NO: 32487554 NR Description: OSJNBa0013K16.6 [Oryza sativa (japonica
  misc_feature (61)..(99): Homolog of NCBI NO: 37536508 NR Description: putative ring finger protein [Oryza sativa
  misc_feature (61)..(193): Homolog of NCBI NO: 15237013 NR Description: RING-H2 finger protein RHA3b; protein id: supported by cDNA: 31493., supported by cDNA: gi_3790574
  misc_feature (52)..(206): Homolog of NCBI NO: 15223041 NR Description: putative RING zinc finger protein; protein id: supported by cDNA: 27464. [Arabidopsis thaliana]
  misc_feature (52)..(206): Homolog of NCBI NO: 21555237 NR Description: putative RING zinc finger protein [Arabidopsis
  misc_feature (59)..(193): Homolog of NCBI NO: 15227839 NR Description: putative RING zinc finger protein; protein id: supported by cDNA: gi_13877952, supported by cDNA: gi_17065625,
  misc_feature (1)..(194): Homolog of NCBI NO: 7489432 NR Description: probable ring finger protein - barley
  misc_feature (95)..(198): Homolog of NCBI NO: 37536508 NR Description: putative ring finger protein [Oryza sativa
  misc_feature (51)..(179): Homolog of NCBI NO: 15241087 NR Description: putative protein; protein id: At5g01880.1
PSWPLSPPHTGTHALSVSFLPCADKQAREPTVVPAARAARMHSGARKLMWGTSPDRPDDHDVVIVLASLLCALITVLGIGLVARCACARGPSAQAAAAANRGVKKSVLRRIPTVPYAASAAACSQGEGDDADECAICLAEFEEGEPTRVLPQCGHAFHAACVDRWLRAHSSCPSCRRILSLQLPPGERCRRCGARPLDDGDAGWKPTYYSAMPPFLA

SEQ ID NO: 8123 - protein, 177 aa, Zea mays subsp. mays
  peptide (1)..(177): Ceres Seq. ID no. 12402389
  misc_feature (94)..(135): Pfam Name: Zinc finger, C3HC4 type (RING finger) Pfam Description: Zinc finger, C3HC4 type (RING finger)
  misc_feature (18)..(176): Homolog of NCBI NO: 32487554 NR Description: OSJNBa0013K16.6 [Oryza sativa (japonica
  misc_feature (55)..(158): Homolog of NCBI NO: 37536508 NR Description: putative ring finger protein [Oryza sativa
  misc_feature (21)..(59): Homolog of NCBI NO: 37536508 NR Description: putative ring finger protein [Oryza sativa
  misc_feature (1)..(154): Homolog of NCBI NO: 7489432 NR Description: probable ring finger protein - barley
  misc_feature (21)..(153): Homolog of NCBI NO: 15237013 NR Description: RING-H2 finger protein RHA3b; protein id: supported by cDNA: 31493., supported by cDNA: gi_3790574
  misc_feature (19)..(153): Homolog of NCBI NO: 15227839 NR Description: putative RING zinc finger protein; protein id: supported by cDNA: gi_13877952, supported by cDNA: gi_17065625,
  misc_feature (12)..(166): Homolog of NCBI NO: 15223041 NR Description: putative RING zinc finger protein; protein id: supported by cDNA: 27464. [Arabidopsis thaliana]
  misc_feature (12)..(166): Homolog of NCBI NO: 21555237 NR Description: putative RING zinc finger protein [Arabidopsis
  misc_feature (21)..(156): Homolog of NCBI NO: 15218042 NR Description: similar to putative RING zinc finger protein; id: At1g20823.1 [Arabidopsis thaliana] >gi|25402932|pir||F86340
  misc_feature (11)..(139): Homolog of NCBI NO: 15241087 NR Description: putative protein; protein id: At5g01880.1
MHSGARKLMWGTSPDRPDDHDVVIVLASLLCALITVLGIGLVARCACARGPSAQAAAAANRGVKKSVLRRIPTVPYAASAAACSQGEGDDADECAICLAEFEEGEPTRVLPQCGHAFHAACVDRWLRAHSSCPSCRRILSLQLPPGERCRRCGARPLDDGDAGWKPTYYSAMPPFLA

SEQ ID NO: 8124 - DNA, 1011 bp, Zea mays subsp. mays
  misc_feature (1)..(1011): Ceres Seq. ID no. 12386530
  misc_feature: MA Experiment ID: 108504 Result: Down-regulated in Transcription
  misc_feature: MA Experiment 108504 PARAMETER Experiment Name: Zm_Drought_P Parameter: Age (day) Value: 8
  misc_feature: MA Experiment 108504 PARAMETER Experiment Name: Zm_Drought_P Parameter: Organism Value: Zea mays
  misc_feature: MA Experiment 108504 PARAMETER Experiment Name: Zm_Drought_P Parameter: Plant Line Value: 35A19
  misc_feature: MA Experiment 108504 PARAMETER Experiment Name: Zm_Drought_P Parameter: Timepoint (hr) Value: 12
  misc_feature: MA Experiment 108504 PARAMETER Experiment Name: Zm_Drought_P Parameter: Tissue Value: Aerial
  misc_feature: MA Experiment 108504 PARAMETER Experiment Name: Zm_Drought_P Parameter: Treatment Value: Drought vs. No Drought
  misc_feature: MA Experiment ID: 108528 Result: Up-regulated in Transcription
  misc_feature: MA Experiment 108528 PARAMETER Experiment Name: Zm_Imbibed_Seeds_P Parameter: Age (day) Value: 5 vs. 2
  misc_feature: MA Experiment 108528 PARAMETER Experiment Name: Zm_Imbibed_Seeds_P Parameter: Organism Value: Zea mays
  misc_feature: MA Experiment 108528 PARAMETER Experiment Name: Zm_Imbibed_Seeds_P Parameter: Plant Line Value: 35A19
  misc_feature: MA Experiment 108528 PARAMETER Experiment Name: Zm_Imbibed_Seeds_P Parameter: Tissue Value: Aerial vs. Embryo
  misc_feature: MA Experiment ID: 108530 Result: Up-regulated in Transcription
  misc_feature: MA Experiment 108530 PARAMETER Experiment Name: Zm_Imbibed_Seeds_P Parameter: Age (day) Value: 6 vs. 2
  misc_feature: MA Experiment 108530 PARAMETER Experiment Name: Zm_Imbibed_Seeds_P Parameter: Organism Value: Zea mays
  misc_feature: MA Experiment 108530 PARAMETER Experiment Name: Zm_Imbibed_Seeds_P Parameter: Plant Line Value: 35A19
  misc_feature: MA Experiment 108530 PARAMETER Experiment Name: Zm_Imbibed_Seeds_P Parameter: Tissue Value: Aerial vs. Embryo
  misc_feature: MA Experiment ID: 108534 Result: Up-regulated in Transcription
  misc_feature: MA Experiment 108534 PARAMETER Experiment Name: Zm_4deg_Cold_P Parameter: Age (hr) Value: 8
  misc_feature: MA Experiment 108534 PARAMETER Experiment Name: Zm_4deg_Cold_P Parameter: Organism Value: Zea mays
  misc_feature: MA Experiment 108534 PARAMETER Experiment Name: Zm_4deg_Cold_P Parameter: Plant Line Value: 35A19
  misc_feature: MA Experiment 108534 PARAMETER Experiment Name: Zm_4deg_Cold_P Parameter: Temperature (deg C) Value: 4 vs. 22
  misc_feature: MA Experiment 108534 PARAMETER Experiment Name: Zm_4deg_Cold_P Parameter: Timepoint (hr) Value: 6
  misc_feature: MA Experiment 108534 PARAMETER Experiment Name: Zm_4deg_Cold_P Parameter: Tissue Value: Aerial
  misc_feature: MA Experiment ID: 108547 Result: Up-regulated in Transcription
  misc_feature: MA Experiment 108547 PARAMETER Experiment Name: Zm_Imbibed_Seeds_P Parameter: Age (day) Value: 4 vs. 2
  misc_feature: MA Experiment 108547 PARAMETER Experiment Name: Zm_Imbibed_Seeds_P Parameter: Organism Value: Zea mays
  misc_feature: MA Experiment 108547 PARAMETER Experiment Name: Zm_Imbibed_Seeds_P Parameter: Plant Line Value: 35A19
  misc_feature: MA Experiment 108547 PARAMETER Experiment Name: Zm_Imbibed_Seeds_P Parameter: Tissue Value: Aerial vs. Embryo
  misc_feature: MA Experiment ID: 108556 Result: Down-regulated in Transcription
  misc_feature: MA Experiment 108556 PARAMETER Experiment Name: Zm_Drought_P Parameter: Age (day) Value: 9
  misc_feature: MA Experiment 108556 PARAMETER Experiment Name: Zm_Drought_P Parameter: Organism Value: Zea mays
  misc_feature: MA Experiment 108556 PARAMETER Experiment Name: Zm_Drought_P Parameter: Plant Line Value: 35A19
  misc_feature: MA Experiment 108556 PARAMETER Experiment Name: Zm_Drought_P Parameter: Timepoint (hr) Value: 24
  misc_feature: MA Experiment 108556 PARAMETER Experiment Name: Zm_Drought_P Parameter: Tissue Value: Aerial
  misc_feature: MA Experiment 108556 PARAMETER Experiment Name: Zm_Drought_P Parameter: Treatment Value: Drought vs. No Drought
  misc_feature: MA Experiment ID: 20000477 Result: Down-regulated in Transcription
  misc_feature: MA Experiment 20000477 PARAMETER Experiment Name: Zm_5mM_SA_P Parameter: Age (day) Value: 10
  misc_feature: MA Experiment 20000477 PARAMETER Experiment Name: Zm_5mM_SA_P Parameter: Organism Value: Zea mays
  misc_feature: MA Experiment 20000477 PARAMETER Experiment Name: Zm_5mM_SA_P Parameter: Plant Line Value: 35A19
  misc_feature: MA Experiment 20000477 PARAMETER Experiment Name: Zm_5mM_SA_P Parameter: Timepoint (hr) Value: 48
  misc_feature: MA Experiment 20000477 PARAMETER Experiment Name: Zm_5mM_SA_P Parameter: Tissue Value: Aerial
  misc_feature: MA Experiment 20000477 PARAMETER Experiment Name: Zm_5mM_SA_P Parameter: Treatment Value: 5mM SA vs. No Treatment
  misc_feature: MA Experiment ID: 20000478 Result: Down-regulated in Transcription
  misc_feature: MA Experiment 20000478 PARAMETER Experiment Name: Zm_5mM_SA_P Parameter: Age (day) Value: 11
  misc_feature: MA Experiment 20000478 PARAMETER Experiment Name: Zm_5mM_SA_P Parameter: Organism Value: Zea mays
  misc_feature: MA Experiment 20000478 PARAMETER Experiment Name: Zm_5mM_SA_P Parameter: Plant Line Value: 35A19
  misc_feature: MA Experiment 20000478 PARAMETER Experiment Name: Zm_5mM_SA_P Parameter: Timepoint (hr) Value: 72
  misc_feature: MA Experiment 20000478 PARAMETER Experiment Name: Zm_5mM_SA_P Parameter: Tissue Value: Aerial
  misc_feature: MA Experiment 20000478 PARAMETER Experiment Name: Zm_5mM_SA_P Parameter: Treatment Value: 5mM SA vs. No Treatment
  misc_feature: MA Experiment ID: 20000479 Result: Down-regulated in Transcription
  misc_feature: MA Experiment 20000479 PARAMETER Experiment Name: Zm_Drought_P Parameter: Age (day) Value: 10
  misc_feature: MA Experiment 20000479 PARAMETER Experiment Name: Zm_Drought_P Parameter: Organism Value: Zea mays
  misc_feature: MA Experiment 20000479 PARAMETER Experiment Name: Zm_Drought_P Parameter: Plant Line Value: 35A19
  misc_feature: MA Experiment 20000479 PARAMETER Experiment Name: Zm_Drought_P Parameter: Timepoint (hr) Value: 48
  misc_feature: MA Experiment 20000479 PARAMETER Experiment Name: Zm_Drought_P Parameter: Tissue Value: Aerial
  misc_feature: MA Experiment 20000479 PARAMETER Experiment Name: Zm_Drought_P Parameter: Treatment Value: Drought vs. No Drought
  misc_feature: MA Experiment ID: 20000480 Result: Down-regulated in Transcription
  misc_feature: MA Experiment 20000480 PARAMETER Experiment Name: Zm_Drought_P Parameter: Age (day) Value: 11
  misc_feature: MA Experiment 20000480 PARAMETER Experiment Name: Zm_Drought_P Parameter: Organism Value: Zea mays
  misc_feature: MA Experiment 20000480 PARAMETER Experiment Name: Zm_Drought_P Parameter: Plant Line Value: 35A19
  misc_feature: MA Experiment 20000480 PARAMETER Experiment Name: Zm_Drought_P Parameter: Timepoint (hr) Value: 72
  misc_feature: MA Experiment 20000480 PARAMETER Experiment Name: Zm_Drought_P Parameter: Tissue Value: Aerial
  misc_feature: MA Experiment 20000480 PARAMETER Experiment Name: Zm_Drought_P Parameter: Treatment Value: Drought vs. No Drought
  misc_feature: MA Experiment ID: 20000535 Result: Down-regulated in Transcription
  misc_feature: MA Experiment 20000535 PARAMETER Experiment Name: Zm_Hybrid_Seed_Dev_P Parameter: DAP Value: 30 vs. 12
  misc_feature: MA Experiment 20000535 PARAMETER Experiment Name: Zm_Hybrid_Seed_Dev_P Parameter: Organism Value: Zea mays
  misc_feature: MA Experiment 20000535 PARAMETER Experiment Name: Zm_Hybrid_Seed_Dev_P Parameter: Plant Line Value: 35A19
  misc_feature: MA Experiment 20000535 PARAMETER Experiment Name: Zm_Hybrid_Seed_Dev_P Parameter: Tissue Value: Embryo vs. Unfert Floret
gaaattgttcctaatgttgttggcgccataagctcgggcatcacggaccttataaatcttggagcaaagaagttagttgttccagggaacttcccaatagggtgtgtcccattatatcttgcaatctttcagagccaaaaggagggttactatgaggaacaaacaggctgcattaagtggctcaatgaatttgctgagtaccataataggatgcttcaggaggagttggagaaactcaggaatcttcaccctgatgtaaccatcatttatgctgattattacggtgctgcattgaacatattccgtgccccactcaagtttggcttcacagtcccactgaatgcgtgctgcggaagtgacgctccgtacaactgttccccttcaatactgtgcgggcgtcctggatctacagtgttccctgacccatcaaaatacatctcatgggatggtctacacttcaccgaggcgagttacaaagttgtcatccaaggagtactaggggggtacgccaaacctcctctttcagaagcctgcaagggtgcggagttcaaagtttctcaacttcaccaatgtacagataatccaacaaacaccgtatcatacgatgccttgagctcttttatttgatctgatgagctcaagtacttttagatttgtgctggtaaaaaaagtgcagtttagagttacagtgggcagtgtagatgctgcaggaccgggtatcttggacacttctcagagcggagaagagatccatcgatctagagtcatgtagttctacaatcaacttggctgctgggaggaggtaaaaaaaggtggggattttgtagtgtggaaatttgcaatcaccgaagggatacaggtggtcatactgctatataggaacctagatctatgattctgcttctgagggcaatgtatgcagatatgggctcagttgccttttaacagatacatgcatatatacagtgtaaatttgttgattcacattaaccaggataataaccgttgtcc

SEQ ID NO: 8125 - protein, 208 aa, Zea mays subsp. mays
  peptide (1)..(208): Ceres Seq. ID no. 12386531
  misc_feature (4)..(165): Pfam Name: GDSL-like Lipase/Acylhydrolase Pfam Description: GDSL-like Lipase/Acylhydrolase
  misc_feature (4)..(174): Homolog of NCBI NO: 34911800 NR Description: lipase-like protein [Oryza sativa (japonica
  misc_feature (1)..(189): Homolog of NCBI NO: 15218731 NR Description: lipase, putative; protein id: At1g28600.1, by cDNA: 37307., supported by cDNA: gi_14326569 [Arabidopsis >gi|14326570|gb|AAK60329.1|AF385739_1 At1g28600/F1K23_6
  misc_feature (1)..(189): Homolog of NCBI NO: 21593234 NR Description: lipase, putative [Arabidopsis thaliana]
  misc_feature (1)..(192): Homolog of NCBI NO: 10764858 NR Description: F1K23.17 [Arabidopsis thaliana]
  misc_feature (4)..(178): Homolog of NCBI NO: 34911804 NR Description: lipase-like protein [Oryza sativa (japonica
  misc_feature (1)..(189): Homolog of NCBI NO: 15225872 NR Description: putative lipase; protein id: At2g27360.1
  misc_feature (1)..(188): Homolog of NCBI NO: 12597843 NR Description: lipase, putative [Arabidopsis thaliana]
  misc_feature (1)..(182): Homolog of NCBI NO: 15218728 NR Description: lipase, putative; protein id: At1g28590.1
  misc_feature (1)..(182): Homolog of NCBI NO: 19347801 NR Description: putative lipase [Arabidopsis thaliana]
  misc_feature (1)..(188): Homolog of NCBI NO: 12322540 NR Description: unknown protein [Arabidopsis thaliana]
EIVPNVVGAISSGITDLINLGAKKLVVPGNFPIGCVPLYLAIFQSQKEGYYEEQTGCIKWLNEFAEYHNRMLQEELEKLRNLHPDVTIIYADYYGAALNIFRAPLKFGFTVPLNACCGSDAPYNCSPSILCGRPGSTVFPDPSKYISWDGLHFTEASYKVVIQGVLGGYAKPPLSEACKGAEFKVSQLHQCTDNPTNTVSYDALSSFI

SEQ ID NO: 8126 - protein, 138 aa, Zea mays subsp. mays
  peptide (1)..(138): Ceres Seq. ID no. 12386532
  misc_feature (1)..(95): Pfam Name: GDSL-like Lipase/Acylhydrolase Pfam Description: GDSL-like Lipase/Acylhydrolase
  misc_feature (1)..(104): Homolog of NCBI NO: 34911800 NR Description: lipase-like protein [Oryza sativa (japonica
  misc_feature (1)..(119): Homolog of NCBI NO: 15218731 NR Description: lipase, putative; protein id: At1g28600.1, by cDNA: 37307., supported by cDNA: gi_14326569 [Arabidopsis >gi|14326570|gb|AAK60329.1|AF385739_1 At1g28600/F1K23_6
  misc_feature (1)..(119): Homolog of NCBI NO: 21593234 NR Description: lipase, putative [Arabidopsis thaliana]
  misc_feature (1)..(122): Homolog of NCBI NO: 10764858 NR Description: F1K23.17 [Arabidopsis thaliana]
  misc_feature (1)..(108): Homolog of NCBI NO: 34911804 NR Description: lipase-like protein [Oryza sativa (japonica
  misc_feature (1)..(119): Homolog of NCBI NO: 15225872 NR Description: putative lipase; protein id: At2g27360.1
  misc_feature (1)..(118): Homolog of NCBI NO: 12597843 NR Description: lipase, putative [Arabidopsis thaliana]
  misc_feature (1)..(112): Homolog of NCBI NO: 15218728 NR Description: lipase, putative; protein id: At1g28590.1
  misc_feature (1)..(112): Homolog of NCBI NO: 19347801 NR Description: putative lipase [Arabidopsis thaliana]
  misc_feature (1)..(118): Homolog of NCBI NO: 12322540 NR Description: unknown protein [Arabidopsis thaliana]
MLQEELEKLRNLHPDVTIIYADYYGAALNIFRAPLKFGFTVPLNACCGSDAPYNCSPSILCGRPGSTVFPDPSKYISWDGLHFTEASYKVVIQGVLGGYAKPPLSEACKGAEFKVSQLHQCTDNPTNTVSYDALSSFI

SEQ ID NO: 8127 - DNA, 474 bp, Zea mays subsp. mays
  misc_feature (1)..(474): Ceres Seq. ID no. 1423771
  misc_feature: MA Experiment ID: 108522 Result: Down-regulated in Transcription
  misc_feature: MA Experiment 108522 PARAMETER Experiment Name: Zm_42deg_Heat_P Parameter: Age (day) Value: 8
  misc_feature: MA Experiment 108522 PARAMETER Experiment Name: Zm_42deg_Heat_P Parameter: Organism Value: Zea mays
  misc_feature: MA Experiment 108522 PARAMETER Experiment Name: Zm_42deg_Heat_P Parameter: Plant Line Value: 35A19
  misc_feature: MA Experiment 108522 PARAMETER Experiment Name: Zm_42deg_Heat_P Parameter: Temperature (deg C) Value: 42 vs. 22
  misc_feature: MA Experiment 108522 PARAMETER Experiment Name: Zm_42deg_Heat_P Parameter: Timepoint (hr) Value: 1
  misc_feature: MA Experiment 108522 PARAMETER Experiment Name: Zm_42deg_Heat_P Parameter: Tissue Value: Aerial
  misc_feature: MA Experiment ID: 108523 Result: Down-regulated in Transcription
  misc_feature: MA Experiment 108523 PARAMETER Experiment Name: Zm_42deg_Heat_P Parameter: Age (day) Value: 8
  misc_feature: MA Experiment 108523 PARAMETER Experiment Name: Zm_42deg_Heat_P Parameter: Organism Value: Zea mays
  misc_feature: MA Experiment 108523 PARAMETER Experiment Name: Zm_42deg_Heat_P Parameter: Plant Line Value: 35A19
  misc_feature: MA Experiment 108523 PARAMETER Experiment Name: Zm_42deg_Heat_P Parameter: Temperature (deg C) Value: 42 vs. 22
  misc_feature: MA Experiment 108523 PARAMETER Experiment Name: Zm_42deg_Heat_P Parameter: Timepoint (hr) Value: 6
  misc_feature: MA Experiment 108523 PARAMETER Experiment Name: Zm_42deg_Heat_P Parameter: Tissue Value: Aerial
  misc_feature: MA Experiment ID: 108544 Result: Up-regulated in Transcription
accctacctcacaagtccaaatcagtttgtytgctccgcccgttgcccgtggcccgtcggtctctcttgcagtctcgccgctccccttcctcccccgcagaatccgaatcagtaagtccggcgacctaggtctctcggcttgtccgcagcccgccggtcagtaatggcgcaggatgatccggttgtttctgctcagtggctgcacgagcacctagggatgcctgatgttaaggttttggatgcttcctggtacatgccggtagagaacagggatccatggaaagaatatcaggtggcacacatccccggtgcgctattcttcgacttagatggcatagttgatcggacaactgatttaccgcacatgctgccatcagaagaggcttttgcagcagcaatttctgagctggatataaaaaaccaggataaagttattgtctatgatggaagggattcttcagtgcacctcgtgtt

SEQ ID NO: 8128 - protein, 103 aa, Zea mays subsp. mays
  peptide (1)..(103): Ceres Seq. ID no. 1423772
  misc_feature (9)..(96): Pfam Name: Rhodanese-like domain Pfam Description: Rhodanese-like domain
  misc_feature (1)..(96): Homolog of NCBI NO: 14571545 NR Description: thiosulfate transferase [Triticum aestivum]
  misc_feature (4)..(96): Homolog of NCBI NO: 4406372 NR Description: thiosulfate sulfurtransferase [Datisca glomerata]
  misc_feature (1)..(96): Homolog of NCBI NO: 18412307 NR Description: mercaptopyruvate sulfurtransferase (Mst1/Rdh1); id: At1g79230.1, supported by cDNA: 32130., supported by cDNA:
  misc_feature (1)..(95): Homolog of NCBI NO: 18394364 NR Description: mercaptopyruvate sulfurtransferase (Mst2/Rdh2); id: At1g16460.2, supported by cDNA: gi_6009982 [Arabidopsis >gi|25288790|pir||T52663 thiosulfate sulfurtransferase (EC
  misc_feature (1)..(95): Homolog of NCBI NO: 25288797 NR Description: hypothetical protein F3O9.26 [imported] - thaliana >gi|4966366|gb|AAD34697.1|AC006341_25 Similar to thiosulfate sulfurtransferase (TST) from Datisca glomerata and
  misc_feature (1)..(95): Homolog of NCBI NO: 30684873 NR Description: mercaptopyruvate sulfurtransferase (Mst2/Rdh2)
  misc_feature (1)..(95): Homolog of NCBI NO: 25456716 NR Description: thiosulfate sulfurtransferase (EC 2.8.1.1)
  misc_feature (1)..(96): Homolog of NCBI NO: 25288794 NR Description: thiosulfate sulfurtransferase (EC 2.8.1.1) Mst1
  misc_feature (5)..(94): Homolog of NCBI NO: 16125674 NR Description: rhodanese family protein [Caulobacter crescentus
  misc_feature (7)..(95): Homolog of NCBI NO: 15965374 NR Description: PUTATIVE THIOSULFATE SULFURTRANSFERASE PROTEIN meliloti] >gi|15074554|emb|CAC46200.1| PUTATIVE THIOSULFATE
MAQDDPVVSAQWLHEHLGMPDVKVLDASWYMPVENRDPWKEYQVAHIPGALFFDLDGIVDRTTDLPHMLPSEEAFAAAISELDIKNQDKVIVYDGRDSSVHLV

SEQ ID NO: 8129 - protein, 85 aa, Zea mays subsp. mays
  peptide (1)..(85): Ceres Seq. ID no. 1423773
  misc_feature (1)..(78): Pfam Name: Rhodanese-like domain Pfam Description: Rhodanese-like domain
  misc_feature (1)..(78): Homolog of NCBI NO: 14571545 NR Description: thiosulfate transferase [Triticum aestivum]
  misc_feature (1)..(78): Homolog of NCBI NO: 4406372 NR Description: thiosulfate sulfurtransferase [Datisca glomerata]
  misc_feature (1)..(78): Homolog of NCBI NO: 18412307 NR Description: mercaptopyruvate sulfurtransferase (Mst1/Rdh1); id: At1g79230.1, supported by cDNA: 32130., supported by cDNA:
  misc_feature (1)..(77): Homolog of NCBI NO: 18394364 NR Description: mercaptopyruvate sulfurtransferase (Mst2/Rdh2); id: At1g16460.2, supported by cDNA: gi_6009982 [Arabidopsis >gi|25288790|pir||T52663 thiosulfate sulfurtransferase (EC
  misc_feature (1)..(77): Homolog of NCBI NO: 25288797 NR Description: hypothetical protein F3O9.26 [imported] - thaliana >gi|4966366|gb|AAD34697.1|AC006341_25 Similar to thiosulfate sulfurtransferase (TST) from Datisca glomerata and
  misc_feature (1)..(77): Homolog of NCBI NO: 30684873 NR Description: mercaptopyruvate sulfurtransferase (Mst2/Rdh2)
  misc_feature (1)..(77): Homolog of NCBI NO: 25456716 NR Description: thiosulfate sulfurtransferase (EC 2.8.1.1)
  misc_feature (1)..(78): Homolog of NCBI NO: 25288794 NR Description: thiosulfate sulfurtransferase (EC 2.8.1.1) Mst1
  misc_feature (1)..(76): Homolog of NCBI NO: 16125674 NR Description: rhodanese family protein [Caulobacter crescentus
  misc_feature (1)..(77): Homolog of NCBI NO: 15965374 NR Description: PUTATIVE THIOSULFATE SULFURTRANSFERASE PROTEIN meliloti] >gi|15074554|emb|CAC46200.1| PUTATIVE THIOSULFATE
MPDVKVLDASWYMPVENRDPWKEYQVAHIPGALFFDLDGIVDRTTDLPHMLPSEEAFAAAISELDIKNQDKVIVYDGRDSSVHLV

SEQ ID NO: 8130 - protein, 73 aa, Zea mays subsp. mays
  peptide (1)..(73): Ceres Seq. ID no. 1423774
  misc_feature (1)..(66): Pfam Name: Rhodanese-like domain Pfam Description: Rhodanese-like domain
  misc_feature (1)..(66): Homolog of NCBI NO: 14571545 NR Description: thiosulfate transferase [Triticum aestivum]
  misc_feature (1)..(66): Homolog of NCBI NO: 4406372 NR Description: thiosulfate sulfurtransferase [Datisca glomerata]
  misc_feature (1)..(66): Homolog of NCBI NO: 18412307 NR Description: mercaptopyruvate sulfurtransferase (Mst1/Rdh1); id: At1g79230.1, supported by cDNA: 32130., supported by cDNA:
  misc_feature (1)..(65): Homolog of NCBI NO: 18394364 NR Description: mercaptopyruvate sulfurtransferase (Mst2/Rdh2); id: At1g16460.2, supported by cDNA: gi_6009982 [Arabidopsis >gi|25288790|pir||T52663 thiosulfate sulfurtransferase (EC
  misc_feature (1)..(65): Homolog of NCBI NO: 25288797 NR Description: hypothetical protein F3O9.26 [imported] - thaliana >gi|4966366|gb|AAD34697.1|AC006341_25 Similar to thiosulfate sulfurtransferase (TST) from Datisca glomerata and
  misc_feature (1)..(65): Homolog of NCBI NO: 30684873 NR Description: mercaptopyruvate sulfurtransferase (Mst2/Rdh2)
  misc_feature (1)..(65): Homolog of NCBI NO: 25456716 NR Description: thiosulfate sulfurtransferase (EC 2.8.1.1)
  misc_feature (1)..(66): Homolog of NCBI NO: 25288794 NR Description: thiosulfate sulfurtransferase (EC 2.8.1.1) Mst1
  misc_feature (1)..(64): Homolog of NCBI NO: 16125674 NR Description: rhodanese family protein [Caulobacter crescentus
  misc_feature (1)..(65): Homolog of NCBI NO: 15965374 NR Description: PUTATIVE THIOSULFATE SULFURTRANSFERASE PROTEIN meliloti] >gi|15074554|emb|CAC46200.1| PUTATIVE THIOSULFATE
MPVENRDPWKEYQVAHIPGALFFDLDGIVDRTTDLPHMLPSEEAFAAAISELDIKNQDKVIVYDGRDSSVHLV

SEQ ID NO: 8131 - DNA, 789 bp, Zea mays subsp. mays
  misc_feature (1)..(789): Ceres Seq. ID no. 12341823
  misc_feature: MA Experiment ID: 108522 Result: Down-regulated in Transcription
  misc_feature: MA Experiment 108522 PARAMETER Experiment Name: Zm_42deg_Heat_P Parameter: Age (day) Value: 8
  misc_feature: MA Experiment 108522 PARAMETER Experiment Name: Zm_42deg_Heat_P Parameter: Organism Value: Zea mays
  misc_feature: MA Experiment 108522 PARAMETER Experiment Name: Zm_42deg_Heat_P Parameter: Plant Line Value: 35A19
  misc_feature: MA Experiment 108522 PARAMETER Experiment Name: Zm_42deg_Heat_P Parameter: Temperature (deg C) Value: 42 vs. 22
  misc_feature: MA Experiment 108522 PARAMETER Experiment Name: Zm_42deg_Heat_P Parameter: Timepoint (hr) Value: 1
  misc_feature: MA Experiment 108522 PARAMETER Experiment Name: Zm_42deg_Heat_P Parameter: Tissue Value: Aerial
  misc_feature: MA Experiment ID: 108535 Result: Up-regulated in Transcription
  misc_feature: MA Experiment 108535 PARAMETER Experiment Name: Zm_Meristem_P Parameter: Age (day) Value: 8
  misc_feature: MA Experiment 108535 PARAMETER Experiment Name: Zm_Meristem_P Parameter: Organism Value: Zea mays
  misc_feature: MA Experiment 108535 PARAMETER Experiment Name: Zm_Meristem_P Parameter: Plant Line Value: 35A19
  misc_feature: MA Experiment 108535 PARAMETER Experiment Name: Zm_Meristem_P Parameter: Tissue Value: Root Meristem vs. Above Root Meristem
  misc_feature: MA Experiment ID: 108556 Result: Down-regulated in Transcription
  misc_feature: MA Experiment 108556 PARAMETER Experiment Name: Zm_Drought_P Parameter: Age (day) Value: 9
  misc_feature: MA Experiment 108556 PARAMETER Experiment Name: Zm_Drought_P Parameter: Organism Value: Zea mays
  misc_feature: MA Experiment 108556 PARAMETER Experiment Name: Zm_Drought_P Parameter: Plant Line Value: 35A19
  misc_feature: MA Experiment 108556 PARAMETER Experiment Name: Zm_Drought_P Parameter: Timepoint (hr) Value: 24
  misc_feature: MA Experiment 108556 PARAMETER Experiment Name: Zm_Drought_P Parameter: Tissue Value: Aerial
  misc_feature: MA Experiment 108556 PARAMETER Experiment Name: Zm_Drought_P Parameter: Treatment Value: Drought vs. No Drought
  misc_feature: MA Experiment ID: 20000534 Result: Down-regulated in Transcription
  misc_feature: MA Experiment 20000534 PARAMETER Experiment Name: Zm_Hybrid_Pollen_P Parameter: Age (day) Value: 8
  misc_feature: MA Experiment 20000534 PARAMETER Experiment Name: Zm_Hybrid_Pollen_P Parameter: Organism Value: Zea mays
  misc_feature: MA Experiment 20000534 PARAMETER Experiment Name: Zm_Hybrid_Pollen_P Parameter: Plant Line Value: 35A19
  misc_feature: MA Experiment 20000534 PARAMETER Experiment Name: Zm_Hybrid_Pollen_P Parameter: Tissue Value: Pollen vs. Aerial
gaactagagaaaagcaacttgcaggcaaaatcaaaggaaactgaagaagctggactcaaaatgctgagaaagagtttaaatttcaaggcaacaccaatgcccagcttttataaggaaccacctccccccaaggttgagttgaagaagatacctacaacaagagctaggtcaccaaagcttggtcgctccaagaacacatcctcaggagggacagaagggaatccaaatcctccagctcgttcagctcgactgagtctcgatgaaagggtctcccaaaatggtgtcaagaaagcacctgctgcaaatgcagcgaagaagccccagcggaaatctctacctaaactgccttcagagcaaacaaccaaagttgacattgcaccatctgttccatctgcagaagagctagaaaacaagttgccgacgaagggtggtcttgatcgagagccgatccgcgctcaaattacacctgacgaacctggactcactgcataggaacctatcaagccgactcctatgaaaggagggagttgtgccccagcttcctttatcacattttgctatttctgcagtaaactgctggctggtattatgtattagaattagtctcagcaccaggagcttgaagagtggcaagtgacaccgtgtattctttatcttagtttctgttgacataccaggtatttgtagttggcagacaggcagaatttcatattattctccagggctaccagtcaattaagttgccgtccaagtaagatatgtacacgattttgcaaagctttgtgattc

SEQ ID NO: 8132 - protein, 163 aa, Zea mays subsp. mays
  peptide (1)..(163): Ceres Seq. ID no. 12341824
  misc_feature (1)..(148): Homolog of NCBI NO: 18417986 NR Description: putative protein; protein id: At4g32330.1, by cDNA: gi_14334555, supported by cDNA: gi_21280970 [Arabidopsis >gi|14334556|gb|AAK59686.1| unknown protein [Arabidopsis
  misc_feature (1)..(142): Homolog of NCBI NO: 15224733 NR Description: unknown protein; protein id: At2g25480.1
  misc_feature (1)..(158): Homolog of NCBI NO: 18403980 NR Description: expressed protein; protein id: At2g35880.1, by cDNA: gi_16209719 [Arabidopsis thaliana] At2g35880/F11F19.21 [Arabidopsis thaliana]
  misc_feature (1)..(158): Homolog of NCBI NO: 25408425 NR Description: hypothetical protein At2g35880 [imported] -
  misc_feature (1)..(69): Homolog of NCBI NO: 32395575 NR Description: seed specific protein Bn15D14A [Brassica napus]
  misc_feature (1)..(114): Homolog of NCBI NO: 34393229 NR Description: putative seed specific protein [Oryza sativa
  misc_feature (1)..(106): Homolog of NCBI NO: 34897180 NR Description: unknown protein [Oryza sativa (japonica
  misc_feature (1)..(69): Homolog of NCBI NO: 15228950 NR Description: unknown protein; protein id: At3g23090.1 thaliana] >gi|27765054|gb|AAO23648.1| At3g23090 [Arabidopsis
  misc_feature (1)..(69): Homolog of NCBI NO: 9294199 NR Description: gb|AAF04893.1~gene_id:MXC7.13~similar to unknown
  misc_feature (1)..(67): Homolog of NCBI NO: 28453880 NR Description: WAVE-DAMPENED2 [Arabidopsis thaliana]
ELEKSNLQAKSKETEEAGLKMLRKSLNFKATPMPSFYKEPPPPKVELKKIPTTRARSPKLGRSKNTSSGGTEGNPNPPARSARLSLDERVSQNGVKKAPAANAAKKPQRKSLPKLPSEQTTKVDIAPSVPSAEELENKLPTKGGLDREPIRAQITPDEPGLTA

SEQ ID NO: 8133 - protein, 143 aa, Zea mays subsp. mays
  peptide (1)..(143): Ceres Seq. ID no. 12341825
  misc_feature (1)..(128): Homolog of NCBI NO: 18417986 NR Description: putative protein; protein id: At4g32330.1, by cDNA: gi_14334555, supported by cDNA: gi_21280970 [Arabidopsis >gi|14334556|gb|AAK59686.1| unknown protein [Arabidopsis
  misc_feature (1)..(122): Homolog of NCBI NO: 15224733 NR Description: unknown protein; protein id: At2g25480.1
  misc_feature (1)..(138): Homolog of NCBI NO: 18403980 NR Description: expressed protein; protein id: At2g35880.1, by cDNA: gi_16209719 [Arabidopsis thaliana] At2g35880/F11F19.21 [Arabidopsis thaliana]
  misc_feature (1)..(138): Homolog of NCBI NO: 25408425 NR Description: hypothetical protein At2g35880 [imported] -
  misc_feature (1)..(49): Homolog of NCBI NO: 32395575 NR Description: seed specific protein Bn15D14A [Brassica napus]
  misc_feature (1)..(94): Homolog of NCBI NO: 34393229 NR Description: putative seed specific protein [Oryza sativa
  misc_feature (1)..(86): Homolog of NCBI NO: 34897180 NR Description: unknown protein [Oryza sativa (japonica
  misc_feature (1)..(49): Homolog of NCBI NO: 15228950 NR Description: unknown protein; protein id: At3g23090.1 thaliana] >gi|27765054|gb|AAO23648.1| At3g23090 [Arabidopsis
  misc_feature (1)..(49): Homolog of NCBI NO: 9294199 NR Description: gb|AAF04893.1~gene_id:MXC7.13~similar to unknown
  misc_feature (1)..(47): Homolog of NCBI NO: 28453880 NR Description: WAVE-DAMPENED2 [Arabidopsis thaliana]
MLRKSLNFKATPMPSFYKEPPPPKVELKKIPTTRARSPKLGRSKNTSSGGTEGNPNPPARSARLSLDERVSQNGVKKAPAANAAKKPQRKSLPKLPSEQTTKVDIAPSVPSAEELENKLPTKGGLDREPIRAQITPDEPGLTA

SEQ ID NO: 8134 - protein, 131 aa, Zea mays subsp. mays
  peptide (1)..(131): Ceres Seq. ID no. 12341826
  misc_feature (1)..(116): Homolog of NCBI NO: 18417986 NR Description: putative protein; protein id: At4g32330.1, by cDNA: gi_14334555, supported by cDNA: gi_21280970 [Arabidopsis >gi|14334556|gb|AAK59686.1| unknown protein [Arabidopsis
  misc_feature (1)..(110): Homolog of NCBI NO: 15224733 NR Description: unknown protein; protein id: At2g25480.1
  misc_feature (1)..(126): Homolog of NCBI NO: 18403980 NR Description: expressed protein; protein id: At2g35880.1, by cDNA: gi_16209719 [Arabidopsis thaliana] At2g35880/F11F19.21 [Arabidopsis thaliana]
  misc_feature (1)..(126): Homolog of NCBI NO: 25408425 NR Description: hypothetical protein At2g35880 [imported] -
  misc_feature (1)..(37): Homolog of NCBI NO: 32395575 NR Description: seed specific protein Bn15D14A [Brassica napus]
  misc_feature (1)..(82): Homolog of NCBI NO: 34393229 NR Description: putative seed specific protein [Oryza sativa
  misc_feature (1)..(74): Homolog of NCBI NO: 34897180 NR Description: unknown protein [Oryza sativa (japonica
  misc_feature (1)..(37): Homolog of NCBI NO: 15228950 NR Description: unknown protein; protein id: At3g23090.1 thaliana] >gi|27765054|gb|AAO23648.1| At3g23090 [Arabidopsis
  misc_feature (1)..(37): Homolog of NCBI NO: 9294199 NR Description: gb|AAF04893.1~gene_id:MXC7.13~similar to unknown
  misc_feature (1)..(35): Homolog of NCBI NO: 28453880 NR Description: WAVE-DAMPENED2 [Arabidopsis thaliana]
MPSFYKEPPPPKVELKKIPTTRARSPKLGRSKNTSSGGTEGNPNPPARSARLSLDERVSQNGVKKAPAANAAKKPQRKSLPKLPSEQTTKVDIAPSVPSAEELENKLPTKGGLDREPIRAQITPDEPGLTA

SEQ ID NO: 8135 - DNA, 476 bp, Zea mays subsp. mays
  misc_feature (1)..(476): Ceres Seq. ID no. 5005895
  misc_feature: MA Experiment ID: 108535 Result: Up-regulated in Transcription
  misc_feature: MA Experiment 108535 PARAMETER Experiment Name: Zm_Meristem_P Parameter: Age (day) Value: 8
  misc_feature: MA Experiment 108535 PARAMETER Experiment Name: Zm_Meristem_P Parameter: Organism Value: Zea mays
  misc_feature: MA Experiment 108535 PARAMETER Experiment Name: Zm_Meristem_P Parameter: Plant Line Value: 35A19
  misc_feature: MA Experiment 108535 PARAMETER Experiment Name: Zm_Meristem_P Parameter: Tissue Value: Root Meristem vs. Above Root Meristem
  misc_feature: MA Experiment ID: 20000487 Result: Up-regulated in Transcription
  misc_feature: MA Experiment 20000487 PARAMETER Experiment Name: Zm_50mM_NH4NO3_L_to_H_P Parameter: Organism Value: Zea mays
  misc_feature: MA Experiment 20000487 PARAMETER Experiment Name: Zm_50mM_NH4NO3_L_to_H_P Parameter: Timepoint (hr) Value: 4
  misc_feature: MA Experiment 20000487 PARAMETER Experiment Name: Zm_50mM_NH4NO3_L_to_H_P Parameter: Tissue Value: Leaves
  misc_feature: MA Experiment 20000487 PARAMETER Experiment Name: Zm_50mM_NH4NO3_L_to_H_P Parameter: Treatment Value: 50mM NH4NO3 vs. 100mM Mannitol
  misc_feature: MA Experiment ID: 20000535 Result: Up-regulated in Transcription
  misc_feature: MA Experiment 20000535 PARAMETER Experiment Name: Zm_Hybrid_Seed_Dev_P Parameter: DAP Value: 30 vs. 12
  misc_feature: MA Experiment 20000535 PARAMETER Experiment Name: Zm_Hybrid_Seed_Dev_P Parameter: Organism Value: Zea mays
  misc_feature: MA Experiment 20000535 PARAMETER Experiment Name: Zm_Hybrid_Seed_Dev_P Parameter: Plant Line Value: 35A19
  misc_feature: MA Experiment 20000535 PARAMETER Experiment Name: Zm_Hybrid_Seed_Dev_P Parameter: Tissue Value: Embryo vs. Unfert Floret
catcacccgcgtccgccaccgccgccgcctttcgtaccgcggcccctaaacccctttcctcgttcccctccgtctctcagttaggcacaatgatgctagctaataagcttggtggtttgctcaagaatgctacgagttcaaagagttcaaatatgtctgtctaccaagcaatcagatgcatgtcatcatccaagctttttgttggagggctttcttatggaaccgatgatcacagtctcagagacgagtttgccaaatatggacaagttattgaagctaagattatccttgatcgtgagtctgggaggtccagaggttttggctttataacttacacgtcttctgaggaggcttcggctgccatcactgccatggatggaaagactctggatggacggaacatacgggttaatcatgctaacgagaggacaggtggcttccgcagcagtggtggcggctatggtggcggtggctat

SEQ ID NO: 8136 - protein, 158 aa, Zea mays subsp. mays
  peptide (1)..(158): Ceres Seq. ID no. 5005896
  misc_feature (65)..(136): Pfam Name: RNA recognition motif. (a.k.a. RRM, RBD, or RNP domain) Pfam Description: RNA recognition motif. (a.k.a. RRM, RBD, or RNP
  misc_feature (30)..(157): Homolog of NCBI NO: 15239505 NR Description: glycine-rich RNA-binding protein; protein id: supported by cDNA: gi_16974555 [Arabidopsis thaliana] contains similarity to RNA binding protein~gene_id:MAF19.4
  misc_feature (30)..(157): Homolog of NCBI NO: 15822703 NR Description: RNA-binding protein precursor [Nicotiana tabacum]
  misc_feature (30)..(157): Homolog of NCBI NO: 15822705 NR Description: RNA-binding protein precursor [Solanum tuberosum]
  misc_feature (30)..(156): Homolog of NCBI NO: 7439994 NR Description: glycine-rich RNA-binding protein - garden pea
  misc_feature (30)..(157): Homolog of NCBI NO: 1084415 NR Description: RNA-binding protein - wood tobacco
  misc_feature (30)..(156): Homolog of NCBI NO: 7439995 NR Description: RNA binding protein 3 - wood tobacco
  misc_feature (30)..(157): Homolog of NCBI NO: 15221187 NR Description: glycine-rich RNA-binding protein; protein id:
  misc_feature (30)..(157): Homolog of NCBI NO: 15236359 NR Description: glycine-rich RNA-binding protein AtGRP2; protein At4g13850.1, supported by cDNA: 16314., supported by cDNA:
  misc_feature (30)..(157): Homolog of NCBI NO: 2826811 NR Description: AtGRP2 [Arabidopsis thaliana]
  misc_feature (30)..(157): Homolog of NCBI NO: 30682622 NR Description: glycine-rich RNA-binding protein (AtGRP2)
SPASATAAAFRTAAPKPLSSFPSVSQLGTMMLANKLGGLLKNATSSKSSNMSVYQAIRCMSSSKLFVGGLSYGTDDHSLRDEFAKYGQVIEAKIILDRESGRSRGFGFITYTSSEEASAAITAMDGKTLDGRNIRVNHANERTGGFRSSGGGYGGGGY

SEQ ID NO: 8137 - protein, 129 aa, Zea mays subsp. mays
  peptide (1)..(129): Ceres Seq. ID no. 5005897
  misc_feature (36)..(107): Pfam Name: RNA recognition motif. (a.k.a. RRM, RBD, or RNP domain) Pfam Description: RNA recognition motif. (a.k.a. RRM, RBD, or RNP
  misc_feature (1)..(128): Homolog of NCBI NO: 15221187 NR Description: glycine-rich RNA-binding protein; protein id:
  misc_feature (1)..(128): Homolog of NCBI NO: 15236359 NR Description: glycine-rich RNA-binding protein AtGRP2; protein At4g13850.1, supported by cDNA: 16314., supported by cDNA:
  misc_feature (1)..(128): Homolog of NCBI NO: 15239505 NR Description: glycine-rich RNA-binding protein; protein id: supported by cDNA: gi_16974555 [Arabidopsis thaliana] contains similarity to RNA binding protein~gene_id:MAF19.4
  misc_feature (1)..(128): Homolog of NCBI NO: 15822705 NR Description: RNA-binding protein precursor [Solanum tuberosum]
  misc_feature (1)..(128): Homolog of NCBI NO: 1084415 NR Description: RNA-binding protein - wood tobacco
  misc_feature (1)..(127): Homolog of NCBI NO: 7439995 NR Description: RNA binding protein 3 - wood tobacco
  misc_feature (1)..(127): Homolog of NCBI NO: 7439994 NR Description: glycine-rich RNA-binding protein - garden pea
  misc_feature (1)..(128): Homolog of NCBI NO: 15822703 NR Description: RNA-binding protein precursor [Nicotiana tabacum]
  misc_feature (1)..(128): Homolog of NCBI NO: 2826811 NR Description: AtGRP2 [Arabidopsis thaliana]
  misc_feature (1)..(128): Homolog of NCBI NO: 30682622 NR Description: glycine-rich RNA-binding protein (AtGRP2)
MMLANKLGGLLKNATSSKSSNMSVYQAIRCMSSSKLFVGGLSYGTDDHSLRDEFAKYGQVIEAKIILDRESGRSRGFGFITYTSSEEASAAITAMDGKTLDGRNIRVNHANERTGGFRSSGGGYGGGGY

SEQ ID NO: 8138 - protein, 128 aa, Zea mays subsp. mays
  peptide (1)..(128): Ceres Seq. ID no. 5005898
  misc_feature (35)..(106): Pfam Name: RNA recognition motif. (a.k.a. RRM, RBD, or RNP domain) Pfam Description: RNA recognition motif. (a.k.a. RRM, RBD, or RNP
  misc_feature (1)..(127): Homolog of NCBI NO: 15239505 NR Description: glycine-rich RNA-binding protein; protein id: supported by cDNA: gi_16974555 [Arabidopsis thaliana] contains similarity to RNA binding protein~gene_id:MAF19.4
  misc_feature (1)..(127): Homolog of NCBI NO: 15822703 NR Description: RNA-binding protein precursor [Nicotiana tabacum]
  misc_feature (1)..(127): Homolog of NCBI NO: 15822705 NR Description: RNA-binding protein precursor [Solanum tuberosum]
  misc_feature (1)..(126): Homolog of NCBI NO: 7439994 NR Description: glycine-rich RNA-binding protein - garden pea
  misc_feature (1)..(127): Homolog of NCBI NO: 1084415 NR Description: RNA-binding protein - wood tobacco
  misc_feature (1)..(126): Homolog of NCBI NO: 7439995 NR Description: RNA binding protein 3 - wood tobacco
  misc_feature (1)..(127): Homolog of NCBI NO: 15221187 NR Description: glycine-rich RNA-binding protein; protein id:
  misc_feature (1)..(127): Homolog of NCBI NO: 15236359 NR Description: glycine-rich RNA-binding protein AtGRP2; protein At4g13850.1, supported by cDNA: 16314., supported by cDNA:
  misc_feature (1)..(127): Homolog of NCBI NO: 2826811 NR Description: AtGRP2 [Arabidopsis thaliana]
  misc_feature (1)..(127): Homolog of NCBI NO: 30682622 NR Description: glycine-rich RNA-binding protein (AtGRP2)
MLANKLGGLLKNATSSKSSNMSVYQAIRCMSSSKLFVGGLSYGTDDHSLRDEFAKYGQVIEAKIILDRESGRSRGFGFITYTSSEEASAAITAMDGKTLDGRNIRVNHANERTGGFRSSGGGYGGGGY

SEQ ID NO: 8139 - DNA, 631 bp, Zea mays subsp. mays
  misc_feature (1)..(631): Ceres Seq. ID no. 12342153
  misc_feature: MA Experiment ID: 108535 Result: Down-regulated in Transcription
  misc_feature: MA Experiment 108535 PARAMETER Experiment Name: Zm_Meristem_P Parameter: Age (day) Value: 8
  misc_feature: MA Experiment 108535 PARAMETER Experiment Name: Zm_Meristem_P Parameter: Organism Value: Zea mays
  misc_feature: MA Experiment 108535 PARAMETER Experiment Name: Zm_Meristem_P Parameter: Plant Line Value: 35A19
  misc_feature: MA Experiment 108535 PARAMETER Experiment Name: Zm_Meristem_P Parameter: Tissue Value: Root Meristem vs. Above Root Meristem
  misc_feature: MA Experiment ID: 108543 Result: Up-regulated in Transcription
  misc_feature: MA Experiment ID: 108544 Result: Up-regulated in Transcription
  misc_feature: MA Experiment ID: 20000487 Result: Down-regulated in Transcription
  misc_feature: MA Experiment 20000487 PARAMETER Experiment Name: Zm_50mM_NH4NO3_L_to_H_P Parameter: Organism Value: Zea mays
  misc_feature: MA Experiment 20000487 PARAMETER Experiment Name: Zm_50mM_NH4NO3_L_to_H_P Parameter: Timepoint (hr) Value: 4
  misc_feature: MA Experiment 20000487 PARAMETER Experiment Name: Zm_50mM_NH4NO3_L_to_H_P Parameter: Tissue Value: Leaves
  misc_feature: MA Experiment 20000487 PARAMETER Experiment Name: Zm_50mM_NH4NO3_L_to_H_P Parameter: Treatment Value: 50mM NH4NO3 vs. 100mM Mannitol
  misc_feature: MA Experiment ID: 20000488 Result: Down-regulated in Transcription
  misc_feature: MA Experiment 20000488 PARAMETER Experiment Name: Zm_50mM_NH4NO3_L_to_H_P Parameter: Organism Value: Zea mays
  misc_feature: MA Experiment 20000488 PARAMETER Experiment Name: Zm_50mM_NH4NO3_L_to_H_P Parameter: Timepoint (hr) Value: 8
  misc_feature: MA Experiment 20000488 PARAMETER Experiment Name: Zm_50mM_NH4NO3_L_to_H_P Parameter: Tissue Value: Leaves
  misc_feature: MA Experiment 20000488 PARAMETER Experiment Name: Zm_50mM_NH4NO3_L_to_H_P Parameter: Treatment Value: 50mM NH4NO3 vs. 100mM Mannitol
  misc_feature: MA Experiment ID: 20001606 Result: Down-regulated in Transcription
  misc_feature: MA Experiment 20001606 PARAMETER Experiment Name: Zm_50ppm_KNO3_L-to-H_P Parameter: Age (day) Value: 19
  misc_feature: MA Experiment 20001606 PARAMETER Experiment Name: Zm_50ppm_KNO3_L-to-H_P Parameter: Organism Value: Zea mays
  misc_feature: MA Experiment 20001606 PARAMETER Experiment Name: Zm_50ppm_KNO3_L-to-H_P Parameter: Plant Line Value: 35A19
  misc_feature: MA Experiment 20001606 PARAMETER Experiment Name: Zm_50ppm_KNO3_L-to-H_P Parameter: Timepoint (hr) Value: 8
  misc_feature: MA Experiment 20001606 PARAMETER Experiment Name: Zm_50ppm_KNO3_L-to-H_P Parameter: Tissue Value: Shoots
  misc_feature: MA Experiment 20001606 PARAMETER Experiment Name: Zm_50ppm_KNO3_L-to-H_P Parameter: Treatment Value: 50ppm KNO3 vs. 50ppm KCl
  misc_feature: MA Experiment ID: 20001613 Result: Down-regulated in Transcription
  misc_feature: MA Experiment 20001613 PARAMETER Experiment Name: Zm_50ppm_KNO3_L-to-H_P Parameter: Age (day) Value: 20
  misc_feature: MA Experiment 20001613 PARAMETER Experiment Name: Zm_50ppm_KNO3_L-to-H_P Parameter: Organism Value: Zea mays
  misc_feature: MA Experiment 20001613 PARAMETER Experiment Name: Zm_50ppm_KNO3_L-to-H_P Parameter: Plant Line Value: 35A19
  misc_feature: MA Experiment 20001613 PARAMETER Experiment Name: Zm_50ppm_KNO3_L-to-H_P Parameter: Timepoint (hr) Value: 24
  misc_feature: MA Experiment 20001613 PARAMETER Experiment Name: Zm_50ppm_KNO3_L-to-H_P Parameter: Tissue Value: Roots
  misc_feature: MA Experiment 20001613 PARAMETER Experiment Name: Zm_50ppm_KNO3_L-to-H_P Parameter: Treatment Value: 50ppm KNO3 vs. 50ppm KCl
tgcttaaggttcttgacaaggagaaacgccaggcacattgtgctgatgttggatctcacttgttggagcgtctaaaatcgcttcaggacaagcacgaaattataggtgatgttagaggaaggggactgatgcttggggtggaactcgttacggacagaaaggagaagacccctgccaagtcagaaaccattgaactgtttgagaagctcagagatctcggggtactagttggaaagggcggtctgcatggtaacgtcttcagaataaaaccaccgatgtgcttttcgaaggacgatgcagacttcttggtggactccatggactacgcaatgtcaaggctctgaaggaacatgctctgagttgacaatgtgtctgcgtggaaacaacacttcctgcaaccgcaagatgcatggcctgaaatgaaactgaaaggcagatgatttaatgggcatgctccccgggtggtatgttggtgttatggtgaagtttaatagtccccctcccccgaataaattgatgaaaggggacagaacgtcttgcccagcttgtgaactgtttgtagaagaactgcagttaataaatagaatagcgagcaagcaagcgtgatatcaatctgcatacgtccattttc

SEQ ID NO: 8140 - protein, 113 aa, Zea mays subsp. mays
  peptide (1)..(113): Ceres Seq. ID no. 12342154
  misc_feature (1)..(113): Pfam Name: Aminotransferase class-III Pfam Description: Aminotransferase class-III
  misc_feature (1)..(113): Pfam Name: Aminotransferase class-III Pfam Description: Aminotransferase class-III
  misc_feature (1)..(113): Homolog of NCBI NO: 5731259 NR Description: alanine:glyoxylate aminotransferase 2 homolog
  misc_feature (1)..(113): Homolog of NCBI NO: 18420498 NR Description: putative protein; protein id: At4g39660.1, by cDNA: gi_15809991, supported by cDNA: gi_5731258 [Arabidopsis >gi|15809992|gb|AAL06923.1| AT4g39660/T19P19_50 [Arabidopsis
  misc_feature (1)..(103): Homolog of NCBI NO: 7434175 NR Description: hypothetical protein T19P19.50 - Arabidopsis >gi|3080435|emb|CAA18752.1| putative protein [Arabidopsis >gi|7270950|emb|CAB80629.1| putative protein [Arabidopsis
  misc_feature (1)..(113): Homolog of NCBI NO: 15224499 NR Description: putative beta-alanine-pyruvate aminotransferase; id: At2g38400.1, supported by cDNA: 147543., supported by cDNA: supported by cDNA: gi_5731260 [Arabidopsis thaliana]
  misc_feature (1)..(113): Homolog of NCBI NO: 15028237 NR Description: putative beta-alanine-pyruvate aminotransferase
  misc_feature (1)..(113): Homolog of NCBI NO: 18420498 NR Description: putative protein; protein id: At4g39660.1, by cDNA: gi_15809991, supported by cDNA: gi_5731258 [Arabidopsis >gi|15809992|gb|AAL06923.1| AT4g39660/T19P19_50 [Arabidopsis
  misc_feature (1)..(113): Homolog of NCBI NO: 15224499 NR Description: putative beta-alanine-pyruvate aminotransferase; id: At2g38400.1, supported by cDNA: 147543., supported by cDNA: supported by cDNA: gi_5731260 [Arabidopsis thaliana]
  misc_feature (1)..(98): Homolog of NCBI NO: 31239473 NR Description: ENSANGP00000008948 [Anopheles gambiae]
  misc_feature (1)..(104): Homolog of NCBI NO: 39595899 NR Description: Hypothetical protein CBG12888 [Caenorhabditis
  misc_feature (1)..(111): Homolog of NCBI NO: 28574759 NR Description: CG11241-PA [Drosophila melanogaster]
  misc_feature (1)..(111): Homolog of NCBI NO: 16198011 NR Description: LD24726p [Drosophila melanogaster]
  misc_feature (1)..(113): Homolog of NCBI NO: 15231974 NR Description: putative aminotransferase; protein id: supported by cDNA: gi_20466699 [Arabidopsis thaliana] putative aminotransferase [Arabidopsis thaliana]
  misc_feature (1)..(113): Homolog of NCBI NO: 15028237 NR Description: putative beta-alanine-pyruvate aminotransferase
  misc_feature (1)..(103): Homolog of NCBI NO: 7434175 NR Description: hypothetical protein T19P19.50 - Arabidopsis >gi|3080435|emb|CAA18752.1| putative protein [Arabidopsis >gi|7270950|emb|CAB80629.1| putative protein [Arabidopsis
  misc_feature (1)..(113): Homolog of NCBI NO: 5731259 NR Description: alanine:glyoxylate aminotransferase 2 homolog
  misc_feature (1)..(113): Homolog of NCBI NO: 15231974 NR Description: putative aminotransferase; protein id: supported by cDNA: gi_20466699 [Arabidopsis thaliana] putative aminotransferase [Arabidopsis thaliana]
  misc_feature (1)..(111): Homolog of NCBI NO: 16198011 NR Description: LD24726p [Drosophila melanogaster]
  misc_feature (1)..(111): Homolog of NCBI NO: 28574759 NR Description: CG11241-PA [Drosophila melanogaster]
  misc_feature (1)..(104): Homolog of NCBI NO: 39595899 NR Description: Hypothetical protein CBG12888 [Caenorhabditis
  misc_feature (1)..(98): Homolog of NCBI NO: 31239473 NR Description: ENSANGP00000008948 [Anopheles gambiae]
LKVLDKEKRQAHCADVGSHLLERLKSLQDKHEIIGDVRGRGLMLGVELVTDRKEKTPAKSETIELFEKLRDLGVLVGKGGLHGNVFRIKPPMCFSKDDADFLVDSMDYAMSRL

SEQ ID NO: 8141 - protein, 71 aa, Zea mays subsp. mays
  peptide (1)..(71): Ceres Seq. ID no. 12342155
  misc_feature (1)..(71): Pfam Name: Aminotransferase class-III Pfam Description: Aminotransferase class-III
  misc_feature (1)..(71): Pfam Name: Aminotransferase class-III Pfam Description: Aminotransferase class-III
  misc_feature (1)..(71): Homolog of NCBI NO: 5731259 NR Description: alanine:glyoxylate aminotransferase 2 homolog
  misc_feature (1)..(71): Homolog of NCBI NO: 18420498 NR Description: putative protein; protein id: At4g39660.1, by cDNA: gi_15809991, supported by cDNA: gi_5731258 [Arabidopsis >gi|15809992|gb|AAL06923.1| AT4g39660/T19P19_50 [Arabidopsis
  misc_feature (1)..(61): Homolog of NCBI NO: 7434175 NR Description: hypothetical protein T19P19.50 - Arabidopsis >gi|3080435|emb|CAA18752.1| putative protein [Arabidopsis >gi|7270950|emb|CAB80629.1| putative protein [Arabidopsis
  misc_feature (1)..(71): Homolog of NCBI NO: 15224499 NR Description: putative beta-alanine-pyruvate aminotransferase; id: At2g38400.1, supported by cDNA: 147543., supported by cDNA: supported by cDNA: gi_5731260 [Arabidopsis thaliana]
  misc_feature (1)..(71): Homolog of NCBI NO: 15028237 NR Description: putative beta-alanine-pyruvate aminotransferase
  misc_feature (1)..(71): Homolog of NCBI NO: 18420498 NR Description: putative protein; protein id: At4g39660.1, by cDNA: gi_15809991, supported by cDNA: gi_5731258 [Arabidopsis >gi|15809992|gb|AAL06923.1| AT4g39660/T19P19_50 [Arabidopsis
  misc_feature (1)..(71): Homolog of NCBI NO: 15224499 NR Description: putative beta-alanine-pyruvate aminotransferase; id: At2g38400.1, supported by cDNA: 147543., supported by cDNA: supported by cDNA: gi_5731260 [Arabidopsis thaliana]
  misc_feature (1)..(56): Homolog of NCBI NO: 31239473 NR Description: ENSANGP00000008948 [Anopheles gambiae]
  misc_feature (1)..(62): Homolog of NCBI NO: 39595899 NR Description: Hypothetical protein CBG12888 [Caenorhabditis
  misc_feature (1)..(69): Homolog of NCBI NO: 28574759 NR Description: CG11241-PA [Drosophila melanogaster]
  misc_feature (1)..(69): Homolog of NCBI NO: 16198011 NR Description: LD24726p [Drosophila melanogaster]
  misc_feature (1)..(71): Homolog of NCBI NO: 15231974 NR Description: putative aminotransferase; protein id: supported by cDNA: gi_20466699 [Arabidopsis thaliana] putative aminotransferase [Arabidopsis thaliana]
  misc_feature (1)..(71): Homolog of NCBI NO: 15028237 NR Description: putative beta-alanine-pyruvate aminotransferase
  misc_feature (1)..(61): Homolog of NCBI NO: 7434175 NR Description: hypothetical protein T19P19.50 - Arabidopsis >gi|3080435|emb|CAA18752.1| putative protein [Arabidopsis >gi|7270950|emb|CAB80629.1| putative protein [Arabidopsis
  misc_feature (1)..(71): Homolog of NCBI NO: 5731259 NR Description: alanine:glyoxylate aminotransferase 2 homolog
  misc_feature (1)..(71): Homolog of NCBI NO: 15231974 NR Description: putative aminotransferase; protein id: supported by cDNA: gi_20466699 [Arabidopsis thaliana] putative aminotransferase [Arabidopsis thaliana]
  misc_feature (1)..(69): Homolog of NCBI NO: 16198011 NR Description: LD24726p [Drosophila melanogaster]
  misc_feature (1)..(69): Homolog of NCBI NO: 28574759 NR Description: CG11241-PA [Drosophila melanogaster]
  misc_feature (1)..(62): Homolog of NCBI NO: 39595899 NR Description: Hypothetical protein CBG12888 [Caenorhabditis
  misc_feature (1)..(56): Homolog of NCBI NO: 31239473 NR Description: ENSANGP00000008948 [Anopheles gambiae]
MLGVELVTDRKEKTPAKSETIELFEKLRDLGVLVGKGGLHGNVFRIKPPMCFSKDDADFLVDSMDYAMSRL

SEQ ID NO: 8142 - DNA, 832 bp, Zea mays subsp. mays
  misc_feature (1)..(832): Ceres Seq. ID no. 12402043
  misc_feature: MA Experiment ID: 108515 Result: Up-regulated in Transcription
  misc_feature: MA Experiment 108515 PARAMETER Experiment Name: Zm_2mM_SA_P Parameter: Age (day) Value: 8
  misc_feature: MA Experiment 108515 PARAMETER Experiment Name: Zm_2mM_SA_P Parameter: Organism Value: Zea mays
  misc_feature: MA Experiment 108515 PARAMETER Experiment Name: Zm_2mM_SA_P Parameter: Plant Line Value: 35A19
  misc_feature: MA Experiment 108515 PARAMETER Experiment Name: Zm_2mM_SA_P Parameter: Timepoint (hr) Value: 12
  misc_feature: MA Experiment 108515 PARAMETER Experiment Name: Zm_2mM_SA_P Parameter: Tissue Value: Aerial
  misc_feature: MA Experiment 108515 PARAMETER Experiment Name: Zm_2mM_SA_P Parameter: Treatment Value: 2mM SA vs. No Treatment
  misc_feature: MA Experiment ID: 108527 Result: Up-regulated in Transcription
  misc_feature: MA Experiment 108527 PARAMETER Experiment Name: Zm_5mM_NO_P Parameter: Age (day) Value: 8
  misc_feature: MA Experiment 108527 PARAMETER Experiment Name: Zm_5mM_NO_P Parameter: Organism Value: Zea mays
  misc_feature: MA Experiment 108527 PARAMETER Experiment Name: Zm_5mM_NO_P Parameter: Plant Line Value: 35A19
  misc_feature: MA Experiment 108527 PARAMETER Experiment Name: Zm_5mM_NO_P Parameter: Timepoint (hr) Value: 6
  misc_feature: MA Experiment 108527 PARAMETER Experiment Name: Zm_5mM_NO_P Parameter: Tissue Value: Aerial
  misc_feature: MA Experiment 108527 PARAMETER Experiment Name: Zm_5mM_NO_P Parameter: Treatment Value: 5mM NO vs. No Treatment
  misc_feature: MA Experiment ID: 108535 Result: Down-regulated in Transcription
  misc_feature: MA Experiment 108535 PARAMETER Experiment Name: Zm_Meristem_P Parameter: Age (day) Value: 8
  misc_feature: MA Experiment 108535 PARAMETER Experiment Name: Zm_Meristem_P Parameter: Organism Value: Zea mays
  misc_feature: MA Experiment 108535 PARAMETER Experiment Name: Zm_Meristem_P Parameter: Plant Line Value: 35A19
  misc_feature: MA Experiment 108535 PARAMETER Experiment Name: Zm_Meristem_P Parameter: Tissue Value: Root Meristem vs. Above Root Meristem
  misc_feature: MA Experiment ID: 108545 Result: Down-regulated in Transcription
  misc_feature: MA Experiment 108545 PARAMETER Experiment Name: Zm_Imbibed_Seeds_P Parameter: Age (day) Value: 3 vs. 2
  misc_feature: MA Experiment 108545 PARAMETER Experiment Name: Zm_Imbibed_Seeds_P Parameter: Organism Value: Zea mays
  misc_feature: MA Experiment 108545 PARAMETER Experiment Name: Zm_Imbibed_Seeds_P Parameter: Plant Line Value: 35A19
  misc_feature: MA Experiment 108545 PARAMETER Experiment Name: Zm_Imbibed_Seeds_P Parameter: Tissue Value: Aerial vs. Embryo
  misc_feature: MA Experiment ID: 108547 Result: Down-regulated in Transcription
  misc_feature: MA Experiment 108547 PARAMETER Experiment Name: Zm_Imbibed_Seeds_P Parameter: Age (day) Value: 4 vs. 2
  misc_feature: MA Experiment 108547 PARAMETER Experiment Name: Zm_Imbibed_Seeds_P Parameter: Organism Value: Zea mays
  misc_feature: MA Experiment 108547 PARAMETER Experiment Name: Zm_Imbibed_Seeds_P Parameter: Plant Line Value: 35A19
  misc_feature: MA Experiment 108547 PARAMETER Experiment Name: Zm_Imbibed_Seeds_P Parameter: Tissue Value: Aerial vs. Embryo
  misc_feature: MA Experiment ID: 108559 Result: Up-regulated in Transcription
  misc_feature: MA Experiment 108559 PARAMETER Experiment Name: Zm_5mM_NO_P Parameter: Age (day) Value: 8
  misc_feature: MA Experiment 108559 PARAMETER Experiment Name: Zm_5mM_NO_P Parameter: Organism Value: Zea mays
  misc_feature: MA Experiment 108559 PARAMETER Experiment Name: Zm_5mM_NO_P Parameter: Plant Line Value: 35A19
  misc_feature: MA Experiment 108559 PARAMETER Experiment Name: Zm_5mM_NO_P Parameter: Timepoint (hr) Value: 12
  misc_feature: MA Experiment 108559 PARAMETER Experiment Name: Zm_5mM_NO_P Parameter: Tissue Value: Aerial
  misc_feature: MA Experiment 108559 PARAMETER Experiment Name: Zm_5mM_NO_P Parameter: Treatment Value: 5mM NO vs. No Treatment
  misc_feature: MA Experiment ID: 20000477 Result: Up-regulated in Transcription
  misc_feature: MA Experiment 20000477 PARAMETER Experiment Name: Zm_5mM_SA_P Parameter: Age (day) Value: 10
  misc_feature: MA Experiment 20000477 PARAMETER Experiment Name: Zm_5mM_SA_P Parameter: Organism Value: Zea mays
  misc_feature: MA Experiment 20000477 PARAMETER Experiment Name: Zm_5mM_SA_P Parameter: Plant Line Value: 35A19
  misc_feature: MA Experiment 20000477 PARAMETER Experiment Name: Zm_5mM_SA_P Parameter: Timepoint (hr) Value: 48
  misc_feature: MA Experiment 20000477 PARAMETER Experiment Name: Zm_5mM_SA_P Parameter: Tissue Value: Aerial
  misc_feature: MA Experiment 20000477 PARAMETER Experiment Name: Zm_5mM_SA_P Parameter: Treatment Value: 5mM SA vs. No Treatment
  misc_feature: MA Experiment ID: 20000478 Result: Up-regulated in Transcription
  misc_feature: MA Experiment 20000478 PARAMETER Experiment Name: Zm_5mM_SA_P Parameter: Age (day) Value: 11
  misc_feature: MA Experiment 20000478 PARAMETER Experiment Name: Zm_5mM_SA_P Parameter: Organism Value: Zea mays
  misc_feature: MA Experiment 20000478 PARAMETER Experiment Name: Zm_5mM_SA_P Parameter: Plant Line Value: 35A19
  misc_feature: MA Experiment 20000478 PARAMETER Experiment Name: Zm_5mM_SA_P Parameter: Timepoint (hr) Value: 72
  misc_feature: MA Experiment 20000478 PARAMETER Experiment Name: Zm_5mM_SA_P Parameter: Tissue Value: Aerial
  misc_feature: MA Experiment 20000478 PARAMETER Experiment Name: Zm_5mM_SA_P Parameter: Treatment Value: 5mM SA vs. No Treatment
  misc_feature: MA Experiment ID: 20001608 Result: Down-regulated in Transcription
  misc_feature: MA Experiment 20001608 PARAMETER Experiment Name: Zm_50ppm_KNO3_L-to-H_P Parameter: Age (day) Value: 21
  misc_feature: MA Experiment 20001608 PARAMETER Experiment Name: Zm_50ppm_KNO3_L-to-H_P Parameter: Organism Value: Zea mays
  misc_feature: MA Experiment 20001608 PARAMETER Experiment Name: Zm_50ppm_KNO3_L-to-H_P Parameter: Plant Line Value: 35A19
  misc_feature: MA Experiment 20001608 PARAMETER Experiment Name: Zm_50ppm_KNO3_L-to-H_P Parameter: Timepoint (hr) Value: 48
  misc_feature: MA Experiment 20001608 PARAMETER Experiment Name: Zm_50ppm_KNO3_L-to-H_P Parameter: Tissue Value: Shoots
  misc_feature: MA Experiment 20001608 PARAMETER Experiment Name: Zm_50ppm_KNO3_L-to-H_P Parameter: Treatment Value: 50ppm KNO3 vs. 50ppm KCl
ataaatcaaccgccggtgaagtctagtcgtctcgtcgctcggtccaccacctcagctccgccgcttgcccgcttttgctctctccctcccggctctcggcttcttctacacgctaccgtctcacagccgtaaacgcccctcccggatcccgctagttcgccaccgccgcccgcccgcccgcctttcgcctcatcatggccgcctcgtcgaccgccacctccgtccacgacttcatcgtcaaggatgcgagcggcaaagacgttgacctcagcacctacaaggggaaggttcttctcattgttaacgtcgcatcccagtgtggcttaaccaactccaactacactgagctggcccagctctatgagaagtacaaggaccaaggctttgaaatcctggctttcccatgcaaccagtttggtgggcaggagcctggtaccaataaggagattgtccagtttgcctgcacacgcttcaaggctgagtaccccatcttcgacaaggttgatgtcaacggtagcaatgctgcgcccatctacaagttcttgaaatctagcaaaggtggccttttcggcgacagcatcaagtggaacttttccaagttcttggttgacaaggagggacgtgttgtggatcgctatgctccaaccacttcacccctgagcattgagaaggatatcaagaagctgcttgggagctcttaatcagtatctgggtgcaaagctgtagaaaaacatgtatcaacaatgccctgagcgataaaatatatgataagttgtattaataaagtattgtcgtacttgagaggttgcagtatctgctctatttcccttgc

SEQ ID NO: 8143 - protein, 168 aa, Zea mays subsp. mays
  peptide (1)..(168): Ceres Seq. ID no. 12402044
  misc_feature (9)..(118): Pfam Name: Glutathione peroxidase Pfam Description: Glutathione peroxidase
  misc_feature (1)..(167): Homolog of NCBI NO: 22268405 NR Description: putative glutathione peroxidase [Zea mays]
  misc_feature (1)..(168): Homolog of NCBI NO: 6179600 NR Description: GPX12Hv, glutathione peroxidase-like protein
  misc_feature (1)..(168): Homolog of NCBI NO: 34334012 NR Description: cytosolic glutathione peroxidase [Triticum
  misc_feature (1)..(168): Homolog of NCBI NO: 21360380 NR Description: glutathione peroxidase 1 [Oryza sativa]
  misc_feature (2)..(168): Homolog of NCBI NO: 27544804 NR Description: phospholipid hydroperoxide glutathione
  misc_feature (1)..(168): Homolog of NCBI NO: 38345591 NR Description: OSJNBb0012E24.9 [Oryza sativa (japonica
  misc_feature (1)..(165): Homolog of NCBI NO: 6179604 NR Description: glutathione peroxidase-like protein GPX54Hv
  misc_feature (1)..(166): Homolog of NCBI NO: 30681827 NR Description: glutathione peroxidase, putative [Arabidopsis >gi|14532478|gb|AAK63967.1| AT4g11600/T5C23_30 [Arabidopsis >gi|18655355|gb|AAL76133.1| AT4g11600/T5C23_30 [Arabidopsis
  misc_feature (1)..(166): Homolog of NCBI NO: 20138157 NR Description: Probable phospholipid hydroperoxide glutathione
  misc_feature (3)..(165): Homolog of NCBI NO: 544437 NR Description: Probable phospholipid hydroperoxide glutathione
MAASSTATSVHDFIVKDASGKDVDLSTYKGKVLLIVNVASQCGLTNSNYTELAQLYEKYKDQGFEILAFPCNQFGGQEPGTNKEIVQFACTRFKAEYPIFDKVDVNGSNAAPIYKFLKSSKGGLFGDSIKWNFSKFLVDKEGRVVDRYAPTTSPLSIEKDIKKLLGSS

SEQ ID NO: 8144 - DNA, 1075 bp, Zea mays subsp. mays
  misc_feature (1)..(1075): Ceres Seq. ID no. 13495182
  misc_feature: MA Experiment ID: 20000479 Result: Up-regulated in Transcription
  misc_feature: MA Experiment 20000479 PARAMETER Experiment Name: Zm_Drought_P Parameter: Age (day) Value: 10
  misc_feature: MA Experiment 20000479 PARAMETER Experiment Name: Zm_Drought_P Parameter: Organism Value: Zea mays
  misc_feature: MA Experiment 20000479 PARAMETER Experiment Name: Zm_Drought_P Parameter: Plant Line Value: 35A19
  misc_feature: MA Experiment 20000479 PARAMETER Experiment Name: Zm_Drought_P Parameter: Timepoint (hr) Value: 48
  misc_feature: MA Experiment 20000479 PARAMETER Experiment Name: Zm_Drought_P Parameter: Tissue Value: Aerial
  misc_feature: MA Experiment 20000479 PARAMETER Experiment Name: Zm_Drought_P Parameter: Treatment Value: Drought vs. No Drought
ctatttgcggaaaggaacttctgttagtgctggccaaacatcaagttcatcaaatggaacaactgcaggagaaaggcctctcctacgtgagaaattgtcaaagggaaaggatggctttgttgctgctgatttcacagctacagaagctcattgtgctgtaccctcgactccaatactttggttccagcaggcagatgagtgcatgcacctatgcatttatcagcacaaaagtctcactatcttactgctggttcctgcttcctcagtgataaatggagaagagggcattactcatgtgaagaaggcgatccttgaaaatgcatcacagaagattgtcactgttgagcagaaattgacacgaggatggggaggagaaaatgcgtatcatgttagtggatatcgttatttgcttgttgatccggagagaagagtatcaagagcctccccacctgggaaagtcaccaccctagcaaaggattctctacttgccctcaacatgctaagacaagaagtagatctagagaagtcaagatacaagagaggcgacccttgtcatgataaggatttcgaagtatgtatcagaacaaaaaacaatgcgtgggttattgctaaaatcagtcaaggaagggagctttacatggctctagagaagggtggtgaaacgcttctatatgcatccacagctgtagagaaattcagcaacaggtactgtgagggagcattctctacagattagaagcaccagagggagatcttagcttttccatacattacctattatgtacatcctgttttttttcccagctgtatcgttgccccctattgttgagagactcggaccactctttgcgaagggaataaggagttcgtatcagttgtacagctgctctgctgtcgtgtgctatctgcaaaagaatagcctagtctgggaataacgcagagcgggatagagtttgtttgttcacttatgcccttccttaacgcagagcattgtgcgtgttttcattttgctgtaacagccggcgatttacctgcagactgggaaagtaacttagcgtttaatttggtattctgc

SEQ ID NO: 8145 - protein, 244 aa, Zea mays subsp. mays
  peptide (1)..(244): Ceres Seq. ID no. 13495183
  misc_feature (1)..(244): Homolog of NCBI NO: 38175489 NR Description: putative myrosinase precursor [Oryza sativa
  misc_feature (8)..(244): Homolog of NCBI NO: 15220866 NR Description: myrosinase precursor -related [Arabidopsis
  misc_feature (8)..(244): Homolog of NCBI NO: 25372816 NR Description: F23A5.27 [imported] - Arabidopsis thaliana
  misc_feature (16)..(244): Homolog of NCBI NO: 18394314 NR Description: expressed protein [Arabidopsis thaliana]
  misc_feature (16)..(244): Homolog of NCBI NO: 21618002 NR Description: unknown [Arabidopsis thaliana]
  misc_feature (16)..(244): Homolog of NCBI NO: 30684673 NR Description: expressed protein [Arabidopsis thaliana]
  misc_feature (8)..(235): Homolog of NCBI NO: 14517360 NR Description: At1g80910/F23A5_21 [Arabidopsis thaliana]
  misc_feature (1)..(244): Homolog of NCBI NO: 18266049 NR Description: myrosinase precursor [Brassica oleracea]
YLRKGTSVSAGQTSSSSNGTTAGERPLLREKLSKGKDGFVAADFTATEAHCAVPSTPILWFQQADECMHLCIYQHKSLTILLLVPASSVINGEEGITHVKKAILENASQKIVTVEQKLTRGWGGENAYHVSGYRYLLVDPERRVSRASPPGKVTTLAKDSLLALNMLRQEVDLEKSRYKRGDPCHDKDFEVCIRTKNNAWVIAKISQGRELYMALEKGGETLLYASTAVEKFSNRYCEGAFSTD

SEQ ID NO: 8146 - protein, 177 aa, Zea mays subsp. mays
  peptide (1)..(177): Ceres Seq. ID no. 13495184
  misc_feature (1)..(177): Homolog of NCBI NO: 38175489 NR Description: putative myrosinase precursor [Oryza sativa
  misc_feature (1)..(177): Homolog of NCBI NO: 15220866 NR Description: myrosinase precursor -related [Arabidopsis
  misc_feature (1)..(177): Homolog of NCBI NO: 25372816 NR Description: F23A5.27 [imported] - Arabidopsis thaliana
  misc_feature (1)..(177): Homolog of NCBI NO: 18394314 NR Description: expressed protein [Arabidopsis thaliana]
  misc_feature (1)..(177): Homolog of NCBI NO: 21618002 NR Description: unknown [Arabidopsis thaliana]
  misc_feature (1)..(177): Homolog of NCBI NO: 30684673 NR Description: expressed protein [Arabidopsis thaliana]
  misc_feature (1)..(168): Homolog of NCBI NO: 14517360 NR Description: At1g80910/F23A5_21 [Arabidopsis thaliana]
  misc_feature (1)..(177): Homolog of NCBI NO: 18266049 NR Description: myrosinase precursor [Brassica oleracea]
MHLCIYQHKSLTILLLVPASSVINGEEGITHVKKAILENASQKIVTVEQKLTRGWGGENAYHVSGYRYLLVDPERRVSRASPPGKVTTLAKDSLLALNMLRQEVDLEKSRYKRGDPCHDKDFEVCIRTKNNAWVIAKISQGRELYMALEKGGETLLYASTAVEKFSNRYCEGAFSTD

SEQ ID NO: 8147 - DNA, 1056 bp, Zea mays subsp. mays
  misc_feature (1)..(1056): Ceres Seq. ID no. 12361825
  misc_feature: MA Experiment ID: 20000492 Result: Up-regulated in Transcription
  misc_feature: MA Experiment 20000492 PARAMETER Experiment Name: Zm_Hybrid_Seed_Dev_P Parameter: DAP Value: 12
  misc_feature: MA Experiment 20000492 PARAMETER Experiment Name: Zm_Hybrid_Seed_Dev_P Parameter: Organism Value: Zea mays
  misc_feature: MA Experiment 20000492 PARAMETER Experiment Name: Zm_Hybrid_Seed_Dev_P Parameter: Plant Line Value: 35A19
  misc_feature: MA Experiment 20000492 PARAMETER Experiment Name: Zm_Hybrid_Seed_Dev_P Parameter: Tissue Value: Fert Kernel vs. Unfert Floret
aagctcgtgtaattgctgcggcgacagtgcccaaataaaatcccctaaacctagcgccgccgccgccatgcttcgccgtctcgccgccgtcgcccagcggaccttctcctcctcctcttccccgcacgccccgccgctggctgcgtcgggctacaccccgcgccgcgagtacggcctggtgcccatggtgatcgagcatacctcccgcggggagcgcgcctacgacatcttctcgcgcttgctcaaggagcgcatcgtatgcatccatggccccatcactgacgatacggcgtccctcgtcgtcgcccagctgctcttcctcgaatccgagaaccccgccaagcccgtccacctctacatcaactccccggggggcgtcgtcactgcgggcctcgccatctacgataccatgcagtacatccgctcccccgtcaccacgctctgcatcggtcaggccgcctccatggcgtcgctactcctcgccgctggggcgagcgggcagaggcgggcgctgccgaacgcgcgggtcatgatccaccagccctcgggtggcgcgtcggggcaggcgtcggacatcgccatccacgccaaggagatccttaaggtgcgggaccggctcaacaaaatctacgccaagcacacgggccaggccatcgaccgcatcgagcagtgtatggagagggacatgttcatggacccggaggaggcacatgattgggggctcatcgacgaggtcatcgagcaccgccctgtctctcttgtgtctgatgctgttggcagtgattcgcaaaacctcggtggaggcggagctggggtgaataaaggagcggatgagccatcctcagcgtgatggcattggacagtcgcaaggtgcaatcgttgtcgtgctcctgtagctgtcttatttggatttaaggtttaattcgtacatgaggtgaataccttaattttctggttgctgggctaatccaatagcaacgctgttgttttgatactttaattgatctgttgctgataacgaatgctatctggtatgagccctcaacagcgttgttg

SEQ ID NO: 8148 - protein, 282 aa, Zea mays subsp. mays
  peptide (1)..(282): Ceres Seq. ID no. 12361826
  misc_feature (68)..(249): Pfam Name: Clp protease Pfam Description: Clp protease
  misc_feature (23)..(282): Homolog of NCBI NO: 38344435 NR Description: OSJNBa0038O10.7 [Oryza sativa (japonica
  misc_feature (23)..(264): Homolog of NCBI NO: 18420643 NR Description: ATP-dependent Clp protease proteolytic subunit
  misc_feature (51)..(253): Homolog of NCBI NO: 6685315 NR Description: ATP-dependent Clp protease proteolytic subunit
  misc_feature (22)..(250): Homolog of NCBI NO: 8393156 NR Description: caseinolytic protease, ATP-dependent, proteolytic
  misc_feature (22)..(250): Homolog of NCBI NO: 34882298 NR Description: similar to ClpP protease [Rattus norvegicus]
  misc_feature (55)..(261): Homolog of NCBI NO: 20129427 NR Description: CG5045-PA [Drosophila melanogaster]
  misc_feature (52)..(250): Homolog of NCBI NO: 5174419 NR Description: endopeptidase Clp precursor; ATP-dependent
  misc_feature (59)..(252): Homolog of NCBI NO: 18203228 NR Description: ATP-dependent Clp protease proteolytic subunit Clp) >gi|6942106|gb|AAF32318.1|AF218420_1 ClpP [Brucella
  misc_feature (59)..(252): Homolog of NCBI NO: 23501987 NR Description: ATP-dependent Clp protease, proteolytic subunit
  misc_feature (59)..(252): Homolog of NCBI NO: 23014984 NR Description: hypothetical protein [Magnetospirillum
SSCNCCGDSAQIKSPKPSAAAAMLRRLAAVAQRTFSSSSSPHAPPLAASGYTPRREYGLVPMVIEHTSRGERAYDIFSRLLKERIVCIHGPITDDTASLVVAQLLFLESENPAKPVHLYINSPGGVVTAGLAIYDTMQYIRSPVTTLCIGQAASMASLLLAAGASGQRRALPNARVMIHQPSGGASGQASDIAIHAKEILKVRDRLNKIYAKHTGQAIDRIEQCMERDMFMDPEEAHDWGLIDEVIEHRPVSLVSDAVGSDSQNLGGGGAGVNKGADEPSSA

SEQ ID NO: 8149 - protein, 260 aa, Zea mays subsp. mays
  peptide (1)..(260): Ceres Seq. ID no. 12361827
  misc_feature (46)..(227): Pfam Name: Clp protease Pfam Description: Clp protease
  misc_feature (1)..(260): Homolog of NCBI NO: 38344435 NR Description: OSJNBa0038O10.7 [Oryza sativa (japonica
  misc_feature (1)..(242): Homolog of NCBI NO: 18420643 NR Description: ATP-dependent Clp protease proteolytic subunit
  misc_feature (29)..(231): Homolog of NCBI NO: 6685315 NR Description: ATP-dependent Clp protease proteolytic subunit
  misc_feature (1)..(228): Homolog of NCBI NO: 8393156 NR Description: caseinolytic protease, ATP-dependent, proteolytic
  misc_feature (1)..(228): Homolog of NCBI NO: 34882298 NR Description: similar to ClpP protease [Rattus norvegicus]
  misc_feature (33)..(239): Homolog of NCBI NO: 20129427 NR Description: CG5045-PA [Drosophila melanogaster]
  misc_feature (30)..(228): Homolog of NCBI NO: 5174419 NR Description: endopeptidase Clp precursor; ATP-dependent
  misc_feature (37)..(230): Homolog of NCBI NO: 18203228 NR Description: ATP-dependent Clp protease proteolytic subunit Clp) >gi|6942106|gb|AAF32318.1|AF218420_1 ClpP [Brucella
  misc_feature (37)..(230): Homolog of NCBI NO: 23501987 NR Description: ATP-dependent Clp protease, proteolytic subunit
  misc_feature (37)..(230): Homolog of NCBI NO: 23014984 NR Description: hypothetical protein [Magnetospirillum
MLRRLAAVAQRTFSSSSSPHAPPLAASGYTPRREYGLVPMVIEHTSRGERAYDIFSRLLKERIVCIHGPITDDTASLVVAQLLFLESENPAKPVHLYINSPGGVVTAGLAIYDTMQYIRSPVTTLCIGQAASMASLLLAAGASGQRRALPNARVMIHQPSGGASGQASDIAIHAKEILKVRDRLNKIYAKHTGQAIDRIEQCMERDMFMDPEEAHDWGLIDEVIEHRPVSLVSDAVGSDSQNLGGGGAGVNKGADEPSSA

SEQ ID NO: 8150 - protein, 221 aa, Zea mays subsp. mays
  peptide (1)..(221): Ceres Seq. ID no. 12361828
  misc_feature (7)..(188): Pfam Name: Clp protease Pfam Description: Clp protease
  misc_feature (1)..(221): Homolog of NCBI NO: 38344435 NR Description: OSJNBa0038O10.7 [Oryza sativa (japonica
  misc_feature (1)..(203): Homolog of NCBI NO: 18420643 NR Description: ATP-dependent Clp protease proteolytic subunit
  misc_feature (1)..(192): Homolog of NCBI NO: 6685315 NR Description: ATP-dependent Clp protease proteolytic subunit
  misc_feature (1)..(189): Homolog of NCBI NO: 8393156 NR Description: caseinolytic protease, ATP-dependent, proteolytic
  misc_feature (1)..(189): Homolog of NCBI NO: 34882298 NR Description: similar to ClpP protease [Rattus norvegicus]
  misc_feature (1)..(200): Homolog of NCBI NO: 20129427 NR Description: CG5045-PA [Drosophila melanogaster]
  misc_feature (1)..(189): Homolog of NCBI NO: 5174419 NR Description: endopeptidase Clp precursor; ATP-dependent
  misc_feature (1)..(191): Homolog of NCBI NO: 18203228 NR Description: ATP-dependent Clp protease proteolytic subunit Clp) >gi|6942106|gb|AAF32318.1|AF218420_1 ClpP [Brucella
  misc_feature (1)..(191): Homolog of NCBI NO: 23501987 NR Description: ATP-dependent Clp protease, proteolytic subunit
  misc_feature (1)..(191): Homolog of NCBI NO: 23014984 NR Description: hypothetical protein [Magnetospirillum
MVIEHTSRGERAYDIFSRLLKERIVCIHGPITDDTASLVVAQLLFLESENPAKPVHLYINSPGGVVTAGLAIYDTMQYIRSPVTTLCIGQAASMASLLLAAGASGQRRALPNARVMIHQPSGGASGQASDIAIHAKEILKVRDRLNKIYAKHTGQAIDRIEQCMERDMFMDPEEAHDWGLIDEVIEHRPVSLVSDAVGSDSQNLGGGGAGVNKGADEPSSA

SEQ ID NO: 8151 - DNA, 641 bp, Zea mays subsp. mays
  misc_feature (1)..(641): Ceres Seq. ID no. 12400980
  misc_feature: MA Experiment ID: 108522 Result: Up-regulated in Transcription
  misc_feature: MA Experiment 108522 PARAMETER Experiment Name: Zm_42deg_Heat_P Parameter: Age (day) Value: 8
  misc_feature: MA Experiment 108522 PARAMETER Experiment Name: Zm_42deg_Heat_P Parameter: Organism Value: Zea mays
  misc_feature: MA Experiment 108522 PARAMETER Experiment Name: Zm_42deg_Heat_P Parameter: Plant Line Value: 35A19
  misc_feature: MA Experiment 108522 PARAMETER Experiment Name: Zm_42deg_Heat_P Parameter: Temperature (deg C) Value: 42 vs. 22
  misc_feature: MA Experiment 108522 PARAMETER Experiment Name: Zm_42deg_Heat_P Parameter: Timepoint (hr) Value: 1
  misc_feature: MA Experiment 108522 PARAMETER Experiment Name: Zm_42deg_Heat_P Parameter: Tissue Value: Aerial
  misc_feature: MA Experiment ID: 108528 Result: Up-regulated in Transcription
  misc_feature: MA Experiment 108528 PARAMETER Experiment Name: Zm_Imbibed_Seeds_P Parameter: Age (day) Value: 5 vs. 2
  misc_feature: MA Experiment 108528 PARAMETER Experiment Name: Zm_Imbibed_Seeds_P Parameter: Organism Value: Zea mays
  misc_feature: MA Experiment 108528 PARAMETER Experiment Name: Zm_Imbibed_Seeds_P Parameter: Plant Line Value: 35A19
  misc_feature: MA Experiment 108528 PARAMETER Experiment Name: Zm_Imbibed_Seeds_P Parameter: Tissue Value: Aerial vs. Embryo
  misc_feature: MA Experiment ID: 108530 Result: Up-regulated in Transcription
  misc_feature: MA Experiment 108530 PARAMETER Experiment Name: Zm_Imbibed_Seeds_P Parameter: Age (day) Value: 6 vs. 2
  misc_feature: MA Experiment 108530 PARAMETER Experiment Name: Zm_Imbibed_Seeds_P Parameter: Organism Value: Zea mays
  misc_feature: MA Experiment 108530 PARAMETER Experiment Name: Zm_Imbibed_Seeds_P Parameter: Plant Line Value: 35A19
  misc_feature: MA Experiment 108530 PARAMETER Experiment Name: Zm_Imbibed_Seeds_P Parameter: Tissue Value: Aerial vs. Embryo
  misc_feature: MA Experiment ID: 108536 Result: Down-regulated in Transcription
  misc_feature: MA Experiment 108536 PARAMETER Experiment Name: Zm_Meristem_P Parameter: Age (day) Value: 8
  misc_feature: MA Experiment 108536 PARAMETER Experiment Name: Zm_Meristem_P Parameter: Organism Value: Zea mays
  misc_feature: MA Experiment 108536 PARAMETER Experiment Name: Zm_Meristem_P Parameter: Plant Line Value: 35A19
  misc_feature: MA Experiment 108536 PARAMETER Experiment Name: Zm_Meristem_P Parameter: Tissue Value: Shoot Meristem vs. Above Shoot Meristem
  misc_feature: MA Experiment ID: 108543 Result: Up-regulated in Transcription
  misc_feature: MA Experiment ID: 108545 Result: Up-regulated in Transcription
  misc_feature: MA Experiment 108545 PARAMETER Experiment Name: Zm_Imbibed_Seeds_P Parameter: Age (day) Value: 3 vs. 2
  misc_feature: MA Experiment 108545 PARAMETER Experiment Name: Zm_Imbibed_Seeds_P Parameter: Organism Value: Zea mays
  misc_feature: MA Experiment 108545 PARAMETER Experiment Name: Zm_Imbibed_Seeds_P Parameter: Plant Line Value: 35A19
  misc_feature: MA Experiment 108545 PARAMETER Experiment Name: Zm_Imbibed_Seeds_P Parameter: Tissue Value: Aerial vs. Embryo
  misc_feature: MA Experiment ID: 108546 Result: Down-regulated in Transcription
  misc_feature: MA Experiment 108546 PARAMETER Experiment Name: Zm_Imbibed_Seeds_P Parameter: Age (day) Value: 3 vs. 2
  misc_feature: MA Experiment 108546 PARAMETER Experiment Name: Zm_Imbibed_Seeds_P Parameter: Organism Value: Zea mays
  misc_feature: MA Experiment 108546 PARAMETER Experiment Name: Zm_Imbibed_Seeds_P Parameter: Plant Line Value: 35A19
  misc_feature: MA Experiment 108546 PARAMETER Experiment Name: Zm_Imbibed_Seeds_P Parameter: Tissue Value: Roots vs. Embryo
  misc_feature: MA Experiment ID: 108547 Result: Up-regulated in Transcription
  misc_feature: MA Experiment 108547 PARAMETER Experiment Name: Zm_Imbibed_Seeds_P Parameter: Age (day) Value: 4 vs. 2
  misc_feature: MA Experiment 108547 PARAMETER Experiment Name: Zm_Imbibed_Seeds_P Parameter: Organism Value: Zea mays
  misc_feature: MA Experiment 108547 PARAMETER Experiment Name: Zm_Imbibed_Seeds_P Parameter: Plant Line Value: 35A19
  misc_feature: MA Experiment 108547 PARAMETER Experiment Name: Zm_Imbibed_Seeds_P Parameter: Tissue Value: Aerial vs. Embryo
aatattggctagcttttggctcggcagctaacgacctgcagccaaccatctaccagcgactcagcgagcgagagcagcacacacgcagctagctaggagcagcagcagagcagcggcgatggcggcctccatgatctcctcgtcagctctggcggtggcgcctcagggcctgccgcccctcggccgccgcgcctcctccttcgccgtcgtctgctccaagaagaagatcaagaccgacaagccctacgggattgggggtggcctgaccgtcgacgtcgacgccaacgggagaaagggcaagggcaagggcgtgtaccagttcgtcgacaagtacggcgcgaacgtcgacggatacagcccaatctacaacgaggatgactggtctcccaccggcgacgtctacgtngtggaaccactgggcttctgatctgggccgtcaccctcgctgggatcctcggcggcggcgccctcctcgtctacaacaccagcgccctctccggctaaggatatccaatgcatgcgcttcttgcgattcgtcatgtaaaatcagggtgtctgtctataatctagcctccatggatgctcaaccttcgtcatgtaacaataatcagtgctactcttcattacataattttgatgcc

SEQ ID NO: 8152 - protein, 102 aa, Zea mays subsp. mays
  peptide (1)..(102): Ceres Seq. ID no. 12400981
  misc_feature (35)..(96): Pfam Name: Photosystem II 10 kDa polypeptide PsbR Pfam Description: Photosystem II 10 kDa polypeptide PsbR
  misc_feature (1)..(96): Homolog of NCBI NO: 38636958 NR Description: putative photosystem II 10K protein [Oryza sativa
  misc_feature (5)..(96): Homolog of NCBI NO: 7443194 NR Description: photosystem II 10K protein - rice
  misc_feature (1)..(96): Homolog of NCBI NO: 131399 NR Description: Photosystem II 10 kDa polypeptide, chloroplast
  misc_feature (1)..(96): Homolog of NCBI NO: 3914471 NR Description: Photosystem II 10 kDa polypeptide, chloroplast >gi|1217642|emb|CAA65231.1| PSII polypeptide [Lycopersicon
  misc_feature (14)..(96): Homolog of NCBI NO: 3914472 NR Description: Photosystem II 10 kDa polypeptide, chloroplast
  misc_feature (1)..(96): Homolog of NCBI NO: 25989650 NR Description: photosystem II 10 kDa protein [Xerophyta humilis]
  misc_feature (13)..(96): Homolog of NCBI NO: 1418984 NR Description: photosystem II 10 kD polypeptide [Lycopersicon
  misc_feature (1)..(96): Homolog of NCBI NO: 21491 NR Description: ST-LS1 protein (AA 1-138) [Solanum tuberosum]
  misc_feature (14)..(95): Homolog of NCBI NO: 131400 NR Description: Photosystem II 10 kDa polypeptide, chloroplast
  misc_feature (16)..(95): Homolog of NCBI NO: 28207611 NR Description: photosystem II 10kDa polypeptide [Brassica rapa
  misc_feature (96)..(96): Xaa is any aa, unknown or other
MAASMISSSALAVAPQGLPPLGRRASSFAVVCSKKKIKTDKPYGIGGGLTVDVDANGRKGKGKGVYQFVDKYGANVDGYSPIYNEDDWSPTGDVYXVEPLGF

SEQ ID NO: 8153 - protein, 98 aa, Zea mays subsp. mays
  peptide (1)..(98): Ceres Seq. ID no. 12400982
  misc_feature (31)..(92): Pfam Name: Photosystem II 10 kDa polypeptide PsbR Pfam Description: Photosystem II 10 kDa polypeptide PsbR
  misc_feature (1)..(92): Homolog of NCBI NO: 38636958 NR Description: putative photosystem II 10K protein [Oryza sativa
  misc_feature (1)..(92): Homolog of NCBI NO: 7443194 NR Description: photosystem II 10K protein - rice
  misc_feature (1)..(92): Homolog of NCBI NO: 131399 NR Description: Photosystem II 10 kDa polypeptide, chloroplast
  misc_feature (1)..(92): Homolog of NCBI NO: 3914471 NR Description: Photosystem II 10 kDa polypeptide, chloroplast >gi|1217642|emb|CAA65231.1| PSII polypeptide [Lycopersicon
  misc_feature (10)..(92): Homolog of NCBI NO: 3914472 NR Description: Photosystem II 10 kDa polypeptide, chloroplast
  misc_feature (1)..(92): Homolog of NCBI NO: 25989650 NR Description: photosystem II 10 kDa protein [Xerophyta humilis]
  misc_feature (9)..(92): Homolog of NCBI NO: 1418984 NR Description: photosystem II 10 kD polypeptide [Lycopersicon
  misc_feature (1)..(92): Homolog of NCBI NO: 21491 NR Description: ST-LS1 protein (AA 1-138) [Solanum tuberosum]
  misc_feature (10)..(91): Homolog of NCBI NO: 131400 NR Description: Photosystem II 10 kDa polypeptide, chloroplast
  misc_feature (12)..(91): Homolog of NCBI NO: 28207611 NR Description: photosystem II 10kDa polypeptide [Brassica rapa
  misc_feature (92)..(92): Xaa is any aa, unknown or other
MISSSALAVAPQGLPPLGRRASSFAVVCSKKKIKTDKPYGIGGGLTVDVDANGRKGKGKGVYQFVDKYGANVDGYSPIYNEDDWSPTGDVYXVEPLGF

SEQ ID NO: 8154 - protein, 89 aa, Zea mays subsp. mays
  peptide (1)..(89): Ceres Seq. ID no. 12400983
  misc_feature (11)..(11): Xaa is any aa, unknown or other
MTGLPPATSTXWNHWASDLGRHPRWDPRRRRPPRLQHQRPLRLRISNACASCDSSCKIRVSVYNLASMDAQPSSCNNNQCYSSLHNFDA

SEQ ID NO: 8155 - DNA, 911 bp, Zea mays subsp. mays
  misc_feature (1)..(911): Ceres Seq. ID no. 12402669
  misc_feature: MA Experiment ID: 108528 Result: Up-regulated in Transcription
  misc_feature: MA Experiment 108528 PARAMETER Experiment Name: Zm_Imbibed_Seeds_P Parameter: Age (day) Value: 5 vs. 2
  misc_feature: MA Experiment 108528 PARAMETER Experiment Name: Zm_Imbibed_Seeds_P Parameter: Organism Value: Zea mays
  misc_feature: MA Experiment 108528 PARAMETER Experiment Name: Zm_Imbibed_Seeds_P Parameter: Plant Line Value: 35A19
  misc_feature: MA Experiment 108528 PARAMETER Experiment Name: Zm_Imbibed_Seeds_P Parameter: Tissue Value: Aerial vs. Embryo
  misc_feature: MA Experiment ID: 108530 Result: Up-regulated in Transcription
  misc_feature: MA Experiment 108530 PARAMETER Experiment Name: Zm_Imbibed_Seeds_P Parameter: Age (day) Value: 6 vs. 2
  misc_feature: MA Experiment 108530 PARAMETER Experiment Name: Zm_Imbibed_Seeds_P Parameter: Organism Value: Zea mays
  misc_feature: MA Experiment 108530 PARAMETER Experiment Name: Zm_Imbibed_Seeds_P Parameter: Plant Line Value: 35A19
  misc_feature: MA Experiment 108530 PARAMETER Experiment Name: Zm_Imbibed_Seeds_P Parameter: Tissue Value: Aerial vs. Embryo
  misc_feature: MA Experiment ID: 108536 Result: Down-regulated in Transcription
  misc_feature: MA Experiment 108536 PARAMETER Experiment Name: Zm_Meristem_P Parameter: Age (day) Value: 8
  misc_feature: MA Experiment 108536 PARAMETER Experiment Name: Zm_Meristem_P Parameter: Organism Value: Zea mays
  misc_feature: MA Experiment 108536 PARAMETER Experiment Name: Zm_Meristem_P Parameter: Plant Line Value: 35A19
  misc_feature: MA Experiment 108536 PARAMETER Experiment Name: Zm_Meristem_P Parameter: Tissue Value: Shoot Meristem vs. Above Shoot Meristem
  misc_feature: MA Experiment ID: 108547 Result: Up-regulated in Transcription
  misc_feature: MA Experiment 108547 PARAMETER Experiment Name: Zm_Imbibed_Seeds_P Parameter: Age (day) Value: 4 vs. 2
  misc_feature: MA Experiment 108547 PARAMETER Experiment Name: Zm_Imbibed_Seeds_P Parameter: Organism Value: Zea mays
  misc_feature: MA Experiment 108547 PARAMETER Experiment Name: Zm_Imbibed_Seeds_P Parameter: Plant Line Value: 35A19
  misc_feature: MA Experiment 108547 PARAMETER Experiment Name: Zm_Imbibed_Seeds_P Parameter: Tissue Value: Aerial vs. Embryo
  misc_feature: MA Experiment ID: 108689 Result: Up-regulated in Transcription
  misc_feature: MA Experiment 108689 PARAMETER Experiment Name: Zm_Drought_Roots_P Parameter: Age (day) Value: 9
  misc_feature: MA Experiment 108689 PARAMETER Experiment Name: Zm_Drought_Roots_P Parameter: Organism Value: Zea mays
  misc_feature: MA Experiment 108689 PARAMETER Experiment Name: Zm_Drought_Roots_P Parameter: Plant Line Value: 35A19
  misc_feature: MA Experiment 108689 PARAMETER Experiment Name: Zm_Drought_Roots_P Parameter: Timepoint (hr) Value: 24
  misc_feature: MA Experiment 108689 PARAMETER Experiment Name: Zm_Drought_Roots_P Parameter: Tissue Value: Roots
  misc_feature: MA Experiment 108689 PARAMETER Experiment Name: Zm_Drought_Roots_P Parameter: Treatment Value: Drought vs. No Drought
gcgatttcccctcgcagtctctcgcacgcgccggcatggcgacgctcgcgcggtggcatctacaacctcctactgcccgccccctcgctcgccggcggatcccgcgtcgggctgcgaccgtggtttccccgcgcgcgttcagccgcgcggacttcgatggcttcgtgcggcgcgcgtggcagggcgccaacgcgggggccgagcgcttcgccttcgaggcacggcaggccgcgcagcggctggacagcaggttctcgatctcccggaggctcgcggacgcttcccgtgccgcccgcgcccgcgccgttgagatcgacgccgagttcggcatcgggaggcggtggcgctccttctccgtcgacttctcccgcaactggcccaggtatcggagggagatcaatgacttcatggaaactcccatcgggagagcattagctacaatattttttctgtggttagcactgtcagggtggttgttcagaattttcatttttggcacgtttgtgctgccatttgctgcccctcttctccttgggacctttgctaacagggttgccattgagggaacatgcccagcatgcaaaaggcgtttcgtgggctaccgcaaccaagtgattcggtgcatgagctgccaaaacattgtatggcagccaaataacagcccatctggtggtgctagaagttcacgaagctcggaacctgatgtgattgatgtagaatatgaagagaagtaagaacattctgccccaccctacaccgaaaagcaaaaatcacgtgggcggaagaagaggcaaggcttcagacacaggctgcaccccatgagctatttgtagatttggttgtttgtgtttttctggtgtacatacattacgtgctcctttcgaaataaaatggaaattctggtgttgtgc

SEQ ID NO: 8156 - protein, 243 aa, Zea mays subsp. mays
  peptide (1)..(243): Ceres Seq. ID no. 12402670
  misc_feature (12)..(243): Homolog of NCBI NO: 37537000 NR Description: unknown protein [Oryza sativa (japonica
  misc_feature (34)..(243): Homolog of NCBI NO: 18406650 NR Description: expressed protein; protein id: At2g44870.1, by cDNA: 33789., supported by cDNA: gi_13899074, supported by gi_18377519 [Arabidopsis thaliana]
  misc_feature (34)..(243): Homolog of NCBI NO: 7486940 NR Description: hypothetical protein At2g44870 [imported] -
DFPSQSLARAGMATLARWHLQPPTARPLARRRIPRRAATVVSPRAFSRADFDGFVRRAWQGANAGAERFAFEARQAAQRLDSRFSISRRLADASRAARARAVEIDAEFGIGRRWRSFSVDFSRNWPRYRREINDFMETPIGRALATIFFLWLALSGWLFRIFIFGTFVLPFAAPLLLGTFANRVAIEGTCPACKRRFVGYRNQVIRCMSCQNIVWQPNNSPSGGARSSRSSEPDVIDVEYEEK

SEQ ID NO: 8157 - protein, 232 aa, Zea mays subsp. mays
  peptide (1)..(232): Ceres Seq. ID no. 12402671
  misc_feature (1)..(232): Homolog of NCBI NO: 37537000 NR Description: unknown protein [Oryza sativa (japonica
  misc_feature (23)..(232): Homolog of NCBI NO: 18406650 NR Description: expressed protein; protein id: At2g44870.1, by cDNA: 33789., supported by cDNA: gi_13899074, supported by gi_18377519 [Arabidopsis thaliana]
  misc_feature (23)..(232): Homolog of NCBI NO: 7486940 NR Description: hypothetical protein At2g44870 [imported] -
MATLARWHLQPPTARPLARRRIPRRAATVVSPRAFSRADFDGFVRRAWQGANAGAERFAFEARQAAQRLDSRFSISRRLADASRAARARAVEIDAEFGIGRRWRSFSVDFSRNWPRYRREINDFMETPIGRALATIFFLWLALSGWLFRIFIFGTFVLPFAAPLLLGTFANRVAIEGTCPACKRRFVGYRNQVIRCMSCQNIVWQPNNSPSGGARSSRSSEPDVIDVEYEEK

SEQ ID NO: 8158 - protein, 144 aa, Zea mays subsp. mays
  peptide (1)..(144): Ceres Seq. ID no. 12402672
AISPRSLSHAPAWRRSRGGIYNLLLPAPSLAGGSRVGLRPWFPRARSAARTSMASCGARGRAPTRGPSASPSRHGRPRSGWTAGSRSPGGSRTLPVPPAPAPLRSTPSSASGGGGAPSPSTSPATGPGIGGRSMTSWKLPSGEH

SEQ ID NO: 8159 - DNA, 1022 bp, Zea mays subsp. mays
  misc_feature (1)..(1022): Ceres Seq. ID no. 12402380
  misc_feature: MA Experiment ID: 108543 Result: Up-regulated in Transcription
  misc_feature: MA Experiment ID: 108544 Result: Up-regulated in Transcription
  misc_feature: MA Experiment ID: 108687 Result: Down-regulated in Transcription
  misc_feature: MA Experiment 108687 PARAMETER Experiment Name: Zm_Embryos-Flowers__P Parameter: Tissue Value: Embryo vs. Aerial+
  misc_feature: MA Experiment ID: 20000535 Result: Down-regulated in Transcription
  misc_feature: MA Experiment 20000535 PARAMETER Experiment Name: Zm_Hybrid_Seed_Dev_P Parameter: DAP Value: 30 vs. 12
  misc_feature: MA Experiment 20000535 PARAMETER Experiment Name: Zm_Hybrid_Seed_Dev_P Parameter: Organism Value: Zea mays
  misc_feature: MA Experiment 20000535 PARAMETER Experiment Name: Zm_Hybrid_Seed_Dev_P Parameter: Plant Line Value: 35A19
  misc_feature: MA Experiment 20000535 PARAMETER Experiment Name: Zm_Hybrid_Seed_Dev_P Parameter: Tissue Value: Embryo vs. Unfert Floret
aagttaggtttctagccagttgtcgcgttgggacaaaatgaaaagggaataaataaaaagagagaataactggctagttgtcgtctgcctctcgatttctgcgtgattcgcctgcctgccttcctgttggttgcttctttctactcgcgctcgcaccaaccagaggagcaaccgagcagtagcgactcctctgcgtgaggcctgccgtcatcccccgtgggccgtggccgtgcgcaaaaaaacaaatcatcctcgattcgaccagaggggaaggagacgcgccgggagaagggggaagagacgcggcgaccatgtctccgatctgggtgttcgggtacggctcgctgatctggaacccaggtttcgcctacgacgaccgcgtcgtcggctttgtcagggactaccgccgcgtcttctaccaagggagcacggaccacaggggcacgccgcagttccccgggaggaccgtcacgctcgagcaccagcccggagcgacttgctggggagttgcttacagaataaaggaggaagatgaggagatagctttggagtatcttgaagtcagggagaagcaatacgatgagaaagtttaccttgacttgtatactgattcatcgcccaaagtaccagctgtcgaaaacgtgatggtatacttcgccaccagtaacaagaagaacaatcaaaactatcttggtcctgcacctctggaagaaatgaccaggcaaatttaccttgctcaaggcccatctggacctaacaaagagtatgtgttcaaactcgaggacgcgttacacaaattaggagttgtagaccaacatgtccaagaactggcaaatgctctgcgtgagtattctgacaccgagctatctaagtgaaagatcacatttaccccttgtttggagggtaaggatttataaataaagttagaattcattcatgcatgtcccaacatggatatattcttgtaagctgcgttttgagtgactacattacgattatattcctgtgcacatgtggtttgc

SEQ ID NO: 8160 - protein, 187 aa, Zea mays subsp. mays
  peptide (1)..(187): Ceres Seq. ID no. 12402381
  misc_feature (4)..(178): Pfam Name: ChaC-like protein Pfam Description: ChaC-like protein
  misc_feature (4)..(184): Homolog of NCBI NO: 18401334 NR Description: expressed protein; protein id: At1g44790.1,
  misc_feature (4)..(182): Homolog of NCBI NO: 15239626 NR Description: putative protein; protein id: At5g26220.1 thaliana] >gi|26450775|dbj|BAC42496.1| unknown protein thaliana] >gi|28950749|gb|AAO63298.1| At5g26220 [Arabidopsis
  misc_feature (4)..(184): Homolog of NCBI NO: 25349686 NR Description: hypothetical protein T12C22.6 [imported] - thaliana >gi|8655989|gb|AAF78262.1|AC020576_6 Contains similarity cation transport protein CHAC from Escherichia coli gi|2506988.
  misc_feature (4)..(187): Homolog of NCBI NO: 18417778 NR Description: unknown protein; protein id: At4g31290.1,
  misc_feature (4)..(186): Homolog of NCBI NO: 38344831 NR Description: OSJNBa0064H22.12 [Oryza sativa (japonica
  misc_feature (4)..(184): Homolog of NCBI NO: 12083292 NR Description: unknown protein [Arabidopsis thaliana]
  misc_feature (4)..(187): Homolog of NCBI NO: 21593515 NR Description: unknown [Arabidopsis thaliana]
  misc_feature (5)..(187): Homolog of NCBI NO: 27525010 NR Description: putative cation transporter [Beta procumbens]
  misc_feature (84)..(182): Homolog of NCBI NO: 7486723 NR Description: hypothetical protein F9D12.14 - Arabidopsis >gi|3319340|gb|AAC26229.1| contains similarity to E. coli cation
  misc_feature (4)..(80): Homolog of NCBI NO: 7486723 NR Description: hypothetical protein F9D12.14 - Arabidopsis >gi|3319340|gb|AAC26229.1| contains similarity to E. coli cation
MSPIWVFGYGSLIWNPGFAYDDRVVGFVRDYRRVFYQGSTDHRGTPQFPGRTVTLEHQPGATCWGVAYRIKEEDEEIALEYLEVREKQYDEKVYLDLYTDSSPKVPAVENVMVYFATSNKKNNQNYLGPAPLEEMTRQIYLAQGPSGPNKEYVFKLEDALHKLGVVDQHVQELANALREYSDTELSK

SEQ ID NO: 8161 - DNA, 987 bp, Zea mays subsp. mays
  misc_feature (1)..(987): Ceres Seq. ID no. 12356601
  misc_feature: MA Experiment ID: 108528 Result: Up-regulated in Transcription
  misc_feature: MA Experiment 108528 PARAMETER Experiment Name: Zm_Imbibed_Seeds_P Parameter: Age (day) Value: 5 vs. 2
  misc_feature: MA Experiment 108528 PARAMETER Experiment Name: Zm_Imbibed_Seeds_P Parameter: Organism Value: Zea mays
  misc_feature: MA Experiment 108528 PARAMETER Experiment Name: Zm_Imbibed_Seeds_P Parameter: Plant Line Value: 35A19
  misc_feature: MA Experiment 108528 PARAMETER Experiment Name: Zm_Imbibed_Seeds_P Parameter: Tissue Value: Aerial vs. Embryo
  misc_feature: MA Experiment ID: 108530 Result: Up-regulated in Transcription
  misc_feature: MA Experiment 108530 PARAMETER Experiment Name: Zm_Imbibed_Seeds_P Parameter: Age (day) Value: 6 vs. 2
  misc_feature: MA Experiment 108530 PARAMETER Experiment Name: Zm_Imbibed_Seeds_P Parameter: Organism Value: Zea mays
  misc_feature: MA Experiment 108530 PARAMETER Experiment Name: Zm_Imbibed_Seeds_P Parameter: Plant Line Value: 35A19
  misc_feature: MA Experiment 108530 PARAMETER Experiment Name: Zm_Imbibed_Seeds_P Parameter: Tissue Value: Aerial vs. Embryo
  misc_feature: MA Experiment ID: 108535 Result: Down-regulated in Transcription
  misc_feature: MA Experiment 108535 PARAMETER Experiment Name: Zm_Meristem_P Parameter: Age (day) Value: 8
  misc_feature: MA Experiment 108535 PARAMETER Experiment Name: Zm_Meristem_P Parameter: Organism Value: Zea mays
  misc_feature: MA Experiment 108535 PARAMETER Experiment Name: Zm_Meristem_P Parameter: Plant Line Value: 35A19
  misc_feature: MA Experiment 108535 PARAMETER Experiment Name: Zm_Meristem_P Parameter: Tissue Value: Root Meristem vs. Above Root Meristem
  misc_feature: MA Experiment ID: 108547 Result: Up-regulated in Transcription
  misc_feature: MA Experiment 108547 PARAMETER Experiment Name: Zm_Imbibed_Seeds_P Parameter: Age (day) Value: 4 vs. 2
  misc_feature: MA Experiment 108547 PARAMETER Experiment Name: Zm_Imbibed_Seeds_P Parameter: Organism Value: Zea mays
  misc_feature: MA Experiment 108547 PARAMETER Experiment Name: Zm_Imbibed_Seeds_P Parameter: Plant Line Value: 35A19
  misc_feature: MA Experiment 108547 PARAMETER Experiment Name: Zm_Imbibed_Seeds_P Parameter: Tissue Value: Aerial vs. Embryo
  misc_feature: MA Experiment ID: 20000108 Result: Down-regulated in Transcription
  misc_feature: MA Experiment 20000108 PARAMETER Experiment Name: Zm_Root-Tips_P Parameter: Age (day) Value: 12
  misc_feature: MA Experiment 20000108 PARAMETER Experiment Name: Zm_Root-Tips_P Parameter: Organism Value: Zea mays
  misc_feature: MA Experiment 20000108 PARAMETER Experiment Name: Zm_Root-Tips_P Parameter: Tissue Value: Root tips vs. Root mid region    35
  misc_feature: MA Experiment 20000108 PARAMETER Experiment Name: Zm_Root-Tips_P Parameter: Tissue Value: Root tips vs. Root mid region   Sequence Listing-Misc Features (4)
atccgcttgtccctaccacctccaccaaccaaaacccccaaccgccgaggtcaccggcgactccgtcctcgccgcgccgcgccgtgaggatgtcgttccactaccacgaccacgggctgtnnatggacgccgcggcagcggcggccgccgccgcgtcgtcgccgaaccctagcggcttctcccccggcatcggcggggaaagggagaaggcggccatcgcggcgcacccgctgtacgagcgcctcctggaggcgcacgtcgcctgcctacgcgtcgccacccccgtcgaccagctcccccgcatcgacgcgcagatcgccgcgcgcccncngccgctcnccgcggccgccggggccgcggccgcgggaggcccgtccggcggggaggagctcgacctcttcatgacgcactatgtattgctcctttgctgatgcaaggngcagttgcagcagcatgtacgtgttcatgcaatggaagcagtgatgggttgctgggagcttgnacaatctttacaaagcctaacaggggcatctccgggtgaaggcactggaggaaccatgtctgacgatgaagataaccaggtggatagtgaagccaacatgttcgatggaaatgatggatcagacggtatgggctttggccccctaatactgacagagggtgaacggtccttagttgagcgtgtacggaaggagctgaagaacgagcttaagcagggttacaaggaaaagcttgtcgatatcagggaagagatcatgcgcaaacgcagggctgggaaacttcctggagataccgcatctgtactgaaagcttggtggcaagctcattcgaagtggccgtacccaactgaagacgacaaggccagactggtgcaggaaacggggttgcagctaaagcagatcaacaactggttcattaaccaacgcaaacggaactggcacagcaacccaacatcctcggctgaaaagaccaaaaaaaaaaaaaaaa

SEQ ID NO: 8162 - protein, 172 aa, Zea mays subsp. mays
  peptide (1)..(172): Ceres Seq. ID no. 12356602
  misc_feature (98)..(154): Pfam Name: Homeobox domain Pfam Description: Homeobox domain
  misc_feature (1)..(171): Homolog of NCBI NO: 14149139 NR Description: KNOX family class 2 homeodomain protein [Oryza
  misc_feature (1)..(171): Homolog of NCBI NO: 33333542 NR Description: knotted 7 [Hordeum vulgare]
  misc_feature (1)..(171): Homolog of NCBI NO: 7446253 NR Description: probable homeobox protein OSH45, splice form OSH44
  misc_feature (1)..(171): Homolog of NCBI NO: 15238743 NR Description: KNAT3 homeodomain protein; protein id:
  misc_feature (1)..(171): Homolog of NCBI NO: 21554222 NR Description: KNAT3 homeodomain protein [Arabidopsis thaliana]
  misc_feature (1)..(171): Homolog of NCBI NO: 21539535 NR Description: KNAT3 homeodomain protein [Arabidopsis thaliana]
  misc_feature (1)..(170): Homolog of NCBI NO: 7446252 NR Description: probable homeobox protein OSH45, splice form OSH45
  misc_feature (1)..(171): Homolog of NCBI NO: 3023961 NR Description: Homeobox protein knotted-1 like 3 (KNAP3)
  misc_feature (1)..(171): Homolog of NCBI NO: 20141566 NR Description: Homeobox protein knotted-1 like 4 (KNAT4)
  misc_feature (1)..(171): Homolog of NCBI NO: 1045044 NR Description: KNAT4 homeobox protein [Arabidopsis thaliana]
  misc_feature (11)..(11): Xaa is any aa, unknown or other
MEAVMGCWELXQSLQSLTGASPGEGTGGTMSDDEDNQVDSEANMFDGNDGSDGMGFGPLILTEGERSLVERVRKELKNELKQGYKEKLVDIREEIMRKRRAGKLPGDTASVLKAWWQAHSKWPYPTEDDKARLVQETGLQLKQINNWFINQRKRNWHSNPTSSAEKTKKKKK

SEQ ID NO: 8163 - protein, 168 aa, Zea mays subsp. mays
  peptide (1)..(168): Ceres Seq. ID no. 12356603
  misc_feature (94)..(150): Pfam Name: Homeobox domain Pfam Description: Homeobox domain
  misc_feature (1)..(167): Homolog of NCBI NO: 14149139 NR Description: KNOX family class 2 homeodomain protein [Oryza
  misc_feature (1)..(167): Homolog of NCBI NO: 33333542 NR Description: knotted 7 [Hordeum vulgare]
  misc_feature (1)..(167): Homolog of NCBI NO: 7446253 NR Description: probable homeobox protein OSH45, splice form OSH44
  misc_feature (1)..(167): Homolog of NCBI NO: 15238743 NR Description: KNAT3 homeodomain protein; protein id:
  misc_feature (1)..(167): Homolog of NCBI NO: 21539535 NR Description: KNAT3 homeodomain protein [Arabidopsis thaliana]
  misc_feature (1)..(167): Homolog of NCBI NO: 21554222 NR Description: KNAT3 homeodomain protein [Arabidopsis thaliana]
  misc_feature (1)..(166): Homolog of NCBI NO: 7446252 NR Description: probable homeobox protein OSH45, splice form OSH45
  misc_feature (1)..(167): Homolog of NCBI NO: 3023961 NR Description: Homeobox protein knotted-1 like 3 (KNAP3)
  misc_feature (1)..(167): Homolog of NCBI NO: 20141566 NR Description: Homeobox protein knotted-1 like 4 (KNAT4)
  misc_feature (1)..(167): Homolog of NCBI NO: 1045044 NR Description: KNAT4 homeobox protein [Arabidopsis thaliana]
  misc_feature (7)..(7): Xaa is any aa, unknown or other
MGCWELXQSLQSLTGASPGEGTGGTMSDDEDNQVDSEANMFDGNDGSDGMGFGPLILTEGERSLVERVRKELKNELKQGYKEKLVDIREEIMRKRRAGKLPGDTASVLKAWWQAHSKWPYPTEDDKARLVQETGLQLKQINNWFINQRKRNWHSNPTSSAEKTKKKKK

SEQ ID NO: 8164 - protein, 143 aa, Zea mays subsp. mays
  peptide (1)..(143): Ceres Seq. ID no. 12356604
  misc_feature (69)..(125): Pfam Name: Homeobox domain Pfam Description: Homeobox domain
  misc_feature (1)..(142): Homolog of NCBI NO: 14149139 NR Description: KNOX family class 2 homeodomain protein [Oryza
  misc_feature (1)..(142): Homolog of NCBI NO: 33333542 NR Description: knotted 7 [Hordeum vulgare]
  misc_feature (1)..(142): Homolog of NCBI NO: 7446253 NR Description: probable homeobox protein OSH45, splice form OSH44
  misc_feature (1)..(142): Homolog of NCBI NO: 15238743 NR Description: KNAT3 homeodomain protein; protein id:
  misc_feature (1)..(142): Homolog of NCBI NO: 21539535 NR Description: KNAT3 homeodomain protein [Arabidopsis thaliana]
  misc_feature (1)..(142): Homolog of NCBI NO: 21554222 NR Description: KNAT3 homeodomain protein [Arabidopsis thaliana]
  misc_feature (1)..(141): Homolog of NCBI NO: 7446252 NR Description: probable homeobox protein OSH45, splice form OSH45
  misc_feature (1)..(142): Homolog of NCBI NO: 3023961 NR Description: Homeobox protein knotted-1 like 3 (KNAP3)
  misc_feature (1)..(142): Homolog of NCBI NO: 20141566 NR Description: Homeobox protein knotted-1 like 4 (KNAT4)
  misc_feature (1)..(142): Homolog of NCBI NO: 1045044 NR Description: KNAT4 homeobox protein [Arabidopsis thaliana]
MSDDEDNQVDSEANMFDGNDGSDGMGFGPLILTEGERSLVERVRKELKNELKQGYKEKLVDIREEIMRKRRAGKLPGDTASVLKAWWQAHSKWPYPTEDDKARLVQETGLQLKQINNWFINQRKRNWHSNPTSSAEKTKKKKK

SEQ ID NO: 8165 - DNA, 726 bp, Zea mays subsp. mays
  misc_feature (1)..(726): Ceres Seq. ID no. 12402116
  misc_feature: MA Experiment ID: 108515 Result: Down-regulated in Transcription
  misc_feature: MA Experiment 108515 PARAMETER Experiment Name: Zm_2mM_SA_P Parameter: Age (day) Value: 8
  misc_feature: MA Experiment 108515 PARAMETER Experiment Name: Zm_2mM_SA_P Parameter: Organism Value: Zea mays
  misc_feature: MA Experiment 108515 PARAMETER Experiment Name: Zm_2mM_SA_P Parameter: Plant Line Value: 35A19
  misc_feature: MA Experiment 108515 PARAMETER Experiment Name: Zm_2mM_SA_P Parameter: Timepoint (hr) Value: 12
  misc_feature: MA Experiment 108515 PARAMETER Experiment Name: Zm_2mM_SA_P Parameter: Tissue Value: Aerial
  misc_feature: MA Experiment 108515 PARAMETER Experiment Name: Zm_2mM_SA_P Parameter: Treatment Value: 2mM SA vs. No Treatment
  misc_feature: MA Experiment ID: 108528 Result: Up-regulated in Transcription
  misc_feature: MA Experiment 108528 PARAMETER Experiment Name: Zm_Imbibed_Seeds_P Parameter: Age (day) Value: 5 vs. 2
  misc_feature: MA Experiment 108528 PARAMETER Experiment Name: Zm_Imbibed_Seeds_P Parameter: Organism Value: Zea mays
  misc_feature: MA Experiment 108528 PARAMETER Experiment Name: Zm_Imbibed_Seeds_P Parameter: Plant Line Value: 35A19
  misc_feature: MA Experiment 108528 PARAMETER Experiment Name: Zm_Imbibed_Seeds_P Parameter: Tissue Value: Aerial vs. Embryo
  misc_feature: MA Experiment ID: 108530 Result: Up-regulated in Transcription
  misc_feature: MA Experiment 108530 PARAMETER Experiment Name: Zm_Imbibed_Seeds_P Parameter: Age (day) Value: 6 vs. 2
  misc_feature: MA Experiment 108530 PARAMETER Experiment Name: Zm_Imbibed_Seeds_P Parameter: Organism Value: Zea mays
  misc_feature: MA Experiment 108530 PARAMETER Experiment Name: Zm_Imbibed_Seeds_P Parameter: Plant Line Value: 35A19
  misc_feature: MA Experiment 108530 PARAMETER Experiment Name: Zm_Imbibed_Seeds_P Parameter: Tissue Value: Aerial vs. Embryo
  misc_feature: MA Experiment ID: 108536 Result: Down-regulated in Transcription
  misc_feature: MA Experiment 108536 PARAMETER Experiment Name: Zm_Meristem_P Parameter: Age (day) Value: 8
  misc_feature: MA Experiment 108536 PARAMETER Experiment Name: Zm_Meristem_P Parameter: Organism Value: Zea mays
  misc_feature: MA Experiment 108536 PARAMETER Experiment Name: Zm_Meristem_P Parameter: Plant Line Value: 35A19
  misc_feature: MA Experiment 108536 PARAMETER Experiment Name: Zm_Meristem_P Parameter: Tissue Value: Shoot Meristem vs. Above Shoot Meristem
  misc_feature: MA Experiment ID: 108545 Result: Up-regulated in Transcription
  misc_feature: MA Experiment 108545 PARAMETER Experiment Name: Zm_Imbibed_Seeds_P Parameter: Age (day) Value: 3 vs. 2
  misc_feature: MA Experiment 108545 PARAMETER Experiment Name: Zm_Imbibed_Seeds_P Parameter: Organism Value: Zea mays
  misc_feature: MA Experiment 108545 PARAMETER Experiment Name: Zm_Imbibed_Seeds_P Parameter: Plant Line Value: 35A19
  misc_feature: MA Experiment 108545 PARAMETER Experiment Name: Zm_Imbibed_Seeds_P Parameter: Tissue Value: Aerial vs. Embryo
  misc_feature: MA Experiment ID: 108547 Result: Up-regulated in Transcription
  misc_feature: MA Experiment 108547 PARAMETER Experiment Name: Zm_Imbibed_Seeds_P Parameter: Age (day) Value: 4 vs. 2
  misc_feature: MA Experiment 108547 PARAMETER Experiment Name: Zm_Imbibed_Seeds_P Parameter: Organism Value: Zea mays
  misc_feature: MA Experiment 108547 PARAMETER Experiment Name: Zm_Imbibed_Seeds_P Parameter: Plant Line Value: 35A19
  misc_feature: MA Experiment 108547 PARAMETER Experiment Name: Zm_Imbibed_Seeds_P Parameter: Tissue Value: Aerial vs. Embryo
  misc_feature: MA Experiment ID: 108687 Result: Down-regulated in Transcription
  misc_feature: MA Experiment 108687 PARAMETER Experiment Name: Zm_Embryos-Flowers__P Parameter: Tissue Value: Embryo vs. Aerial+
  misc_feature: MA Experiment ID: 20000535 Result: Down-regulated in Transcription
  misc_feature: MA Experiment 20000535 PARAMETER Experiment Name: Zm_Hybrid_Seed_Dev_P Parameter: DAP Value: 30 vs. 12
  misc_feature: MA Experiment 20000535 PARAMETER Experiment Name: Zm_Hybrid_Seed_Dev_P Parameter: Organism Value: Zea mays
  misc_feature: MA Experiment 20000535 PARAMETER Experiment Name: Zm_Hybrid_Seed_Dev_P Parameter: Plant Line Value: 35A19
  misc_feature: MA Experiment 20000535 PARAMETER Experiment Name: Zm_Hybrid_Seed_Dev_P Parameter: Tissue Value: Embryo vs. Unfert Floret
atccgccgaattaagttcctgcacgtacgcacgcaccgggacaccagcaacccccaacagcgccactgtccagtgcgcgcgtcaagcttgcttagctagccgccatggcctccctcgccgccgtctccgtgaagcccgtggccatcaagggtctcgccggcagctccatctccggaaggaagctcgccgtcgccaggccgtcggcccgctccatccgcaggccccgcgcagccgccgtggtggccaagtacggcgacaagagcgtctactttgacctcgacgacatcggcaacaccaccggacagtgggacctctacggctctgacgcgccctcgccctacaacccgctacagagcaagttcttcgagacgttcgcggctccgttcaccaagagaggtctgctgctcaagttcctgctgctgggcggcggctcacttctggcctacgtcagcgcgtcggcgtcaccggacctcctgccgatcaagaagggacctcaggagccgccgcagccgggcccgcgcggcaagatctaagctcagcttctccatttgcatggtctagtagtagcttgctttgtactgctagcgccggtcgatccgtcgcaatcgtcatggatcatctctctatcttgttgttacgctgttcataatttggtatatttgccattccgctattgtgtactctttggcatacatacaataattaaaatggcgttgcgtggctttc

SEQ ID NO: 8166 - protein, 142 aa, Zea mays subsp. mays
  peptide (1)..(142): Ceres Seq. ID no. 12402117
  misc_feature (5)..(142): Pfam Name: Photosystem I reaction centre subunit VI Pfam Description: Photosystem I reaction centre subunit VI
  misc_feature (1)..(142): Homolog of NCBI NO: 3914465 NR Description: Photosystem I reaction center subunit VI,
  misc_feature (1)..(142): Homolog of NCBI NO: 3885894 NR Description: photosystem-1 H subunit GOS5 [Oryza sativa]
  misc_feature (1)..(142): Homolog of NCBI NO: 17380533 NR Description: Photosystem I reaction center subunit VI,
  misc_feature (1)..(142): Homolog of NCBI NO: 72679 NR Description: photosystem I protein psaH precursor - rice
  misc_feature (1)..(142): Homolog of NCBI NO: 131196 NR Description: Photosystem I reaction center subunit VI,
  misc_feature (1)..(142): Homolog of NCBI NO: 15218186 NR Description: photosystem I subunit VI precursor; protein id: supported by cDNA: 1440., supported by cDNA: gi_14326517
  misc_feature (1)..(142): Homolog of NCBI NO: 15233291 NR Description: photosystem I subunit VI precursor; protein id:
  misc_feature (1)..(142): Homolog of NCBI NO: 3914442 NR Description: Photosystem I reaction center subunit VI,
  misc_feature (1)..(142): Homolog of NCBI NO: 33520419 NR Description: photosystem I psaH protein [Trifolium pratense]
  misc_feature (1)..(142): Homolog of NCBI NO: 131199 NR Description: Photosystem I reaction center subunit VI,
MASLAAVSVKPVAIKGLAGSSISGRKLAVARPSARSIRRPRAAAVVAKYGDKSVYFDLDDIGNTTGQWDLYGSDAPSPYNPLQSKFFETFAAPFTKRGLLLKFLLLGGGSLLAYVSASASPDLLPIKKGPQEPPQPGPRGKI

SEQ ID NO: 8167 - protein, 90 aa, Zea mays subsp. mays
  peptide (1)..(90): Ceres Seq. ID no. 12402118
SAELSSCTYARTGTPATPNSATVQCARQACLASRHGLPRRRLREARGHQGSRRQLHLRKEARRRQAVGPLHPQAPRSRRGGQVRRQERLL

SEQ ID NO: 8168 - DNA, 1448 bp, Zea mays subsp. mays
  misc_feature (1)..(1448): Ceres Seq. ID no. 13496092
  misc_feature: MA Experiment ID: 108523 Result: Down-regulated in Transcription
  misc_feature: MA Experiment 108523 PARAMETER Experiment Name: Zm_42deg_Heat_P Parameter: Age (day) Value: 8
  misc_feature: MA Experiment 108523 PARAMETER Experiment Name: Zm_42deg_Heat_P Parameter: Organism Value: Zea mays
  misc_feature: MA Experiment 108523 PARAMETER Experiment Name: Zm_42deg_Heat_P Parameter: Plant Line Value: 35A19
  misc_feature: MA Experiment 108523 PARAMETER Experiment Name: Zm_42deg_Heat_P Parameter: Temperature (deg C) Value: 42 vs. 22
  misc_feature: MA Experiment 108523 PARAMETER Experiment Name: Zm_42deg_Heat_P Parameter: Timepoint (hr) Value: 6
  misc_feature: MA Experiment 108523 PARAMETER Experiment Name: Zm_42deg_Heat_P Parameter: Tissue Value: Aerial
  misc_feature: MA Experiment ID: 108528 Result: Up-regulated in Transcription
  misc_feature: MA Experiment 108528 PARAMETER Experiment Name: Zm_Imbibed_Seeds_P Parameter: Age (day) Value: 5 vs. 2
  misc_feature: MA Experiment 108528 PARAMETER Experiment Name: Zm_Imbibed_Seeds_P Parameter: Organism Value: Zea mays
  misc_feature: MA Experiment 108528 PARAMETER Experiment Name: Zm_Imbibed_Seeds_P Parameter: Plant Line Value: 35A19
  misc_feature: MA Experiment 108528 PARAMETER Experiment Name: Zm_Imbibed_Seeds_P Parameter: Tissue Value: Aerial vs. Embryo
  misc_feature: MA Experiment ID: 108530 Result: Up-regulated in Transcription
  misc_feature: MA Experiment 108530 PARAMETER Experiment Name: Zm_Imbibed_Seeds_P Parameter: Age (day) Value: 6 vs. 2
  misc_feature: MA Experiment 108530 PARAMETER Experiment Name: Zm_Imbibed_Seeds_P Parameter: Organism Value: Zea mays
  misc_feature: MA Experiment 108530 PARAMETER Experiment Name: Zm_Imbibed_Seeds_P Parameter: Plant Line Value: 35A19
  misc_feature: MA Experiment 108530 PARAMETER Experiment Name: Zm_Imbibed_Seeds_P Parameter: Tissue Value: Aerial vs. Embryo
  misc_feature: MA Experiment ID: 108536 Result: Down-regulated in Transcription
  misc_feature: MA Experiment 108536 PARAMETER Experiment Name: Zm_Meristem_P Parameter: Age (day) Value: 8
  misc_feature: MA Experiment 108536 PARAMETER Experiment Name: Zm_Meristem_P Parameter: Organism Value: Zea mays
  misc_feature: MA Experiment 108536 PARAMETER Experiment Name: Zm_Meristem_P Parameter: Plant Line Value: 35A19
  misc_feature: MA Experiment 108536 PARAMETER Experiment Name: Zm_Meristem_P Parameter: Tissue Value: Shoot Meristem vs. Above Shoot Meristem
  misc_feature: MA Experiment ID: 108544 Result: Up-regulated in Transcription
  misc_feature: MA Experiment ID: 108547 Result: Up-regulated in Transcription
  misc_feature: MA Experiment 108547 PARAMETER Experiment Name: Zm_Imbibed_Seeds_P Parameter: Age (day) Value: 4 vs. 2
  misc_feature: MA Experiment 108547 PARAMETER Experiment Name: Zm_Imbibed_Seeds_P Parameter: Organism Value: Zea mays
  misc_feature: MA Experiment 108547 PARAMETER Experiment Name: Zm_Imbibed_Seeds_P Parameter: Plant Line Value: 35A19
  misc_feature: MA Experiment 108547 PARAMETER Experiment Name: Zm_Imbibed_Seeds_P Parameter: Tissue Value: Aerial vs. Embryo
  misc_feature: MA Experiment ID: 108556 Result: Down-regulated in Transcription
  misc_feature: MA Experiment 108556 PARAMETER Experiment Name: Zm_Drought_P Parameter: Age (day) Value: 9
  misc_feature: MA Experiment 108556 PARAMETER Experiment Name: Zm_Drought_P Parameter: Organism Value: Zea mays
  misc_feature: MA Experiment 108556 PARAMETER Experiment Name: Zm_Drought_P Parameter: Plant Line Value: 35A19
  misc_feature: MA Experiment 108556 PARAMETER Experiment Name: Zm_Drought_P Parameter: Timepoint (hr) Value: 24
  misc_feature: MA Experiment 108556 PARAMETER Experiment Name: Zm_Drought_P Parameter: Tissue Value: Aerial
  misc_feature: MA Experiment 108556 PARAMETER Experiment Name: Zm_Drought_P Parameter: Treatment Value: Drought vs. No Drought
  misc_feature: MA Experiment ID: 108689 Result: Up-regulated in Transcription
  misc_feature: MA Experiment 108689 PARAMETER Experiment Name: Zm_Drought_Roots_P Parameter: Age (day) Value: 9
  misc_feature: MA Experiment 108689 PARAMETER Experiment Name: Zm_Drought_Roots_P Parameter: Organism Value: Zea mays
  misc_feature: MA Experiment 108689 PARAMETER Experiment Name: Zm_Drought_Roots_P Parameter: Plant Line Value: 35A19
  misc_feature: MA Experiment 108689 PARAMETER Experiment Name: Zm_Drought_Roots_P Parameter: Timepoint (hr) Value: 24
  misc_feature: MA Experiment 108689 PARAMETER Experiment Name: Zm_Drought_Roots_P Parameter: Tissue Value: Roots
  misc_feature: MA Experiment 108689 PARAMETER Experiment Name: Zm_Drought_Roots_P Parameter: Treatment Value: Drought vs. No Drought
  misc_feature: MA Experiment ID: 20000535 Result: Down-regulated in Transcription
  misc_feature: MA Experiment 20000535 PARAMETER Experiment Name: Zm_Hybrid_Seed_Dev_P Parameter: DAP Value: 30 vs. 12
  misc_feature: MA Experiment 20000535 PARAMETER Experiment Name: Zm_Hybrid_Seed_Dev_P Parameter: Organism Value: Zea mays
  misc_feature: MA Experiment 20000535 PARAMETER Experiment Name: Zm_Hybrid_Seed_Dev_P Parameter: Plant Line Value: 35A19
  misc_feature: MA Experiment 20000535 PARAMETER Experiment Name: Zm_Hybrid_Seed_Dev_P Parameter: Tissue Value: Embryo vs. Unfert Floret
gcacgagaccattacctagaacatcctaatcgaaaagtgggtgtcgggcgggccagcagctggacaagcaagcaagcaagcaagccaataatggcgtctcactctcatcggtcccggtctcccacggcgccctgtcccagctgggggcacgcccacgcgccgcggtgccggcggcggctcgtccgggcactgctgctcgtagcggcgctggcgctggcggcggcaggtggtggtggtcgtggctccgcggccgccgccgccgccgccacccagcagaggatcccggccatcttcatgttcggcgactccatcgtggacccgggcaacaacaacaaccggctgacggagggccaaggccaacttcccgccgtacgggcaggacttccccggcggcgtcgccacgggggaggttctccaacggcttggtccccggggacctcctagcttccaagctgggcatcaaggagctgctgccgccgttcatcggcaccgacctgcagctcgaggacctgctcaccggcgtggccttcgcctgcggcggcagtggctacgatccgctcacgtccaagctcgcgacgaccctgtcgagcgccgaccagctccagctgttccaggactacaaggataagctggcggccctggccggggaggaggagatggagcgggtcgtctcgcaggccgtctacttcacggtgatgggggcaaacgacatcgtaaacaactacttcatcctccccatcagacgccaccagtacgacctctcgtcctacgtcgacttcctcgtctcctcggcgatcaacttcacaaggactctgaacgacatgggagctcagaggatagcgttcctcggcgtgccgccactaggatgctgcccgtcacagatcacgctcgcggggagcccgtcgcgccagtgcgatccggcaaggaaccaggcgtcggagctgtacaactccagggtctccaaggagatagagcgcctcaacgcggagcggagcggttctggctccaagttcgtctacgtcgacatatactacaacttgctcgacctcatccagaatccagcttcgtacggtttcaaggacgtgagcgaaggttgctgcggcagcacggtgctgaacgccgccatcttcatcgcgtaccacagcgcgtgccccaacgcgcccgactacatattctgggacggcttccaccccacgcagaaggcctacgacatcgtggtggacaagctcatccagcagaactccaagtacctgatgatgtgaagacgcttgctgctgctgcggctgctgcatggcacgagggctctacctttccccgtacaaacacacagccagctgacgtcgaccattcatggacgactccccagtccccacatggcagtggcatttgccaaatgtacgatacatattaacatataaatatactatacatgcctgtgcgccaatatc

SEQ ID NO: 8169 - protein, 201 aa, Zea mays subsp. mays
  peptide (1)..(201): Ceres Seq. ID no. 13496093
  misc_feature (1)..(184): Pfam Name: GDSL-like Lipase/Acylhydrolase Pfam Description: GDSL-like Lipase/Acylhydrolase
  misc_feature (1)..(192): Homolog of NCBI NO: 37534726 NR Description: putative anter-specific proline-rich protein
  misc_feature (1)..(200): Homolog of NCBI NO: 30102970 NR Description: putative lipase/acylhydrolase [Oryza sativa
  misc_feature (1)..(199): Homolog of NCBI NO: 18406327 NR Description: lipase, putative [Arabidopsis thaliana]
  misc_feature (1)..(194): Homolog of NCBI NO: 28393626 NR Description: putative family II extracellular lipase 1 (EXL1) thaliana] >gi|28827430|gb|AAO50559.1| putative family II
  misc_feature (1)..(194): Homolog of NCBI NO: 18410954 NR Description: family II extracellular lipase 1 (EXL1) thaliana] >gi|15054382|gb|AAK30016.1| family II lipase EXL1
  misc_feature (1)..(194): Homolog of NCBI NO: 8778807 NR Description: T4O12.12 [Arabidopsis thaliana]
  misc_feature (1)..(194): Homolog of NCBI NO: 15222901 NR Description: family II extracellular lipase 3 (EXL3) thaliana] >gi|15054386|gb|AAK30018.1| family II lipase EXL3
  misc_feature (1)..(80): Homolog of NCBI NO: 15229719 NR Description: lipase, putative [Arabidopsis thaliana]
  misc_feature (120)..(199): Homolog of NCBI NO: 15229719 NR Description: lipase, putative [Arabidopsis thaliana]
  misc_feature (1)..(199): Homolog of NCBI NO: 15231934 NR Description: lipase, putative [Arabidopsis thaliana]
MERVVSQAVYFTVMGANDIVNNYFILPIRRHQYDLSSYVDFLVSSAINFTRTLNDMGAQRIAFLGVPPLGCCPSQITLAGSPSRQCDPARNQASELYNSRVSKEIERLNAERSGSGSKFVYVDIYYNLLDLIQNPASYGFKDVSEGCCGSTVLNAAIFIAYHSACPNAPDYIFWDGFHPTQKAYDIVVDKLIQQNSKYLMM

SEQ ID NO: 8170 - protein, 188 aa, Zea mays subsp. mays
  peptide (1)..(188): Ceres Seq. ID no. 13496094
  misc_feature (1)..(171): Pfam Name: GDSL-like Lipase/Acylhydrolase Pfam Description: GDSL-like Lipase/Acylhydrolase
  misc_feature (1)..(179): Homolog of NCBI NO: 37534726 NR Description: putative anter-specific proline-rich protein
  misc_feature (1)..(187): Homolog of NCBI NO: 30102970 NR Description: putative lipase/acylhydrolase [Oryza sativa
  misc_feature (1)..(186): Homolog of NCBI NO: 18406327 NR Description: lipase, putative [Arabidopsis thaliana]
  misc_feature (1)..(181): Homolog of NCBI NO: 28393626 NR Description: putative family II extracellular lipase 1 (EXL1) thaliana] >gi|28827430|gb|AAO50559.1| putative family II
  misc_feature (1)..(181): Homolog of NCBI NO: 18410954 NR Description: family II extracellular lipase 1 (EXL1) thaliana] >gi|15054382|gb|AAK30016.1| family II lipase EXL1
  misc_feature (1)..(181): Homolog of NCBI NO: 8778807 NR Description: T4O12.12 [Arabidopsis thaliana]
  misc_feature (1)..(181): Homolog of NCBI NO: 15222901 NR Description: family II extracellular lipase 3 (EXL3) thaliana] >gi|15054386|gb|AAK30018.1| family II lipase EXL3
  misc_feature (1)..(67): Homolog of NCBI NO: 15229719 NR Description: lipase, putative [Arabidopsis thaliana]
  misc_feature (107)..(186): Homolog of NCBI NO: 15229719 NR Description: lipase, putative [Arabidopsis thaliana]
  misc_feature (1)..(186): Homolog of NCBI NO: 15231934 NR Description: lipase, putative [Arabidopsis thaliana]
MGANDIVNNYFILPIRRHQYDLSSYVDFLVSSAINFTRTLNDMGAQRIAFLGVPPLGCCPSQITLAGSPSRQCDPARNQASELYNSRVSKEIERLNAERSGSGSKFVYVDIYYNLLDLIQNPASYGFKDVSEGCCGSTVLNAAIFIAYHSACPNAPDYIFWDGFHPTQKAYDIVVDKLIQQNSKYLMM

SEQ ID NO: 8171 - protein, 181 aa, Zea mays subsp. mays
  peptide (1)..(181): Ceres Seq. ID no. 13496095
MLPVTDHARGEPVAPVRSGKEPGVGAVQLQGLQGDRAPQRGAERFWLQVRLRRHILQLARPHPESSFVRFQGRERRLLRQHGAERRHLHRVPQRVPQRARLHILGRLPPHAEGLRHRGGQAHPAELQVPDDVKTLAAAAAAAWHEGSTFPRTNTQPADVDHSWTTPQSPHGSGICQMYDTY

SEQ ID NO: 8172 - DNA, 1621 bp, Zea mays subsp. mays
  misc_feature (1)..(1621): Ceres Seq. ID no. 12367462
  misc_feature: MA Experiment ID: 20000108 Result: Up-regulated in Transcription
  misc_feature: MA Experiment 20000108 PARAMETER Experiment Name: Zm_Root-Tips_P Parameter: Age (day) Value: 12
  misc_feature: MA Experiment 20000108 PARAMETER Experiment Name: Zm_Root-Tips_P Parameter: Organism Value: Zea mays
  misc_feature: MA Experiment 20000108 PARAMETER Experiment Name: Zm_Root-Tips_P Parameter: Tissue Value: Root tips vs. Root mid region    35
  misc_feature: MA Experiment 20000108 PARAMETER Experiment Name: Zm_Root-Tips_P Parameter: Tissue Value: Root tips vs. Root mid region   Sequence Listing-Misc Features (4)
acgggctgggctttcgtgggccgggagtgggcgacgaacgatggctggctggccgtccgtgattgttttggaacgggcagcgtgtttggttggtgcctgtgctgtgccgccgttcgtctctgggtagcgtagcgacggcgccacggcggcttccggctcgtgcgcgcgcgcgcgtgtccgggcgagaagagctgccaagggatggaggcgctgaggaagcaggcgagcaagttcaaggagcaggtcgccaagcagcagcaggctgttataaagcaattcagtactactggctatgagcggtcagattccattgtaattgatgaggttgaactacagagacatcaacagcttgagaaattgtatacttctactcgttctgtaagggatttccagaaggacatagttagagcagctgaaggtttggtgtctattggaaacaaacatattgaagtgggaacaaaattttctgaggactgctatagatatggaagcgaaaataatgcaagcgacgaagcccttagaaaagcagcatcactatacggaggtgctttgagaaatattgagaaagagtatgaagatttcaacagaattttatcttctcagactatagacccattgagagcaatggctatgggtagacccctggaagatgctcgtggtcttgcacagcgctatagcaggatgagacatgaagctgagatcctctctactgaaattgctagaagaaaggcacgggtaagagaagctccaattgctgagcacactacaaagcttcagcaatcagaagctagaatgatagagcacaaagcaagcatggccgtgttagggaaggaagcagcagctgcacttgcaactgtcgagtctcaacagcaacgagtgacccttcagaggctggttggcacggcggaagcagaaaagttattccatctgagattagctgctatacttgatgacgttgaggcagagatgtcctctgagaagcaaaggagagaatctgcaccacctatcatatcttcacataagcgtgctgagaaagctcagtacttccttgctgaggtaatgcataatttcaatggaaccacggagaaggaactgagcttaattgttggcgattatgttgttgttcgtcagattgctcccaacggctgggcggaaggagaatgccgagggaaggctggctggtttccggctgcctatgttgagaggcgcgagaatatccccccgaataaagttttccctcaagtataagatcataagaggggtcatctgtttccactgataagcagtttggtttggcattgaggagctgcaaggctgtatctaacttctgattggtttgatgctccgtatggcgtatcttgtgcatcctatgttcttgtggtggtctagacttggaataagatatgtcggcacgtgctctgcgcctgtgcctgcgcgcacattgatgaagatgtcgctttgcatgtgtccgcagtgtgctactgcttgcggcagcgtaggtcatgttgaatgagctttcctttactgacagatttcgagtgtaaattggttcttgcacttttttttcgttagggtgtatcagtagttctgtacaatatgtttttaatgagaccattcggcc

SEQ ID NO: 8173 - protein, 348 aa, Zea mays subsp. mays
  peptide (1)..(348): Ceres Seq. ID no. 12367463
  misc_feature (282)..(336): Pfam Name: SH3 domain Pfam Description: SH3 domain
  misc_feature (1)..(347): Homolog of NCBI NO: 22093679 NR Description: putative SH3(Src homology) domain-containing
  misc_feature (1)..(348): Homolog of NCBI NO: 21928139 NR Description: AT4g18060/F15J5_30 [Arabidopsis thaliana]
  misc_feature (1)..(348): Homolog of NCBI NO: 22328762 NR Description: putative protein; protein id: At4g18060.1,
  misc_feature (1)..(348): Homolog of NCBI NO: 16974680 NR Description: SH3 domain-containing protein 3 [Arabidopsis
  misc_feature (1)..(260): Homolog of NCBI NO: 7485521 NR Description: hypothetical protein F15J5.30 - Arabidopsis >gi|5816992|emb|CAB53647.1| putative protein [Arabidopsis >gi|7268558|emb|CAB78808.1| putative protein [Arabidopsis
  misc_feature (1)..(273): Homolog of NCBI NO: 15221714 NR Description: unknown protein; protein id: At1g31440.1, by cDNA: gi_16974675, supported by cDNA: gi_19424042, supported
  misc_feature (276)..(344): Homolog of NCBI NO: 15221714 NR Description: unknown protein; protein id: At1g31440.1, by cDNA: gi_16974675, supported by cDNA: gi_19424042, supported
  misc_feature (1)..(272): Homolog of NCBI NO: 18418491 NR Description: putative protein; protein id: At4g34660.1, by cDNA: 32357., supported by cDNA: gi_18175937, supported by
  misc_feature (1)..(272): Homolog of NCBI NO: 38344978 NR Description: OSJNBa0011L07.8 [Oryza sativa (japonica
  misc_feature (1)..(272): Homolog of NCBI NO: 7487662 NR Description: hypothetical protein T4L20.240 - Arabidopsis >gi|3096935|emb|CAA18845.1| putative protein [Arabidopsis >gi|7270416|emb|CAB80183.1| putative protein [Arabidopsis
MEALRKQASKFKEQVAKQQQAVIKQFSTTGYERSDSIVIDEVELQRHQQLEKLYTSTRSVRDFQKDIVRAAEGLVSIGNKHIEVGTKFSEDCYRYGSENNASDEALRKAASLYGGALRNIEKEYEDFNRILSSQTIDPLRAMAMGRPLEDARGLAQRYSRMRHEAEILSTEIARRKARVREAPIAEHTTKLQQSEARMIEHKASMAVLGKEAAAALATVESQQQRVTLQRLVGTAEAEKLFHLRLAAILDDVEAEMSSEKQRRESAPPIISSHKRAEKAQYFLAEVMHNFNGTTEKELSLIVGDYVVVRQIAPNGWAEGECRGKAGWFPAAYVERRENIPPNKVFPQV

SEQ ID NO: 8174 - protein, 207 aa, Zea mays subsp. mays
  peptide (1)..(207): Ceres Seq. ID no. 12367464
  misc_feature (141)..(195): Pfam Name: SH3 domain Pfam Description: SH3 domain
  misc_feature (1)..(206): Homolog of NCBI NO: 22093679 NR Description: putative SH3(Src homology) domain-containing
  misc_feature (1)..(207): Homolog of NCBI NO: 21928139 NR Description: AT4g18060/F15J5_30 [Arabidopsis thaliana]
  misc_feature (1)..(207): Homolog of NCBI NO: 22328762 NR Description: putative protein; protein id: At4g18060.1,
  misc_feature (1)..(207): Homolog of NCBI NO: 16974680 NR Description: SH3 domain-containing protein 3 [Arabidopsis
  misc_feature (1)..(119): Homolog of NCBI NO: 7485521 NR Description: hypothetical protein F15J5.30 - Arabidopsis >gi|5816992|emb|CAB53647.1| putative protein [Arabidopsis >gi|7268558|emb|CAB78808.1| putative protein [Arabidopsis
  misc_feature (1)..(132): Homolog of NCBI NO: 15221714 NR Description: unknown protein; protein id: At1g31440.1, by cDNA: gi_16974675, supported by cDNA: gi_19424042, supported
  misc_feature (135)..(203): Homolog of NCBI NO: 15221714 NR Description: unknown protein; protein id: At1g31440.1, by cDNA: gi_16974675, supported by cDNA: gi_19424042, supported
  misc_feature (1)..(131): Homolog of NCBI NO: 18418491 NR Description: putative protein; protein id: At4g34660.1, by cDNA: 32357., supported by cDNA: gi_18175937, supported by
  misc_feature (1)..(131): Homolog of NCBI NO: 38344978 NR Description: OSJNBa0011L07.8 [Oryza sativa (japonica
  misc_feature (1)..(131): Homolog of NCBI NO: 7487662 NR Description: hypothetical protein T4L20.240 - Arabidopsis >gi|3096935|emb|CAA18845.1| putative protein [Arabidopsis >gi|7270416|emb|CAB80183.1| putative protein [Arabidopsis
MAMGRPLEDARGLAQRYSRMRHEAEILSTEIARRKARVREAPIAEHTTKLQQSEARMIEHKASMAVLGKEAAAALATVESQQQRVTLQRLVGTAEAEKLFHLRLAAILDDVEAEMSSEKQRRESAPPIISSHKRAEKAQYFLAEVMHNFNGTTEKELSLIVGDYVVVRQIAPNGWAEGECRGKAGWFPAAYVERRENIPPNKVFPQV

SEQ ID NO: 8175 - protein, 205 aa, Zea mays subsp. mays
  peptide (1)..(205): Ceres Seq. ID no. 12367465
  misc_feature (139)..(193): Pfam Name: SH3 domain Pfam Description: SH3 domain
  misc_feature (1)..(204): Homolog of NCBI NO: 22093679 NR Description: putative SH3(Src homology) domain-containing
  misc_feature (1)..(205): Homolog of NCBI NO: 21928139 NR Description: AT4g18060/F15J5_30 [Arabidopsis thaliana]
  misc_feature (1)..(205): Homolog of NCBI NO: 22328762 NR Description: putative protein; protein id: At4g18060.1,
  misc_feature (1)..(205): Homolog of NCBI NO: 16974680 NR Description: SH3 domain-containing protein 3 [Arabidopsis
  misc_feature (1)..(117): Homolog of NCBI NO: 7485521 NR Description: hypothetical protein F15J5.30 - Arabidopsis >gi|5816992|emb|CAB53647.1| putative protein [Arabidopsis >gi|7268558|emb|CAB78808.1| putative protein [Arabidopsis
  misc_feature (1)..(130): Homolog of NCBI NO: 15221714 NR Description: unknown protein; protein id: At1g31440.1, by cDNA: gi_16974675, supported by cDNA: gi_19424042, supported
  misc_feature (133)..(201): Homolog of NCBI NO: 15221714 NR Description: unknown protein; protein id: At1g31440.1, by cDNA: gi_16974675, supported by cDNA: gi_19424042, supported
  misc_feature (1)..(129): Homolog of NCBI NO: 18418491 NR Description: putative protein; protein id: At4g34660.1, by cDNA: 32357., supported by cDNA: gi_18175937, supported by
  misc_feature (1)..(129): Homolog of NCBI NO: 38344978 NR Description: OSJNBa0011L07.8 [Oryza sativa (japonica
  misc_feature (1)..(129): Homolog of NCBI NO: 7487662 NR Description: hypothetical protein T4L20.240 - Arabidopsis >gi|3096935|emb|CAA18845.1| putative protein [Arabidopsis >gi|7270416|emb|CAB80183.1| putative protein [Arabidopsis
MGRPLEDARGLAQRYSRMRHEAEILSTEIARRKARVREAPIAEHTTKLQQSEARMIEHKASMAVLGKEAAAALATVESQQQRVTLQRLVGTAEAEKLFHLRLAAILDDVEAEMSSEKQRRESAPPIISSHKRAEKAQYFLAEVMHNFNGTTEKELSLIVGDYVVVRQIAPNGWAEGECRGKAGWFPAAYVERRENIPPNKVFPQV

SEQ ID NO: 8176 - DNA, 1475 bp, Zea mays subsp. mays
  misc_feature (1)..(1475): Ceres Seq. ID no. 12367451
  misc_feature: MA Experiment ID: 20001614 Result: Up-regulated in Transcription
  misc_feature: MA Experiment 20001614 PARAMETER Experiment Name: Zm_50ppm_KNO3_L-to-H_P Parameter: Age (day) Value: 21
  misc_feature: MA Experiment 20001614 PARAMETER Experiment Name: Zm_50ppm_KNO3_L-to-H_P Parameter: Organism Value: Zea mays
  misc_feature: MA Experiment 20001614 PARAMETER Experiment Name: Zm_50ppm_KNO3_L-to-H_P Parameter: Plant Line Value: 35A19
  misc_feature: MA Experiment 20001614 PARAMETER Experiment Name: Zm_50ppm_KNO3_L-to-H_P Parameter: Timepoint (hr) Value: 48
  misc_feature: MA Experiment 20001614 PARAMETER Experiment Name: Zm_50ppm_KNO3_L-to-H_P Parameter: Tissue Value: Roots
  misc_feature: MA Experiment 20001614 PARAMETER Experiment Name: Zm_50ppm_KNO3_L-to-H_P Parameter: Treatment Value: 50ppm KNO3 vs. 50ppm KCl
aatatgttccttttcagctttgccaatatcgtccctgtttcccttcttgtatttcatgatcgaagatctacacgtggccaaaaaagaacaagatattggactgtacgctggttttcttggtgcatcttactttgtcggtcgatttttggtctcgttcttctggggtgtggtggctgatcgtgtcggaaggaagcccatcattatattttcagtcgcttcagtggttgtattcaacacactgtttggattaagtgtacaatattggatggccatcaccacaagattgcttctaggtgctctcaatggcatgcttgcaccaataaaggcttactcaatcgagatttgtcgacctgagcaccatgctcttgggttatcagttgtaagcacggcttggggcctaggtcttattgttggcccgtccattggaggctacttggcgcagcctgcacggcaatatccaaacgtattctctgaggaatcgatttttgggaggttcccgtatctgctgccatgcctaagtatctccattttttctgctgtcgttctagtaagctgcatatggttaccggagacactccataaacataagaatatagacaacgaagtagaaatgtccggacactcaaggactccacaaacagaagacgtagatgcaggcaagagtctatataagaactggccattgatgtcttccatcattgcgtactgtgttttcacgcttcatgacactgcatacaccgagatactttccttgtggaccgtaagtgacaaaaagtatggtgggctaggcttttcttctaagggagttggtcaacttcttgcgattgcaggtcttgggcttattgtgtatcaaatgttcatctacaggccagtccacagatatctcggaagtgtaaattcatgccgtgctgcatctgcgctatccataccacttatcgctgcttttcccttcatgacacacctgtcaggatcaaaacttggactagctctttattttgctactattttgaaagctgctcttgggataactatcctgacaggcacttcacttctgcagaactatgctgtgccacagcatcaaagaggcgccgcaaacggcgtagcggcgactgcaatgtccttctttaaggctattggacctgcaggagcaggcgctttattctcatggacccaaaaacgccaagatgctgccttctttccaggggatcacatgttgttcttcattctgaatttggtccaatgtattgggctcgtgctgacccttaaaacattcctagcagtaccgaaacactataaatgacagctgctcgaacccaagcaatggaataatgatggattagcaaaacatatgtgcccaaaaatacgtttttgagtggcatacaacggaattatgtaaaagctgtcaagaaaaagtagctacaatgattgtgtccgctatctttacatctccttacattgaagttttaatttgagcc

SEQ ID NO: 8177 - protein, 432 aa, Zea mays subsp. mays
  peptide (1)..(432): Ceres Seq. ID no. 12367452
  misc_feature (5)..(432): Homolog of NCBI NO: 23452823 NR Description: major facilitator superfamily antiporter [Oryza
  misc_feature (45)..(432): Homolog of NCBI NO: 23452819 NR Description: major facilitator superfamily antiporter [Zea
  misc_feature (5)..(426): Homolog of NCBI NO: 30684565 NR Description: transporter-related protein [Arabidopsis >gi|14517414|gb|AAK62597.1| AT5g13750/MXE10_2 [Arabidopsis
  misc_feature (5)..(429): Homolog of NCBI NO: 20260160 NR Description: transporter-like protein [Arabidopsis thaliana]
  misc_feature (5)..(429): Homolog of NCBI NO: 22326785 NR Description: transporter-like protein; protein id:
  misc_feature (1)..(428): Homolog of NCBI NO: 23452821 NR Description: major facilitator superfamily antiporter [Oryza
  misc_feature (5)..(402): Homolog of NCBI NO: 10177340 NR Description: transporter-like protein [Arabidopsis thaliana]
  misc_feature (15)..(426): Homolog of NCBI NO: 15229781 NR Description: transporter-like protein; protein id: At3g43790.1
  misc_feature (45)..(426): Homolog of NCBI NO: 30684567 NR Description: transporter-related protein [Arabidopsis thaliana]
  misc_feature (45)..(426): Homolog of NCBI NO: 21555230 NR Description: transporter-like protein [Arabidopsis thaliana]
ICSFSALPISSLFPFLYFMIEDLHVAKKEQDIGLYAGFLGASYFVGRFLVSFFWGVVADRVGRKPIIIFSVASVVVFNTLFGLSVQYWMAITTRLLLGALNGMLAPIKAYSIEICRPEHHALGLSVVSTAWGLGLIVGPSIGGYLAQPARQYPNVFSEESIFGRFPYLLPCLSISIFSAVVLVSCIWLPETLHKHKNIDNEVEMSGHSRTPQTEDVDAGKSLYKNWPLMSSIIAYCVFTLHDTAYTEILSLWTVSDKKYGGLGFSSKGVGQLLAIAGLGLIVYQMFIYRPVHRYLGSVNSCRAASALSIPLIAAFPFMTHLSGSKLGLALYFATILKAALGITILTGTSLLQNYAVPQHQRGAANGVAATAMSFFKAIGPAGAGALFSWTQKRQDAAFFPGDHMLFFILNLVQCIGLVLTLKTFLAVPKHYK

SEQ ID NO: 8178 - protein, 414 aa, Zea mays subsp. mays
  peptide (1)..(414): Ceres Seq. ID no. 12367453
  misc_feature (1)..(411): Homolog of NCBI NO: 22326785 NR Description: transporter-like protein; protein id:
  misc_feature (1)..(410): Homolog of NCBI NO: 23452821 NR Description: major facilitator superfamily antiporter [Oryza
  misc_feature (1)..(384): Homolog of NCBI NO: 10177340 NR Description: transporter-like protein [Arabidopsis thaliana]
  misc_feature (1)..(408): Homolog of NCBI NO: 15229781 NR Description: transporter-like protein; protein id: At3g43790.1
  misc_feature (27)..(408): Homolog of NCBI NO: 30684567 NR Description: transporter-related protein [Arabidopsis thaliana]
  misc_feature (27)..(408): Homolog of NCBI NO: 21555230 NR Description: transporter-like protein [Arabidopsis thaliana]
  misc_feature (1)..(414): Homolog of NCBI NO: 23452823 NR Description: major facilitator superfamily antiporter [Oryza
  misc_feature (27)..(414): Homolog of NCBI NO: 23452819 NR Description: major facilitator superfamily antiporter [Zea
  misc_feature (1)..(408): Homolog of NCBI NO: 30684565 NR Description: transporter-related protein [Arabidopsis >gi|14517414|gb|AAK62597.1| AT5g13750/MXE10_2 [Arabidopsis
  misc_feature (1)..(411): Homolog of NCBI NO: 20260160 NR Description: transporter-like protein [Arabidopsis thaliana]
MIEDLHVAKKEQDIGLYAGFLGASYFVGRFLVSFFWGVVADRVGRKPIIIFSVASVVVFNTLFGLSVQYWMAITTRLLLGALNGMLAPIKAYSIEICRPEHHALGLSVVSTAWGLGLIVGPSIGGYLAQPARQYPNVFSEESIFGRFPYLLPCLSISIFSAVVLVSCIWLPETLHKHKNIDNEVEMSGHSRTPQTEDVDAGKSLYKNWPLMSSIIAYCVFTLHDTAYTEILSLWTVSDKKYGGLGFSSKGVGQLLAIAGLGLIVYQMFIYRPVHRYLGSVNSCRAASALSIPLIAAFPFMTHLSGSKLGLALYFATILKAALGITILTGTSLLQNYAVPQHQRGAANGVAATAMSFFKAIGPAGAGALFSWTQKRQDAAFFPGDHMLFFILNLVQCIGLVLTLKTFLAVPKHYK

SEQ ID NO: 8179 - protein, 344 aa, Zea mays subsp. mays
  peptide (1)..(344): Ceres Seq. ID no. 12367454
  misc_feature (1)..(344): Homolog of NCBI NO: 23452823 NR Description: major facilitator superfamily antiporter [Oryza
  misc_feature (1)..(344): Homolog of NCBI NO: 23452819 NR Description: major facilitator superfamily antiporter [Zea
  misc_feature (1)..(338): Homolog of NCBI NO: 30684565 NR Description: transporter-related protein [Arabidopsis >gi|14517414|gb|AAK62597.1| AT5g13750/MXE10_2 [Arabidopsis
  misc_feature (1)..(341): Homolog of NCBI NO: 20260160 NR Description: transporter-like protein [Arabidopsis thaliana]
  misc_feature (1)..(341): Homolog of NCBI NO: 22326785 NR Description: transporter-like protein; protein id:
  misc_feature (1)..(340): Homolog of NCBI NO: 23452821 NR Description: major facilitator superfamily antiporter [Oryza
  misc_feature (1)..(314): Homolog of NCBI NO: 10177340 NR Description: transporter-like protein [Arabidopsis thaliana]
  misc_feature (1)..(338): Homolog of NCBI NO: 15229781 NR Description: transporter-like protein; protein id: At3g43790.1
  misc_feature (1)..(338): Homolog of NCBI NO: 30684567 NR Description: transporter-related protein [Arabidopsis thaliana]
  misc_feature (1)..(338): Homolog of NCBI NO: 21555230 NR Description: transporter-like protein [Arabidopsis thaliana]
MAITTRLLLGALNGMLAPIKAYSIEICRPEHHALGLSVVSTAWGLGLIVGPSIGGYLAQPARQYPNVFSEESIFGRFPYLLPCLSISIFSAVVLVSCIWLPETLHKHKNIDNEVEMSGHSRTPQTEDVDAGKSLYKNWPLMSSIIAYCVFTLHDTAYTEILSLWTVSDKKYGGLGFSSKGVGQLLAIAGLGLIVYQMFIYRPVHRYLGSVNSCRAASALSIPLIAAFPFMTHLSGSKLGLALYFATILKAALGITILTGTSLLQNYAVPQHQRGAANGVAATAMSFFKAIGPAGAGALFSWTQKRQDAAFFPGDHMLFFILNLVQCIGLVLTLKTFLAVPKHYK

SEQ ID NO: 8180 - DNA, 1265 bp, Zea mays subsp. mays
  misc_feature (1)..(1265): Ceres Seq. ID no. 12423889
  misc_feature: MA Experiment ID: 108504 Result: Up-regulated in Transcription
  misc_feature: MA Experiment 108504 PARAMETER Experiment Name: Zm_Drought_P Parameter: Age (day) Value: 8
  misc_feature: MA Experiment 108504 PARAMETER Experiment Name: Zm_Drought_P Parameter: Organism Value: Zea mays
  misc_feature: MA Experiment 108504 PARAMETER Experiment Name: Zm_Drought_P Parameter: Plant Line Value: 35A19
  misc_feature: MA Experiment 108504 PARAMETER Experiment Name: Zm_Drought_P Parameter: Timepoint (hr) Value: 12
  misc_feature: MA Experiment 108504 PARAMETER Experiment Name: Zm_Drought_P Parameter: Tissue Value: Aerial
  misc_feature: MA Experiment 108504 PARAMETER Experiment Name: Zm_Drought_P Parameter: Treatment Value: Drought vs. No Drought
  misc_feature: MA Experiment ID: 108527 Result: Up-regulated in Transcription
  misc_feature: MA Experiment 108527 PARAMETER Experiment Name: Zm_5mM_NO_P Parameter: Age (day) Value: 8
  misc_feature: MA Experiment 108527 PARAMETER Experiment Name: Zm_5mM_NO_P Parameter: Organism Value: Zea mays
  misc_feature: MA Experiment 108527 PARAMETER Experiment Name: Zm_5mM_NO_P Parameter: Plant Line Value: 35A19
  misc_feature: MA Experiment 108527 PARAMETER Experiment Name: Zm_5mM_NO_P Parameter: Timepoint (hr) Value: 6
  misc_feature: MA Experiment 108527 PARAMETER Experiment Name: Zm_5mM_NO_P Parameter: Tissue Value: Aerial
  misc_feature: MA Experiment 108527 PARAMETER Experiment Name: Zm_5mM_NO_P Parameter: Treatment Value: 5mM NO vs. No Treatment
  misc_feature: MA Experiment ID: 108528 Result: Down-regulated in Transcription
  misc_feature: MA Experiment 108528 PARAMETER Experiment Name: Zm_Imbibed_Seeds_P Parameter: Age (day) Value: 5 vs. 2
  misc_feature: MA Experiment 108528 PARAMETER Experiment Name: Zm_Imbibed_Seeds_P Parameter: Organism Value: Zea mays
  misc_feature: MA Experiment 108528 PARAMETER Experiment Name: Zm_Imbibed_Seeds_P Parameter: Plant Line Value: 35A19
  misc_feature: MA Experiment 108528 PARAMETER Experiment Name: Zm_Imbibed_Seeds_P Parameter: Tissue Value: Aerial vs. Embryo
  misc_feature: MA Experiment ID: 108530 Result: Down-regulated in Transcription
  misc_feature: MA Experiment 108530 PARAMETER Experiment Name: Zm_Imbibed_Seeds_P Parameter: Age (day) Value: 6 vs. 2
  misc_feature: MA Experiment 108530 PARAMETER Experiment Name: Zm_Imbibed_Seeds_P Parameter: Organism Value: Zea mays
  misc_feature: MA Experiment 108530 PARAMETER Experiment Name: Zm_Imbibed_Seeds_P Parameter: Plant Line Value: 35A19
  misc_feature: MA Experiment 108530 PARAMETER Experiment Name: Zm_Imbibed_Seeds_P Parameter: Tissue Value: Aerial vs. Embryo
  misc_feature: MA Experiment ID: 108535 Result: Up-regulated in Transcription
  misc_feature: MA Experiment 108535 PARAMETER Experiment Name: Zm_Meristem_P Parameter: Age (day) Value: 8
  misc_feature: MA Experiment 108535 PARAMETER Experiment Name: Zm_Meristem_P Parameter: Organism Value: Zea mays
  misc_feature: MA Experiment 108535 PARAMETER Experiment Name: Zm_Meristem_P Parameter: Plant Line Value: 35A19
  misc_feature: MA Experiment 108535 PARAMETER Experiment Name: Zm_Meristem_P Parameter: Tissue Value: Root Meristem vs. Above Root Meristem
  misc_feature: MA Experiment ID: 108543 Result: Down-regulated in Transcription
  misc_feature: MA Experiment ID: 108545 Result: Down-regulated in Transcription
  misc_feature: MA Experiment 108545 PARAMETER Experiment Name: Zm_Imbibed_Seeds_P Parameter: Age (day) Value: 3 vs. 2
  misc_feature: MA Experiment 108545 PARAMETER Experiment Name: Zm_Imbibed_Seeds_P Parameter: Organism Value: Zea mays
  misc_feature: MA Experiment 108545 PARAMETER Experiment Name: Zm_Imbibed_Seeds_P Parameter: Plant Line Value: 35A19
  misc_feature: MA Experiment 108545 PARAMETER Experiment Name: Zm_Imbibed_Seeds_P Parameter: Tissue Value: Aerial vs. Embryo
  misc_feature: MA Experiment ID: 108547 Result: Down-regulated in Transcription
  misc_feature: MA Experiment 108547 PARAMETER Experiment Name: Zm_Imbibed_Seeds_P Parameter: Age (day) Value: 4 vs. 2
  misc_feature: MA Experiment 108547 PARAMETER Experiment Name: Zm_Imbibed_Seeds_P Parameter: Organism Value: Zea mays
  misc_feature: MA Experiment 108547 PARAMETER Experiment Name: Zm_Imbibed_Seeds_P Parameter: Plant Line Value: 35A19
  misc_feature: MA Experiment 108547 PARAMETER Experiment Name: Zm_Imbibed_Seeds_P Parameter: Tissue Value: Aerial vs. Embryo
  misc_feature: MA Experiment ID: 108689 Result: Up-regulated in Transcription
  misc_feature: MA Experiment 108689 PARAMETER Experiment Name: Zm_Drought_Roots_P Parameter: Age (day) Value: 9
  misc_feature: MA Experiment 108689 PARAMETER Experiment Name: Zm_Drought_Roots_P Parameter: Organism Value: Zea mays
  misc_feature: MA Experiment 108689 PARAMETER Experiment Name: Zm_Drought_Roots_P Parameter: Plant Line Value: 35A19
  misc_feature: MA Experiment 108689 PARAMETER Experiment Name: Zm_Drought_Roots_P Parameter: Timepoint (hr) Value: 24
  misc_feature: MA Experiment 108689 PARAMETER Experiment Name: Zm_Drought_Roots_P Parameter: Tissue Value: Roots
  misc_feature: MA Experiment 108689 PARAMETER Experiment Name: Zm_Drought_Roots_P Parameter: Treatment Value: Drought vs. No Drought
  misc_feature: MA Experiment ID: 20000478 Result: Up-regulated in Transcription
  misc_feature: MA Experiment 20000478 PARAMETER Experiment Name: Zm_5mM_SA_P Parameter: Age (day) Value: 11
  misc_feature: MA Experiment 20000478 PARAMETER Experiment Name: Zm_5mM_SA_P Parameter: Organism Value: Zea mays
  misc_feature: MA Experiment 20000478 PARAMETER Experiment Name: Zm_5mM_SA_P Parameter: Plant Line Value: 35A19
  misc_feature: MA Experiment 20000478 PARAMETER Experiment Name: Zm_5mM_SA_P Parameter: Timepoint (hr) Value: 72
  misc_feature: MA Experiment 20000478 PARAMETER Experiment Name: Zm_5mM_SA_P Parameter: Tissue Value: Aerial
  misc_feature: MA Experiment 20000478 PARAMETER Experiment Name: Zm_5mM_SA_P Parameter: Treatment Value: 5mM SA vs. No Treatment
  misc_feature: MA Experiment ID: 20000535 Result: Down-regulated in Transcription
  misc_feature: MA Experiment 20000535 PARAMETER Experiment Name: Zm_Hybrid_Seed_Dev_P Parameter: DAP Value: 30 vs. 12
  misc_feature: MA Experiment 20000535 PARAMETER Experiment Name: Zm_Hybrid_Seed_Dev_P Parameter: Organism Value: Zea mays
  misc_feature: MA Experiment 20000535 PARAMETER Experiment Name: Zm_Hybrid_Seed_Dev_P Parameter: Plant Line Value: 35A19
  misc_feature: MA Experiment 20000535 PARAMETER Experiment Name: Zm_Hybrid_Seed_Dev_P Parameter: Tissue Value: Embryo vs. Unfert Floret
gttactccaggtctccagcccaaccaacgccacgtacaggtacagtacctgtagagaggcagaggcagaggcagaggcagaggcaccaaccttttggacatccctcctccactccctaccaacgacctctgctcatcctaagtttgccaatttgccgctccttcacttcacagttacagtagattacctccatctctcagacggaacggaggaggagagccatgtccagccccacgcacgccaggctcgcgcagcaaggcaaggccggcgtggcgctgcgcctgctcctctccgccgcgctcgccggcttcctcctcgtcttcgccgcgcgcaccctggtcacgtcgcctgtcccggcatcgccctcgtactcgtcgcagccgcatccgctgccgctgcccgtggcggaggcgctggtgcactacgccacgtccaacgcgacgccgcagcagacggcggaggagatcggggtggcgctgcgcgtgctacagcggcgcgcgccctgcaacttcctggtgttcggtctgggcctcgacagccccatgtgggcggcgctgaaccacggggggcggaccgtgttcctggaggaggacgcggcgtggatcaccagcgtgcggggcaggcacccggcgctggagtcccaccacgtggcctacgacacggcgctggccgacgccgacgcgctgctagggctccgcgcccacccggcctgcgtcgcgcagcccgacctcgcggcggccgccgccgcgtcctgccgcctcgcgctccggggcctcccgcccgtcttcgccggcctcgactgggacctcgtcatggtggacgcgcccacggggtggacgccccgggcgcccggccgcatgggcgccatctacaccgccggcatggcggcgcgcgcgcgcaggccaggggccggccccacccacgtcttcgtccacgacgtcgaccgccccgtcgaggacgccttctccagggcgttcctgtgcgagggctacctcgccgagcaggtcggacggatcaggcacttcgtcatcccgtcacaccgcgacaaggacggcacgccattctgcccttgatcaagtttgttctgctttggtttggatcccacggtgcccattgccaaactactacagtactattattgctgcatagatgttgctttgcagttgctcattctacactgatgagtgcctgagatttgggtagacgattacaatgtaaaatcgacaacttgctttgtctgttactcggatgaaaaactccagggt

SEQ ID NO: 8181 - protein, 396 aa, Zea mays subsp. mays
  peptide (1)..(396): Ceres Seq. ID no. 12423890
  misc_feature (134)..(351): Homolog of NCBI NO: 97774 NR Description: probable endoglucanase - Ruminococcus flavefaciens
  misc_feature (124)..(353): Homolog of NCBI NO: 23018055 NR Description: hypothetical protein [Thermobifida fusca]
  misc_feature (77)..(320): Homolog of NCBI NO: 25028434 NR Description: putative translation initiation factor IF-2
  misc_feature (171)..(350): Homolog of NCBI NO: 1911490 NR Description: Con1 [Homo sapiens]
  misc_feature (171)..(350): Homolog of NCBI NO: 1911490 NR Description: Con1 [Homo sapiens]
  misc_feature (76)..(350): Homolog of NCBI NO: 23019401 NR Description: hypothetical protein [Thermobifida fusca]
  misc_feature (202)..(336): Homolog of NCBI NO: 23019418 NR Description: hypothetical protein [Thermobifida fusca]
LLQVSSPTNATYRYSTCREAEAEAEAEAPTFWTSLLHSLPTTSAHPKFANLPLLHFTVTVDYLHLSDGTEEESHVQPHARQARAARQGRRGAAPAPLRRARRLPPRLRRAHPGHVACPGIALVLVAAASAAAARGGGAGALRHVQRDAAADGGGDRGGAARATAARALQLPGVRSGPRQPHVGGAEPRGADRVPGGGRGVDHQRAGQAPGAGVPPRGLRHGAGRRRRAARAPRPPGLRRAARPRGGRRRVLPPRAPGPPARLRRPRLGPRHGGRAHGVDAPGARPHGRHLHRRHGGARAQARGRPHPRLRPRRRPPRRGRLLQGVPVRGLPRRAGRTDQALRHPVTPRQGRHAILPLIKFVLLWFGSHGAHCQTTTVLLLLHRCCFAVAHSTLMSA

SEQ ID NO: 8182 - protein, 283 aa, Zea mays subsp. mays
  peptide (1)..(283): Ceres Seq. ID no. 12423891
  misc_feature (48)..(282): Pfam Name: Protein of unknown function (DUF579) Pfam Description: Protein of unknown function (DUF579)
  misc_feature (19)..(283): Homolog of NCBI NO: 15217566 NR Description: unknown protein; protein id: At1g09610.1
  misc_feature (48)..(283): Homolog of NCBI NO: 15234881 NR Description: putative protein; protein id: At4g09990.1
  misc_feature (57)..(283): Homolog of NCBI NO: 18398986 NR Description: expressed protein; protein id: At1g33800.1, by cDNA: 114466., supported by cDNA: gi_17979548, supported by gi_20453344 [Arabidopsis thaliana] >gi|25354651|pir||E86461
  misc_feature (1)..(283): Homolog of NCBI NO: 25402555 NR Description: hypothetical protein [imported] - Arabidopsis >gi|3482933|gb|AAC33218.1| Similar to cdc2 protein kinases
  misc_feature (57)..(283): Homolog of NCBI NO: 18409879 NR Description: hypothetical protein; protein id: At1g71690.1
  misc_feature (57)..(283): Homolog of NCBI NO: 25354648 NR Description: hypothetical protein F14O23.3 [imported] - thaliana >gi|7239492|gb|AAF43218.1|AC012654_2 EST gb|AI999169
  misc_feature (63)..(282): Homolog of NCBI NO: 15220402 NR Description: unknown protein; protein id: At1g67330.1 thaliana] >gi|9828617|gb|AAG00240.1|AC002130_5 F1N21.15
  misc_feature (44)..(271): Homolog of NCBI NO: 18396558 NR Description: expressed protein; protein id: At1g27930.1, by cDNA: 1367., supported by cDNA: gi_15215712 [Arabidopsis
  misc_feature (44)..(271): Homolog of NCBI NO: 21537399 NR Description: unknown [Arabidopsis thaliana]
  misc_feature (57)..(282): Homolog of NCBI NO: 10241434 NR Description: putative protein [Oryza sativa (indica
MSSPTHARLAQQGKAGVALRLLLSAALAGFLLVFAARTLVTSPVPASPSYSSQPHPLPLPVAEALVHYATSNATPQQTAEEIGVALRVLQRRAPCNFLVFGLGLDSPMWAALNHGGRTVFLEEDAAWITSVRGRHPALESHHVAYDTALADADALLGLRAHPACVAQPDLAAAAAASCRLALRGLPPVFAGLDWDLVMVDAPTGWTPRAPGRMGAIYTAGMAARARRPGAGPTHVFVHDVDRPVEDAFSRAFLCEGYLAEQVGRIRHFVIPSHRDKDGTPFCP

SEQ ID NO: 8183 - DNA, 1524 bp, Zea mays subsp. mays
  misc_feature (1)..(1524): Ceres Seq. ID no. 12408587
  misc_feature: MA Experiment ID: 20000626 Result: Down-regulated in Transcription
  misc_feature: MA Experiment 20000626 PARAMETER Experiment Name: Zm_Herbicide-Treatments_P Parameter: Timepoint (hr) Value: 12
  misc_feature: MA Experiment 20000626 PARAMETER Experiment Name: Zm_Herbicide-Treatments_P Parameter: Tissue Value: Aerial
  misc_feature: MA Experiment 20000626 PARAMETER Experiment Name: Zm_Herbicide-Treatments_P Parameter: Treatment Value: Roundup vs. No Treatment
atttgttccacaatccacattccccaccccccacggcccccgggcccacccaccctctccctcttcttcctcactcctctctccctctctctctctctctctctctctctcgtcctgcgccacacgccgcggccgtctccgggcaggaaggaagggggcgggaagatgatgatgacgcgggcaccgatggggccgatggagggcgcggcggtggacgagatggtgcgccgcctcgtggagggcggccgaggcgggcgccaggtgcagctgtccgaggcggagatccggcagctctgcgtagagggcaagcgggtgctcctctcccagcccaatctcctccgaatccacgccccagtcaagatctgcggtgatatccatggccagtttgtcgaccttctgagattattcgatttgggtggttatcctccagcttcaacttacgtattcctcggagactatgtcgatagaggcaaacagagcctggagactatatgcttgctgctggcgtacaaaatccggtaccccgaaaatattttcctgttgaggggtaaccacgaggatgcaaagatcaacagagtctatggtttttatgacgaatgtaagaggaggttcaatgttcggctgtggaagatattctctgattgcttcaactgcctgcccatcgcagcgctcatcgatgacaagatactgtgcatgcatggtggcctctcgcccgaattgactagtttggaccagataaaagatattgagcgacctgctgagattcctgattatggtctcctgtgtgatctgctttggtctgatcctagccccgatggagaagggtggggggagagtgacaggggtgtctcgtgtacgtttggtgcagataaacttgtagagtttttggagaagaatgatctcgatcttatatgccgagctcatcaggtggttgaagatggctatgagttctttgcacaacgaagattagtgacaatcttttcagctccaaattattgtggagagtttgataatgttggcgctcttttaagcatagatgagagcctaatgtgttcatttcagatcctgaagccaactgatatgggtccaccgcatgcaagaaaacaaattccaaataagccaacaagagggtgaagccttggaccagcatccaatacttccagttccagtatcatgatgatcgtcagtcagctcaaagggggtgatctgttgtttggatagttggatccaccagggcctgacattagacatccatcagccaattaatccctttagccaccctttactcgtgtcttgggaggcggcttggctgtaaaggatattctgtacagcatttagttggattcaacacatcatctgttttactgttcttcctgccggcaagggacctcattggcagcatgacatacaatagatgttagtagtctcaatttgttttccttagcttctgccttgcgtttttttttttttggtgcgggacttgatgtatggtgattttatatctttgtaatatgtagatgttgc

SEQ ID NO: 8184 - protein, 377 aa, Zea mays subsp. mays
  peptide (1)..(377): Ceres Seq. ID no. 12408588
  misc_feature (117)..(312): Pfam Name: Calcineurin-like phosphoesterase Pfam Description: Calcineurin-like phosphoesterase
  misc_feature (63)..(377): Homolog of NCBI NO: 34895162 NR Description: putative serine/threonine protein phosphatase
  misc_feature (57)..(371): Homolog of NCBI NO: 30690812 NR Description: serine/threonine protein phosphatase type [Arabidopsis thaliana] >gi|21431804|sp|O82734|PP18_ARATH
  misc_feature (57)..(371): Homolog of NCBI NO: 15230010 NR Description: serine/threonine protein phosphatase (PP1); id: At3g05580.1 [Arabidopsis thaliana] putative serine/threonine protein phosphatase type one
  misc_feature (57)..(371): Homolog of NCBI NO: 3153205 NR Description: serine/threonine protein phosphatase type one
  misc_feature (66)..(376): Homolog of NCBI NO: 1346765 NR Description: SERINE/THREONINE PROTEIN PHOSPHATASE PP1
  misc_feature (57)..(360): Homolog of NCBI NO: 29290586 NR Description: serine threonine protein phosphatase [Phaseolus
  misc_feature (57)..(377): Homolog of NCBI NO: 30690815 NR Description: serine/threonine protein phosphatase type
  misc_feature (66)..(377): Homolog of NCBI NO: 21593410 NR Description: TOPP8 serine/threonine protein phosphatase type
  misc_feature (66)..(364): Homolog of NCBI NO: 15227080 NR Description: phosphoprotein phosphatase-type 1 catalytic protein id: At2g29400.1, supported by cDNA: gi_166571, supported cDNA: gi_19424067 [Arabidopsis thaliana]
  misc_feature (66)..(364): Homolog of NCBI NO: 25289017 NR Description: phosphoprotein phosphatase (EC 3.1.3.16) 1
ICSTIHIPHPPRPPGPPTLSLFFLTPLSLSLSLSLSLVLRHTPRPSPGRKEGGGKMMMTRAPMGPMEGAAVDEMVRRLVEGGRGGRQVQLSEAEIRQLCVEGKRVLLSQPNLLRIHAPVKICGDIHGQFVDLLRLFDLGGYPPASTYVFLGDYVDRGKQSLETICLLLAYKIRYPENIFLLRGNHEDAKINRVYGFYDECKRRFNVRLWKIFSDCFNCLPIAALIDDKILCMHGGLSPELTSLDQIKDIERPAEIPDYGLLCDLLWSDPSPDGEGWGESDRGVSCTFGADKLVEFLEKNDLDLICRAHQVVEDGYEFFAQRRLVTIFSAPNYCGEFDNVGALLSIDESLMCSFQILKPTDMGPPHARKQIPNKPTRG

SEQ ID NO: 8185 - protein, 322 aa, Zea mays subsp. mays
  peptide (1)..(322): Ceres Seq. ID no. 12408589
  misc_feature (62)..(257): Pfam Name: Calcineurin-like phosphoesterase Pfam Description: Calcineurin-like phosphoesterase
  misc_feature (8)..(322): Homolog of NCBI NO: 34895162 NR Description: putative serine/threonine protein phosphatase
  misc_feature (2)..(316): Homolog of NCBI NO: 30690812 NR Description: serine/threonine protein phosphatase type [Arabidopsis thaliana] >gi|21431804|sp|O82734|PP18_ARATH
  misc_feature (2)..(316): Homolog of NCBI NO: 15230010 NR Description: serine/threonine protein phosphatase (PP1); id: At3g05580.1 [Arabidopsis thaliana] putative serine/threonine protein phosphatase type one
  misc_feature (2)..(316): Homolog of NCBI NO: 3153205 NR Description: serine/threonine protein phosphatase type one
  misc_feature (11)..(321): Homolog of NCBI NO: 1346765 NR Description: SERINE/THREONINE PROTEIN PHOSPHATASE PP1
  misc_feature (2)..(305): Homolog of NCBI NO: 29290586 NR Description: serine threonine protein phosphatase [Phaseolus
  misc_feature (2)..(322): Homolog of NCBI NO: 30690815 NR Description: serine/threonine protein phosphatase type
  misc_feature (11)..(322): Homolog of NCBI NO: 21593410 NR Description: TOPP8 serine/threonine protein phosphatase type
  misc_feature (11)..(309): Homolog of NCBI NO: 15227080 NR Description: phosphoprotein phosphatase-type 1 catalytic protein id: At2g29400.1, supported by cDNA: gi_166571, supported cDNA: gi_19424067 [Arabidopsis thaliana]
  misc_feature (11)..(309): Homolog of NCBI NO: 25289017 NR Description: phosphoprotein phosphatase (EC 3.1.3.16) 1
MMMTRAPMGPMEGAAVDEMVRRLVEGGRGGRQVQLSEAEIRQLCVEGKRVLLSQPNLLRIHAPVKICGDIHGQFVDLLRLFDLGGYPPASTYVFLGDYVDRGKQSLETICLLLAYKIRYPENIFLLRGNHEDAKINRVYGFYDECKRRFNVRLWKIFSDCFNCLPIAALIDDKILCMHGGLSPELTSLDQIKDIERPAEIPDYGLLCDLLWSDPSPDGEGWGESDRGVSCTFGADKLVEFLEKNDLDLICRAHQVVEDGYEFFAQRRLVTIFSAPNYCGEFDNVGALLSIDESLMCSFQILKPTDMGPPHARKQIPNKPTRG

SEQ ID NO: 8186 - protein, 321 aa, Zea mays subsp. mays
  peptide (1)..(321): Ceres Seq. ID no. 12408590
  misc_feature (61)..(256): Pfam Name: Calcineurin-like phosphoesterase Pfam Description: Calcineurin-like phosphoesterase
  misc_feature (7)..(321): Homolog of NCBI NO: 34895162 NR Description: putative serine/threonine protein phosphatase
  misc_feature (1)..(315): Homolog of NCBI NO: 30690812 NR Description: serine/threonine protein phosphatase type [Arabidopsis thaliana] >gi|21431804|sp|O82734|PP18_ARATH
  misc_feature (1)..(315): Homolog of NCBI NO: 15230010 NR Description: serine/threonine protein phosphatase (PP1); id: At3g05580.1 [Arabidopsis thaliana] putative serine/threonine protein phosphatase type one
  misc_feature (1)..(315): Homolog of NCBI NO: 3153205 NR Description: serine/threonine protein phosphatase type one
  misc_feature (10)..(320): Homolog of NCBI NO: 1346765 NR Description: SERINE/THREONINE PROTEIN PHOSPHATASE PP1
  misc_feature (1)..(304): Homolog of NCBI NO: 29290586 NR Description: serine threonine protein phosphatase [Phaseolus
  misc_feature (1)..(321): Homolog of NCBI NO: 30690815 NR Description: serine/threonine protein phosphatase type
  misc_feature (10)..(321): Homolog of NCBI NO: 21593410 NR Description: TOPP8 serine/threonine protein phosphatase type
  misc_feature (10)..(308): Homolog of NCBI NO: 15227080 NR Description: phosphoprotein phosphatase-type 1 catalytic protein id: At2g29400.1, supported by cDNA: gi_166571, supported cDNA: gi_19424067 [Arabidopsis thaliana]
  misc_feature (10)..(308): Homolog of NCBI NO: 25289017 NR Description: phosphoprotein phosphatase (EC 3.1.3.16) 1
MMTRAPMGPMEGAAVDEMVRRLVEGGRGGRQVQLSEAEIRQLCVEGKRVLLSQPNLLRIHAPVKICGDIHGQFVDLLRLFDLGGYPPASTYVFLGDYVDRGKQSLETICLLLAYKIRYPENIFLLRGNHEDAKINRVYGFYDECKRRFNVRLWKIFSDCFNCLPIAALIDDKILCMHGGLSPELTSLDQIKDIERPAEIPDYGLLCDLLWSDPSPDGEGWGESDRGVSCTFGADKLVEFLEKNDLDLICRAHQVVEDGYEFFAQRRLVTIFSAPNYCGEFDNVGALLSIDESLMCSFQILKPTDMGPPHARKQIPNKPTRG

SEQ ID NO: 8187 - DNA, 1353 bp, Zea mays subsp. mays
  misc_feature (1)..(1353): Ceres Seq. ID no. 12374404
  misc_feature: MA Experiment ID: 108527 Result: Up-regulated in Transcription
  misc_feature: MA Experiment 108527 PARAMETER Experiment Name: Zm_5mM_NO_P Parameter: Age (day) Value: 8
  misc_feature: MA Experiment 108527 PARAMETER Experiment Name: Zm_5mM_NO_P Parameter: Organism Value: Zea mays
  misc_feature: MA Experiment 108527 PARAMETER Experiment Name: Zm_5mM_NO_P Parameter: Plant Line Value: 35A19
  misc_feature: MA Experiment 108527 PARAMETER Experiment Name: Zm_5mM_NO_P Parameter: Timepoint (hr) Value: 6
  misc_feature: MA Experiment 108527 PARAMETER Experiment Name: Zm_5mM_NO_P Parameter: Tissue Value: Aerial
  misc_feature: MA Experiment 108527 PARAMETER Experiment Name: Zm_5mM_NO_P Parameter: Treatment Value: 5mM NO vs. No Treatment
  misc_feature: MA Experiment ID: 20000487 Result: Up-regulated in Transcription
  misc_feature: MA Experiment 20000487 PARAMETER Experiment Name: Zm_50mM_NH4NO3_L_to_H_P Parameter: Organism Value: Zea mays
  misc_feature: MA Experiment 20000487 PARAMETER Experiment Name: Zm_50mM_NH4NO3_L_to_H_P Parameter: Timepoint (hr) Value: 4
  misc_feature: MA Experiment 20000487 PARAMETER Experiment Name: Zm_50mM_NH4NO3_L_to_H_P Parameter: Tissue Value: Leaves
  misc_feature: MA Experiment 20000487 PARAMETER Experiment Name: Zm_50mM_NH4NO3_L_to_H_P Parameter: Treatment Value: 50mM NH4NO3 vs. 100mM Mannitol
  misc_feature: MA Experiment ID: 20000488 Result: Up-regulated in Transcription
  misc_feature: MA Experiment 20000488 PARAMETER Experiment Name: Zm_50mM_NH4NO3_L_to_H_P Parameter: Organism Value: Zea mays
  misc_feature: MA Experiment 20000488 PARAMETER Experiment Name: Zm_50mM_NH4NO3_L_to_H_P Parameter: Timepoint (hr) Value: 8
  misc_feature: MA Experiment 20000488 PARAMETER Experiment Name: Zm_50mM_NH4NO3_L_to_H_P Parameter: Tissue Value: Leaves
  misc_feature: MA Experiment 20000488 PARAMETER Experiment Name: Zm_50mM_NH4NO3_L_to_H_P Parameter: Treatment Value: 50mM NH4NO3 vs. 100mM Mannitol
  misc_feature: MA Experiment ID: 20001605 Result: Up-regulated in Transcription
  misc_feature: MA Experiment 20001605 PARAMETER Experiment Name: Zm_50ppm_KNO3_L-to-H_P Parameter: Age (day) Value: 19
  misc_feature: MA Experiment 20001605 PARAMETER Experiment Name: Zm_50ppm_KNO3_L-to-H_P Parameter: Organism Value: Zea mays
  misc_feature: MA Experiment 20001605 PARAMETER Experiment Name: Zm_50ppm_KNO3_L-to-H_P Parameter: Plant Line Value: 35A19
  misc_feature: MA Experiment 20001605 PARAMETER Experiment Name: Zm_50ppm_KNO3_L-to-H_P Parameter: Timepoint (hr) Value: 4
  misc_feature: MA Experiment 20001605 PARAMETER Experiment Name: Zm_50ppm_KNO3_L-to-H_P Parameter: Tissue Value: Shoots
  misc_feature: MA Experiment 20001605 PARAMETER Experiment Name: Zm_50ppm_KNO3_L-to-H_P Parameter: Treatment Value: 50ppm KNO3 vs. 50ppm KCl
  misc_feature: MA Experiment ID: 20001610 Result: Up-regulated in Transcription
  misc_feature: MA Experiment 20001610 PARAMETER Experiment Name: Zm_50ppm_KNO3_L-to-H_P Parameter: Age (day) Value: 19
  misc_feature: MA Experiment 20001610 PARAMETER Experiment Name: Zm_50ppm_KNO3_L-to-H_P Parameter: Organism Value: Zea mays
  misc_feature: MA Experiment 20001610 PARAMETER Experiment Name: Zm_50ppm_KNO3_L-to-H_P Parameter: Plant Line Value: 35A19
  misc_feature: MA Experiment 20001610 PARAMETER Experiment Name: Zm_50ppm_KNO3_L-to-H_P Parameter: Timepoint (hr) Value: 2
  misc_feature: MA Experiment 20001610 PARAMETER Experiment Name: Zm_50ppm_KNO3_L-to-H_P Parameter: Tissue Value: Roots
  misc_feature: MA Experiment 20001610 PARAMETER Experiment Name: Zm_50ppm_KNO3_L-to-H_P Parameter: Treatment Value: 50ppm KNO3 vs. 50ppm KCl
  misc_feature: MA Experiment ID: 20001612 Result: Up-regulated in Transcription
  misc_feature: MA Experiment 20001612 PARAMETER Experiment Name: Zm_50ppm_KNO3_L-to-H_P Parameter: Age (day) Value: 19
  misc_feature: MA Experiment 20001612 PARAMETER Experiment Name: Zm_50ppm_KNO3_L-to-H_P Parameter: Organism Value: Zea mays
  misc_feature: MA Experiment 20001612 PARAMETER Experiment Name: Zm_50ppm_KNO3_L-to-H_P Parameter: Plant Line Value: 35A19
  misc_feature: MA Experiment 20001612 PARAMETER Experiment Name: Zm_50ppm_KNO3_L-to-H_P Parameter: Timepoint (hr) Value: 8
  misc_feature: MA Experiment 20001612 PARAMETER Experiment Name: Zm_50ppm_KNO3_L-to-H_P Parameter: Tissue Value: Roots
  misc_feature: MA Experiment 20001612 PARAMETER Experiment Name: Zm_50ppm_KNO3_L-to-H_P Parameter: Treatment Value: 50ppm KNO3 vs. 50ppm KCl
ctcccgtccaggttcactccgccactccggccccctcatcttcttcccgtccccctcttcgttgcccccagatcccgcaaaccgcgaaaagaaaccgcatatcagcggacagcgggcgctgctcgttctcatcgcccccctctcgtctctcgcggagccgaccccgtccccattcggacctcagctagccaccaccaccatggcttcttcgaagaggagatttggtgctgccggcggcgcggacaagaaggatctattccatgtcgtccacaaggtgcccgccggcgacagcccgtacgtcgtagccaagcacctccagctcgtggagaagcaaccggatgtggcgatcgtgtggttctggaaggcaatcaactcaggggacagggtggacagcgccctgaaggacatggccatggtgatgaagcagcaggaccgttccgaggaggcaatcgaggccatcaggtccttcaggcacctctgctccaagcaggctcaggaatccctcgacaacctcctcattgacctctacaagaaatgcgggaaagttgaggagcagatcgagctcctgaaacagaagctcaagtcgatataccttggcgaggccttcaacgggaaggcgacgaagaaagcgcggtcccatggcaagaagtttcaggtctcgatccaacaagagacgtctcgtattctgggcaatcttggctgggcttacatgcagcagaacaacttcgaagccgccgagctggtgtaccgcaaggcgcaagctatcgagcccgatgccaacagggcgtgcaaccttgggctgtgcctgatcaagcagggcaggcacgaggaggcacggcaagcactcgaggacgtccgattgcgcagaatctatggatcagaagatgcaaaggtggttgcccgtgcggagcagcttctccgcgagctaaacccgttgcaatgcgtttcatcgccgttccaggttggcctcagcgtccatgaagggatcatgggtgaaccagacctagtagtgatgaacgagtggacgccgttcaggtcgaggaggctgcctgtgtttgaggagatagcaactttccgggaccaaatggcttgttgatgcattactttgcatggtttaatttatctgtcagtgtcacactcacatccctctagaagtttttgttcgtatactgggtgtgggggcgtgacggtgaggaatagagatcagtatatatcatatagctggggttgatgcaaagcgttgcctttaggatagtatttggttcatgttatatcactgtatggttcagatttcagtgaacaaatgttcgtgcgtgccctgatcttgtacaggatttacagttggctgttgtg

SEQ ID NO: 8188 - protein, 364 aa, Zea mays subsp. mays
  peptide (1)..(364): Ceres Seq. ID no. 12374405
  misc_feature (226)..(259): Pfam Name: TPR Domain Pfam Description: TPR Domain
  misc_feature (47)..(364): Homolog of NCBI NO: 3859116 NR Description: unknown [Oryza sativa]
  misc_feature (84)..(364): Homolog of NCBI NO: 9758884 NR Description: gb|AAC72543.1~gene_id:K24G6.19~similar to unknown
  misc_feature (84)..(364): Homolog of NCBI NO: 30695554 NR Description: male sterility MS5 family [Arabidopsis thaliana] unknown protein [Arabidopsis thaliana]
  misc_feature (79)..(364): Homolog of NCBI NO: 25406811 NR Description: hypothetical protein [imported] - Arabidopsis
  misc_feature (79)..(364): Homolog of NCBI NO: 30678993 NR Description: male sterility MS5 family [Arabidopsis thaliana] unknown protein [Arabidopsis thaliana]
  misc_feature (82)..(309): Homolog of NCBI NO: 15230439 NR Description: MS5-like protein; protein id: At3g51280.1
  misc_feature (45)..(324): Homolog of NCBI NO: 3859112 NR Description: male sterility MS5 [Arabidopsis thaliana]
  misc_feature (45)..(324): Homolog of NCBI NO: 4028970 NR Description: pollenless3 [Arabidopsis thaliana]
  misc_feature (45)..(286): Homolog of NCBI NO: 15233432 NR Description: putative protein; protein id: At4g20900.1
  misc_feature (96)..(309): Homolog of NCBI NO: 29467532 NR Description: P0582D05.25 [Oryza sativa (japonica
SRPGSLRHSGPLIFFPSPSSLPPDPANREKKPHISGQRALLVLIAPLSSLAEPTPSPFGPQLATTTMASSKRRFGAAGGADKKDLFHVVHKVPAGDSPYVVAKHLQLVEKQPDVAIVWFWKAINSGDRVDSALKDMAMVMKQQDRSEEAIEAIRSFRHLCSKQAQESLDNLLIDLYKKCGKVEEQIELLKQKLKSIYLGEAFNGKATKKARSHGKKFQVSIQQETSRILGNLGWAYMQQNNFEAAELVYRKAQAIEPDANRACNLGLCLIKQGRHEEARQALEDVRLRRIYGSEDAKVVARAEQLLRELNPLQCVSSPFQVGLSVHEGIMGEPDLVVMNEWTPFRSRRLPVFEEIATFRDQMAC

SEQ ID NO: 8189 - protein, 298 aa, Zea mays subsp. mays
  peptide (1)..(298): Ceres Seq. ID no. 12374406
  misc_feature (160)..(193): Pfam Name: TPR Domain Pfam Description: TPR Domain
  misc_feature (1)..(298): Homolog of NCBI NO: 3859116 NR Description: unknown [Oryza sativa]
  misc_feature (18)..(298): Homolog of NCBI NO: 9758884 NR Description: gb|AAC72543.1~gene_id:K24G6.19~similar to unknown
  misc_feature (18)..(298): Homolog of NCBI NO: 30695554 NR Description: male sterility MS5 family [Arabidopsis thaliana] unknown protein [Arabidopsis thaliana]
  misc_feature (13)..(298): Homolog of NCBI NO: 25406811 NR Description: hypothetical protein [imported] - Arabidopsis
  misc_feature (13)..(298): Homolog of NCBI NO: 30678993 NR Description: male sterility MS5 family [Arabidopsis thaliana] unknown protein [Arabidopsis thaliana]
  misc_feature (16)..(243): Homolog of NCBI NO: 15230439 NR Description: MS5-like protein; protein id: At3g51280.1
  misc_feature (1)..(258): Homolog of NCBI NO: 3859112 NR Description: male sterility MS5 [Arabidopsis thaliana]
  misc_feature (1)..(258): Homolog of NCBI NO: 4028970 NR Description: pollenless3 [Arabidopsis thaliana]
  misc_feature (1)..(220): Homolog of NCBI NO: 15233432 NR Description: putative protein; protein id: At4g20900.1
  misc_feature (30)..(243): Homolog of NCBI NO: 29467532 NR Description: P0582D05.25 [Oryza sativa (japonica
MASSKRRFGAAGGADKKDLFHVVHKVPAGDSPYVVAKHLQLVEKQPDVAIVWFWKAINSGDRVDSALKDMAMVMKQQDRSEEAIEAIRSFRHLCSKQAQESLDNLLIDLYKKCGKVEEQIELLKQKLKSIYLGEAFNGKATKKARSHGKKFQVSIQQETSRILGNLGWAYMQQNNFEAAELVYRKAQAIEPDANRACNLGLCLIKQGRHEEARQALEDVRLRRIYGSEDAKVVARAEQLLRELNPLQCVSSPFQVGLSVHEGIMGEPDLVVMNEWTPFRSRRLPVFEEIATFRDQMAC

SEQ ID NO: 8190 - protein, 229 aa, Zea mays subsp. mays
  peptide (1)..(229): Ceres Seq. ID no. 12374407
  misc_feature (91)..(124): Pfam Name: TPR Domain Pfam Description: TPR Domain
  misc_feature (1)..(229): Homolog of NCBI NO: 3859116 NR Description: unknown [Oryza sativa]
  misc_feature (1)..(229): Homolog of NCBI NO: 9758884 NR Description: gb|AAC72543.1~gene_id:K24G6.19~similar to unknown
  misc_feature (1)..(229): Homolog of NCBI NO: 30695554 NR Description: male sterility MS5 family [Arabidopsis thaliana] unknown protein [Arabidopsis thaliana]
  misc_feature (1)..(229): Homolog of NCBI NO: 25406811 NR Description: hypothetical protein [imported] - Arabidopsis
  misc_feature (1)..(229): Homolog of NCBI NO: 30678993 NR Description: male sterility MS5 family [Arabidopsis thaliana] unknown protein [Arabidopsis thaliana]
  misc_feature (1)..(174): Homolog of NCBI NO: 15230439 NR Description: MS5-like protein; protein id: At3g51280.1
  misc_feature (1)..(189): Homolog of NCBI NO: 3859112 NR Description: male sterility MS5 [Arabidopsis thaliana]
  misc_feature (1)..(189): Homolog of NCBI NO: 4028970 NR Description: pollenless3 [Arabidopsis thaliana]
  misc_feature (1)..(151): Homolog of NCBI NO: 15233432 NR Description: putative protein; protein id: At4g20900.1
  misc_feature (1)..(174): Homolog of NCBI NO: 29467532 NR Description: P0582D05.25 [Oryza sativa (japonica
MAMVMKQQDRSEEAIEAIRSFRHLCSKQAQESLDNLLIDLYKKCGKVEEQIELLKQKLKSIYLGEAFNGKATKKARSHGKKFQVSIQQETSRILGNLGWAYMQQNNFEAAELVYRKAQAIEPDANRACNLGLCLIKQGRHEEARQALEDVRLRRIYGSEDAKVVARAEQLLRELNPLQCVSSPFQVGLSVHEGIMGEPDLVVMNEWTPFRSRRLPVFEEIATFRDQMAC

SEQ ID NO: 8191 - DNA, 1564 bp, Zea mays subsp. mays
  misc_feature (1)..(1564): Ceres Seq. ID no. 12367922
  misc_feature: MA Experiment ID: 108527 Result: Down-regulated in Transcription
  misc_feature: MA Experiment 108527 PARAMETER Experiment Name: Zm_5mM_NO_P Parameter: Age (day) Value: 8
  misc_feature: MA Experiment 108527 PARAMETER Experiment Name: Zm_5mM_NO_P Parameter: Organism Value: Zea mays
  misc_feature: MA Experiment 108527 PARAMETER Experiment Name: Zm_5mM_NO_P Parameter: Plant Line Value: 35A19
  misc_feature: MA Experiment 108527 PARAMETER Experiment Name: Zm_5mM_NO_P Parameter: Timepoint (hr) Value: 6
  misc_feature: MA Experiment 108527 PARAMETER Experiment Name: Zm_5mM_NO_P Parameter: Tissue Value: Aerial
  misc_feature: MA Experiment 108527 PARAMETER Experiment Name: Zm_5mM_NO_P Parameter: Treatment Value: 5mM NO vs. No Treatment
  misc_feature: MA Experiment ID: 108528 Result: Up-regulated in Transcription
  misc_feature: MA Experiment 108528 PARAMETER Experiment Name: Zm_Imbibed_Seeds_P Parameter: Age (day) Value: 5 vs. 2
  misc_feature: MA Experiment 108528 PARAMETER Experiment Name: Zm_Imbibed_Seeds_P Parameter: Organism Value: Zea mays
  misc_feature: MA Experiment 108528 PARAMETER Experiment Name: Zm_Imbibed_Seeds_P Parameter: Plant Line Value: 35A19
  misc_feature: MA Experiment 108528 PARAMETER Experiment Name: Zm_Imbibed_Seeds_P Parameter: Tissue Value: Aerial vs. Embryo
  misc_feature: MA Experiment ID: 108530 Result: Up-regulated in Transcription
  misc_feature: MA Experiment 108530 PARAMETER Experiment Name: Zm_Imbibed_Seeds_P Parameter: Age (day) Value: 6 vs. 2
  misc_feature: MA Experiment 108530 PARAMETER Experiment Name: Zm_Imbibed_Seeds_P Parameter: Organism Value: Zea mays
  misc_feature: MA Experiment 108530 PARAMETER Experiment Name: Zm_Imbibed_Seeds_P Parameter: Plant Line Value: 35A19
  misc_feature: MA Experiment 108530 PARAMETER Experiment Name: Zm_Imbibed_Seeds_P Parameter: Tissue Value: Aerial vs. Embryo
  misc_feature: MA Experiment ID: 108536 Result: Down-regulated in Transcription
  misc_feature: MA Experiment 108536 PARAMETER Experiment Name: Zm_Meristem_P Parameter: Age (day) Value: 8
  misc_feature: MA Experiment 108536 PARAMETER Experiment Name: Zm_Meristem_P Parameter: Organism Value: Zea mays
  misc_feature: MA Experiment 108536 PARAMETER Experiment Name: Zm_Meristem_P Parameter: Plant Line Value: 35A19
  misc_feature: MA Experiment 108536 PARAMETER Experiment Name: Zm_Meristem_P Parameter: Tissue Value: Shoot Meristem vs. Above Shoot Meristem
  misc_feature: MA Experiment ID: 108543 Result: Up-regulated in Transcription
  misc_feature: MA Experiment ID: 108547 Result: Up-regulated in Transcription
  misc_feature: MA Experiment 108547 PARAMETER Experiment Name: Zm_Imbibed_Seeds_P Parameter: Age (day) Value: 4 vs. 2
  misc_feature: MA Experiment 108547 PARAMETER Experiment Name: Zm_Imbibed_Seeds_P Parameter: Organism Value: Zea mays
  misc_feature: MA Experiment 108547 PARAMETER Experiment Name: Zm_Imbibed_Seeds_P Parameter: Plant Line Value: 35A19
  misc_feature: MA Experiment 108547 PARAMETER Experiment Name: Zm_Imbibed_Seeds_P Parameter: Tissue Value: Aerial vs. Embryo
  misc_feature: MA Experiment ID: 108559 Result: Down-regulated in Transcription
  misc_feature: MA Experiment 108559 PARAMETER Experiment Name: Zm_5mM_NO_P Parameter: Age (day) Value: 8
  misc_feature: MA Experiment 108559 PARAMETER Experiment Name: Zm_5mM_NO_P Parameter: Organism Value: Zea mays
  misc_feature: MA Experiment 108559 PARAMETER Experiment Name: Zm_5mM_NO_P Parameter: Plant Line Value: 35A19
  misc_feature: MA Experiment 108559 PARAMETER Experiment Name: Zm_5mM_NO_P Parameter: Timepoint (hr) Value: 12
  misc_feature: MA Experiment 108559 PARAMETER Experiment Name: Zm_5mM_NO_P Parameter: Tissue Value: Aerial
  misc_feature: MA Experiment 108559 PARAMETER Experiment Name: Zm_5mM_NO_P Parameter: Treatment Value: 5mM NO vs. No Treatment
  misc_feature: MA Experiment ID: 20000477 Result: Down-regulated in Transcription
  misc_feature: MA Experiment 20000477 PARAMETER Experiment Name: Zm_5mM_SA_P Parameter: Age (day) Value: 10
  misc_feature: MA Experiment 20000477 PARAMETER Experiment Name: Zm_5mM_SA_P Parameter: Organism Value: Zea mays
  misc_feature: MA Experiment 20000477 PARAMETER Experiment Name: Zm_5mM_SA_P Parameter: Plant Line Value: 35A19
  misc_feature: MA Experiment 20000477 PARAMETER Experiment Name: Zm_5mM_SA_P Parameter: Timepoint (hr) Value: 48
  misc_feature: MA Experiment 20000477 PARAMETER Experiment Name: Zm_5mM_SA_P Parameter: Tissue Value: Aerial
  misc_feature: MA Experiment 20000477 PARAMETER Experiment Name: Zm_5mM_SA_P Parameter: Treatment Value: 5mM SA vs. No Treatment
  misc_feature: MA Experiment ID: 20000492 Result: Up-regulated in Transcription
  misc_feature: MA Experiment 20000492 PARAMETER Experiment Name: Zm_Hybrid_Seed_Dev_P Parameter: DAP Value: 12
  misc_feature: MA Experiment 20000492 PARAMETER Experiment Name: Zm_Hybrid_Seed_Dev_P Parameter: Organism Value: Zea mays
  misc_feature: MA Experiment 20000492 PARAMETER Experiment Name: Zm_Hybrid_Seed_Dev_P Parameter: Plant Line Value: 35A19
  misc_feature: MA Experiment 20000492 PARAMETER Experiment Name: Zm_Hybrid_Seed_Dev_P Parameter: Tissue Value: Fert Kernel vs. Unfert Floret
  misc_feature: MA Experiment ID: 20000535 Result: Up-regulated in Transcription
  misc_feature: MA Experiment 20000535 PARAMETER Experiment Name: Zm_Hybrid_Seed_Dev_P Parameter: DAP Value: 30 vs. 12
  misc_feature: MA Experiment 20000535 PARAMETER Experiment Name: Zm_Hybrid_Seed_Dev_P Parameter: Organism Value: Zea mays
  misc_feature: MA Experiment 20000535 PARAMETER Experiment Name: Zm_Hybrid_Seed_Dev_P Parameter: Plant Line Value: 35A19
  misc_feature: MA Experiment 20000535 PARAMETER Experiment Name: Zm_Hybrid_Seed_Dev_P Parameter: Tissue Value: Embryo vs. Unfert Floret
actgtattattgtgtggctcagctcaacaagctcgccgcaccgtcgccatggacgccgccaccggcaactgttcctcctctccgctgcgcatcgtgatctgcccgtggctcgcgttcggccacatgctcccgtgcctggagctcgcggagcgtctggcttcgcggggccaccgcgtgtccttcgtctccacgccgcgcaacctggcgcgcctcccgccgcggcgccacgacgtgcacctcgtgcccctgcccctcccacgcgtggagggcctccccgacggcgtcgagtccaccaacgacgtgccccccgacaagagagacctccactggaaggccttcgacggcctcgccgtccccttcgctgagttcctggccgccgcgtgcgccgacgaggctaccaggccggactgggtcctcgccgacacattctcccattgggcggccgccgtcgccctcgagcacaaggtgccaagcgcgatgcttctcccgagcgccgccatgatcgcctcgtgctggcaccggccgccgtcgcacgccgagcagccgagaagcgcagtgtttgaggagccggcggaacggccggcgggtgtgctcccttacgagtgggataaaagagcgcacttctttgggccccaaagagcgtcgggcatgtccaccgcgcagcgctgcttcctgacactgcagaggtgcaggctgctggccatgcggagctgccccgagtgggagccggagaatttcacggtggcggcggcactcctcggcaagccgctcgtgccgctcggcctcctaccgccgtcgcccaacggtggacgacgacgagaggaggacggcggcagtacggcgcgctgctggctggacgcgcagccgccgagctcggtcgtgtacgtggcgttgggcagcgaagtcccgctgacggtggcgctggtgcacgagctcgcccttgggctggagctcgccggcgcacgcttcctttgggctctccggaagcccagcggcgtcgcggacgacgccgacgtgctcccgccgggattccgggagcgcacctgcggccgcgggctcgtcgccatgggctgggtccctcagatgagcatactggcgcacggcgccgtgggcgggttcctgacgcactgcggccggaactcgctcgtcgaagggctcctgttcggccaccctctcgtcatgctgcccgtcgtcggggaccagggccccaacgcgcgcgccatggagcggaccaaggttgggctgcaggtggcgaggaacggcaaggacgggtcgttcgaccgccacggcgtcgccgccgccgtccgggaagtcatgctggtggaagaagccaggaaggtcttcgtggcgaatgccctggaaatgcagcgtgttgtggccgacaaggaacgccatgagagatacatcgacgagttcatacgccagctgagatcttactccactccgccggcagcgagttaaaaaggcgtacttggtggcttggtgcctcgcactgtatgtctgtatggggtctaggatgtcaacggttacgtacccgtccagtaatattattccatacttacct

SEQ ID NO: 8192 - protein, 486 aa, Zea mays subsp. mays
  peptide (1)..(486): Ceres Seq. ID no. 12367923
  misc_feature (31)..(479): Pfam Name: UDP-glucoronosyl and UDP-glucosyl transferase Pfam Description: UDP-glucoronosyl and UDP-glucosyl transferase
  misc_feature (17)..(479): Homolog of NCBI NO: 37530678 NR Description: putative anthocyanidin-3-glucoside
  misc_feature (127)..(479): Homolog of NCBI NO: 34393982 NR Description: putative UDP-glucosyltransferase [Oryza sativa
  misc_feature (16)..(129): Homolog of NCBI NO: 34393982 NR Description: putative UDP-glucosyltransferase [Oryza sativa
  misc_feature (28)..(477): Homolog of NCBI NO: 34393985 NR Description: putative UDP-glucosyltransferase [Oryza sativa
  misc_feature (284)..(479): Homolog of NCBI NO: 34393978 NR Description: putative UDP-glucosyltransferase [Oryza sativa
  misc_feature (10)..(184): Homolog of NCBI NO: 34393978 NR Description: putative UDP-glucosyltransferase [Oryza sativa
  misc_feature (22)..(479): Homolog of NCBI NO: 34908562 NR Description: putative anthocyanidine rhamnosyl-transferase
  misc_feature (29)..(476): Homolog of NCBI NO: 21435782 NR Description: UDP-glucosyltransferase [Stevia rebaudiana]
  misc_feature (29)..(478): Homolog of NCBI NO: 15240534 NR Description: anthocyanidin-3-glucoside protein id: At5g49690.1 [Arabidopsis thaliana]
  misc_feature (29)..(479): Homolog of NCBI NO: 20149064 NR Description: putative anthocyanidine rhamnosyl-transferase
TVLLCGSAQQARRTVAMDAATGNCSSSPLRIVICPWLAFGHMLPCLELAERLASRGHRVSFVSTPRNLARLPPRRHDVHLVPLPLPRVEGLPDGVESTNDVPPDKRDLHWKAFDGLAVPFAEFLAAACADEATRPDWVLADTFSHWAAAVALEHKVPSAMLLPSAAMIASCWHRPPSHAEQPRSAVFEEPAERPAGVLPYEWDKRAHFFGPQRASGMSTAQRCFLTLQRCRLLAMRSCPEWEPENFTVAAALLGKPLVPLGLLPPSPNGGRRREEDGGSTARCWLDAQPPSSVVYVALGSEVPLTVALVHELALGLELAGARFLWALRKPSGVADDADVLPPGFRERTCGRGLVAMGWVPQMSILAHGAVGGFLTHCGRNSLVEGLLFGHPLVMLPVVGDQGPNARAMERTKVGLQVARNGKDGSFDRHGVAAAVREVMLVEEARKVFVANALEMQRVVADKERHERYIDEFIRQLRSYSTPPAAS

SEQ ID NO: 8193 - protein, 470 aa, Zea mays subsp. mays
  peptide (1)..(470): Ceres Seq. ID no. 12367924
  misc_feature (15)..(463): Pfam Name: UDP-glucoronosyl and UDP-glucosyl transferase Pfam Description: UDP-glucoronosyl and UDP-glucosyl transferase
  misc_feature (1)..(463): Homolog of NCBI NO: 37530678 NR Description: putative anthocyanidin-3-glucoside
  misc_feature (111)..(463): Homolog of NCBI NO: 34393982 NR Description: putative UDP-glucosyltransferase [Oryza sativa
  misc_feature (1)..(113): Homolog of NCBI NO: 34393982 NR Description: putative UDP-glucosyltransferase [Oryza sativa
  misc_feature (12)..(461): Homolog of NCBI NO: 34393985 NR Description: putative UDP-glucosyltransferase [Oryza sativa
  misc_feature (268)..(463): Homolog of NCBI NO: 34393978 NR Description: putative UDP-glucosyltransferase [Oryza sativa
  misc_feature (1)..(168): Homolog of NCBI NO: 34393978 NR Description: putative UDP-glucosyltransferase [Oryza sativa
  misc_feature (6)..(463): Homolog of NCBI NO: 34908562 NR Description: putative anthocyanidine rhamnosyl-transferase
  misc_feature (13)..(460): Homolog of NCBI NO: 21435782 NR Description: UDP-glucosyltransferase [Stevia rebaudiana]
  misc_feature (13)..(462): Homolog of NCBI NO: 15240534 NR Description: anthocyanidin-3-glucoside protein id: At5g49690.1 [Arabidopsis thaliana]
  misc_feature (13)..(463): Homolog of NCBI NO: 20149064 NR Description: putative anthocyanidine rhamnosyl-transferase
MDAATGNCSSSPLRIVICPWLAFGHMLPCLELAERLASRGHRVSFVSTPRNLARLPPRRHDVHLVPLPLPRVEGLPDGVESTNDVPPDKRDLHWKAFDGLAVPFAEFLAAACADEATRPDWVLADTFSHWAAAVALEHKVPSAMLLPSAAMIASCWHRPPSHAEQPRSAVFEEPAERPAGVLPYEWDKRAHFFGPQRASGMSTAQRCFLTLQRCRLLAMRSCPEWEPENFTVAAALLGKPLVPLGLLPPSPNGGRRREEDGGSTARCWLDAQPPSSVVYVALGSEVPLTVALVHELALGLELAGARFLWALRKPSGVADDADVLPPGFRERTCGRGLVAMGWVPQMSILAHGAVGGFLTHCGRNSLVEGLLFGHPLVMLPVVGDQGPNARAMERTKVGLQVARNGKDGSFDRHGVAAAVREVMLVEEARKVFVANALEMQRVVADKERHERYIDEFIRQLRSYSTPPAAS

SEQ ID NO: 8194 - protein, 445 aa, Zea mays subsp. mays
  peptide (1)..(445): Ceres Seq. ID no. 12367925
  misc_feature (1)..(438): Pfam Name: UDP-glucoronosyl and UDP-glucosyl transferase Pfam Description: UDP-glucoronosyl and UDP-glucosyl transferase
  misc_feature (243)..(438): Homolog of NCBI NO: 34393978 NR Description: putative UDP-glucosyltransferase [Oryza sativa
  misc_feature (1)..(143): Homolog of NCBI NO: 34393978 NR Description: putative UDP-glucosyltransferase [Oryza sativa
  misc_feature (1)..(438): Homolog of NCBI NO: 34908562 NR Description: putative anthocyanidine rhamnosyl-transferase
  misc_feature (1)..(438): Homolog of NCBI NO: 37530678 NR Description: putative anthocyanidin-3-glucoside
  misc_feature (1)..(88): Homolog of NCBI NO: 34393982 NR Description: putative UDP-glucosyltransferase [Oryza sativa
  misc_feature (1)..(436): Homolog of NCBI NO: 34393985 NR Description: putative UDP-glucosyltransferase [Oryza sativa
  misc_feature (86)..(438): Homolog of NCBI NO: 34393982 NR Description: putative UDP-glucosyltransferase [Oryza sativa
  misc_feature (1)..(435): Homolog of NCBI NO: 21435782 NR Description: UDP-glucosyltransferase [Stevia rebaudiana]
  misc_feature (1)..(437): Homolog of NCBI NO: 15240534 NR Description: anthocyanidin-3-glucoside protein id: At5g49690.1 [Arabidopsis thaliana]
  misc_feature (1)..(438): Homolog of NCBI NO: 20149064 NR Description: putative anthocyanidine rhamnosyl-transferase
MLPCLELAERLASRGHRVSFVSTPRNLARLPPRRHDVHLVPLPLPRVEGLPDGVESTNDVPPDKRDLHWKAFDGLAVPFAEFLAAACADEATRPDWVLADTFSHWAAAVALEHKVPSAMLLPSAAMIASCWHRPPSHAEQPRSAVFEEPAERPAGVLPYEWDKRAHFFGPQRASGMSTAQRCFLTLQRCRLLAMRSCPEWEPENFTVAAALLGKPLVPLGLLPPSPNGGRRREEDGGSTARCWLDAQPPSSVVYVALGSEVPLTVALVHELALGLELAGARFLWALRKPSGVADDADVLPPGFRERTCGRGLVAMGWVPQMSILAHGAVGGFLTHCGRNSLVEGLLFGHPLVMLPVVGDQGPNARAMERTKVGLQVARNGKDGSFDRHGVAAAVREVMLVEEARKVFVANALEMQRVVADKERHERYIDEFIRQLRSYSTPPAAS

SEQ ID NO: 8195 - DNA, 1296 bp, Zea mays subsp. mays
  misc_feature (1)..(1296): Ceres Seq. ID no. 12413938
  misc_feature: MA Experiment ID: 108544 Result: Down-regulated in Transcription
  misc_feature: MA Experiment ID: 20000479 Result: Down-regulated in Transcription
  misc_feature: MA Experiment 20000479 PARAMETER Experiment Name: Zm_Drought_P Parameter: Age (day) Value: 10
  misc_feature: MA Experiment 20000479 PARAMETER Experiment Name: Zm_Drought_P Parameter: Organism Value: Zea mays
  misc_feature: MA Experiment 20000479 PARAMETER Experiment Name: Zm_Drought_P Parameter: Plant Line Value: 35A19
  misc_feature: MA Experiment 20000479 PARAMETER Experiment Name: Zm_Drought_P Parameter: Timepoint (hr) Value: 48
  misc_feature: MA Experiment 20000479 PARAMETER Experiment Name: Zm_Drought_P Parameter: Tissue Value: Aerial
  misc_feature: MA Experiment 20000479 PARAMETER Experiment Name: Zm_Drought_P Parameter: Treatment Value: Drought vs. No Drought
atacgcgctctcatctctggctggctcagaaaacagccgccaagcgcacacaccactctctcatcatgacctccatataggccccctacattctttgatcagtgatcactctcgctgggtctcaccccctcccgcagacggccaaacagaacccacgcgtgcgcgcgcgcccacgagcgagcgatgcctcccctccgccgcgcgcgctccatcctgctcctcctccactacgtggccgcctcccacctcctgctgcgcgccgccgcggccacattgccggaccccgcgccgctcgacccggcactggtcgcgaccccggtgcagcccgccgccnccgttccggggggcacgatcccggcgttccccgcgcagtcggactcgctggcgggttcctcgtccacgtgcccgctcgccccttccccggcgctcctcccggccgtgcgggcctcctgcgccgccgccgcggcgctgccgccgaggctgcgctgctgccccgcgctggccgcgtggctgttcgcggcctacgcgcccgccgcgctcgcggagcggccgcccgcgaggcctccggccgcggcggcggccgccgtggacatgccgctgccgcccgacgactccgaggcgtgcgcgggcgccgcggaccgcgcgcttcgtgcggcgggggcgacgctgccccgccccaccggcggcaataacgggacgtgcgacgtggcgttctgctactgcggggtcaggctgaggcggctgacgtgcggacccccgccggcagccgagggcgggctgtgggcgccggctgacgacgcggcggcgaggaggctggagagggactgcgcgcagccgggcntccccggctgctccaaatgccttcttgctctgaccatgataaagaacactagtcccggcgntggcgccgccgcggaggcagcgagcaaggagaagcaggccgccgtccggtcgggcgagagtgaccgggactgcgagctcatggggctcatgtggctgctgcagcgcaacgccacgcgctacggagcgacggccacggccgtcatccaggcgctgatggccgtggacgaggcgtccgccgcgggtgtcgcggtggcggcagacgcggggccggccgcggcgtgctcgctgcccgtggacgacatgcccctcccggccgaatacgcgcaggtcggcggggccagcgancgcctcgcggcgtctgctgcttcttctgcctgctcgtgctgttctccgttctaagcttccgctccgtgtactcgctgtagcaattttgtggttcaattgaagttcgtg

SEQ ID NO: 8196 - protein, 352 aa, Zea mays subsp. mays
  peptide (1)..(352): Ceres Seq. ID no. 12413939
  misc_feature (41)..(343): Homolog of NCBI NO: 34394002 NR Description: unknown protein [Oryza sativa (japonica
  misc_feature (35)..(315): Homolog of NCBI NO: 18401752 NR Description: expressed protein; protein id: At3g18050.1, by cDNA: gi_15451205 [Arabidopsis thaliana] emb|CAB36779.1~gene_id:MRC8.3~similar to unknown protein
  misc_feature (71)..(292): Homolog of NCBI NO: 18417127 NR Description: expressed protein; protein id: At4g28100.1, by cDNA: 42155. [Arabidopsis thaliana] >gi|7486959|pir||T02911
  misc_feature (71)..(292): Homolog of NCBI NO: 21593735 NR Description: unknown [Arabidopsis thaliana]
  misc_feature (1)..(352): Homolog of NCBI NO: 11360494 NR Description: antifreeze glycopeptide AFGP polyprotein precursor
  misc_feature (51)..(51): Xaa is any aa, unknown or other
  misc_feature (220)..(220): Xaa is any aa, unknown or other
  misc_feature (240)..(240): Xaa is any aa, unknown or other
  misc_feature (335)..(335): Xaa is any aa, unknown or other
MPPLRRARSILLLLHYVAASHLLLRAAAATLPDPAPLDPALVATPVQPAAXVPGGTIPAFPAQSDSLAGSSSTCPLAPSPALLPAVRASCAAAAALPPRLRCCPALAAWLFAAYAPAALAERPPARPPAAAAAAVDMPLPPDDSEACAGAADRALRAAGATLPRPTGGNNGTCDVAFCYCGVRLRRLTCGPPPAAEGGLWAPADDAAARRLERDCAQPGXPGCSKCLLALTMIKNTSPGXGAAAEAASKEKQAAVRSGESDRDCELMGLMWLLQRNATRYGATATAVIQALMAVDEASAAGVAVAADAGPAAACSLPVDDMPLPAEYAQVGGASXRLAASAASSACSCCSPF

SEQ ID NO: 8197 - protein, 244 aa, Zea mays subsp. mays
  peptide (1)..(244): Ceres Seq. ID no. 12413940
  misc_feature (17)..(227): Pfam Name: Extensin-like region Pfam Description: Extensin-like region
  misc_feature (40)..(244): Homolog of NCBI NO: 5821145 NR Description: RNA binding protein [Homo sapiens]
  misc_feature (40)..(244): Homolog of NCBI NO: 5821143 NR Description: RNA binding protein [Homo sapiens]
  misc_feature (5)..(244): Homolog of NCBI NO: 5821151 NR Description: RNA binding protein [Homo sapiens]
  misc_feature (40)..(244): Homolog of NCBI NO: 6649242 NR Description: splicing coactivator subunit SRm300 [Homo sapiens]
  misc_feature (5)..(244): Homolog of NCBI NO: 6634015 NR Description: KIAA0324 protein [Homo sapiens]
  misc_feature (5)..(244): Homolog of NCBI NO: 7512967 NR Description: hypothetical protein KIAA0324 - human (fragment)
  misc_feature (40)..(244): Homolog of NCBI NO: 19923466 NR Description: splicing coactivator subunit SRm300; RNA binding
  misc_feature (5)..(244): Homolog of NCBI NO: 19923466 NR Description: splicing coactivator subunit SRm300; RNA binding
  misc_feature (5)..(244): Homolog of NCBI NO: 6649242 NR Description: splicing coactivator subunit SRm300 [Homo sapiens]
  misc_feature (41)..(209): Homolog of NCBI NO: 25143299 NR Description: pre-mRNA splicing SR protein related RSR-1 (68.2
  misc_feature (111)..(111): Xaa is any aa, unknown or other
YALSSLAGSENSRQAHTPLSHHDLHIGPLHSLISDHSRWVSPPPADGQTEPTRARAPTSERCLPSAARAPSCSSSTTWPPPTSCCAPPRPHCRTPRRSTRHWSRPRCSPPXPFRGARSRRSPRSRTRWRVPRPRARSPLPRRSSRPCGPPAPPPRRCRRGCAAAPRWPRGCSRPTRPPRSRSGRPRGLRPRRRPPWTCRCRPTTPRRARAPRTARFVRRGRRCPAPPAAITGRATWRSATAGSG

SEQ ID NO: 8198 - protein, 216 aa, Zea mays subsp. mays
  peptide (1)..(216): Ceres Seq. ID no. 12413941
  misc_feature (1)..(207): Homolog of NCBI NO: 34394002 NR Description: unknown protein [Oryza sativa (japonica
  misc_feature (1)..(179): Homolog of NCBI NO: 18401752 NR Description: expressed protein; protein id: At3g18050.1, by cDNA: gi_15451205 [Arabidopsis thaliana] emb|CAB36779.1~gene_id:MRC8.3~similar to unknown protein
  misc_feature (1)..(156): Homolog of NCBI NO: 18417127 NR Description: expressed protein; protein id: At4g28100.1, by cDNA: 42155. [Arabidopsis thaliana] >gi|7486959|pir||T02911
  misc_feature (1)..(156): Homolog of NCBI NO: 21593735 NR Description: unknown [Arabidopsis thaliana]
  misc_feature (1)..(216): Homolog of NCBI NO: 11360494 NR Description: antifreeze glycopeptide AFGP polyprotein precursor
  misc_feature (84)..(84): Xaa is any aa, unknown or other
  misc_feature (104)..(104): Xaa is any aa, unknown or other
  misc_feature (199)..(199): Xaa is any aa, unknown or other
MPLPPDDSEACAGAADRALRAAGATLPRPTGGNNGTCDVAFCYCGVRLRRLTCGPPPAAEGGLWAPADDAAARRLERDCAQPGXPGCSKCLLALTMIKNTSPGXGAAAEAASKEKQAAVRSGESDRDCELMGLMWLLQRNATRYGATATAVIQALMAVDEASAAGVAVAADAGPAAACSLPVDDMPLPAEYAQVGGASXRLAASAASSACSCCSPF

SEQ ID NO: 8199 - DNA, 1316 bp, Zea mays subsp. mays
  misc_feature (1)..(1316): Ceres Seq. ID no. 12369494
  misc_feature: MA Experiment ID: 108528 Result: Up-regulated in Transcription
  misc_feature: MA Experiment 108528 PARAMETER Experiment Name: Zm_Imbibed_Seeds_P Parameter: Age (day) Value: 5 vs. 2
  misc_feature: MA Experiment 108528 PARAMETER Experiment Name: Zm_Imbibed_Seeds_P Parameter: Organism Value: Zea mays
  misc_feature: MA Experiment 108528 PARAMETER Experiment Name: Zm_Imbibed_Seeds_P Parameter: Plant Line Value: 35A19
  misc_feature: MA Experiment 108528 PARAMETER Experiment Name: Zm_Imbibed_Seeds_P Parameter: Tissue Value: Aerial vs. Embryo
  misc_feature: MA Experiment ID: 108529 Result: Down-regulated in Transcription
  misc_feature: MA Experiment 108529 PARAMETER Experiment Name: Zm_Imbibed_Seeds_P Parameter: Age (day) Value: 5 vs. 2
  misc_feature: MA Experiment 108529 PARAMETER Experiment Name: Zm_Imbibed_Seeds_P Parameter: Organism Value: Zea mays
  misc_feature: MA Experiment 108529 PARAMETER Experiment Name: Zm_Imbibed_Seeds_P Parameter: Plant Line Value: 35A19
  misc_feature: MA Experiment 108529 PARAMETER Experiment Name: Zm_Imbibed_Seeds_P Parameter: Tissue Value: Roots vs. Embryo
  misc_feature: MA Experiment ID: 108530 Result: Up-regulated in Transcription
  misc_feature: MA Experiment 108530 PARAMETER Experiment Name: Zm_Imbibed_Seeds_P Parameter: Age (day) Value: 6 vs. 2
  misc_feature: MA Experiment 108530 PARAMETER Experiment Name: Zm_Imbibed_Seeds_P Parameter: Organism Value: Zea mays
  misc_feature: MA Experiment 108530 PARAMETER Experiment Name: Zm_Imbibed_Seeds_P Parameter: Plant Line Value: 35A19
  misc_feature: MA Experiment 108530 PARAMETER Experiment Name: Zm_Imbibed_Seeds_P Parameter: Tissue Value: Aerial vs. Embryo
  misc_feature: MA Experiment ID: 108543 Result: Up-regulated in Transcription
  misc_feature: MA Experiment ID: 108545 Result: Up-regulated in Transcription
  misc_feature: MA Experiment 108545 PARAMETER Experiment Name: Zm_Imbibed_Seeds_P Parameter: Age (day) Value: 3 vs. 2
  misc_feature: MA Experiment 108545 PARAMETER Experiment Name: Zm_Imbibed_Seeds_P Parameter: Organism Value: Zea mays
  misc_feature: MA Experiment 108545 PARAMETER Experiment Name: Zm_Imbibed_Seeds_P Parameter: Plant Line Value: 35A19
  misc_feature: MA Experiment 108545 PARAMETER Experiment Name: Zm_Imbibed_Seeds_P Parameter: Tissue Value: Aerial vs. Embryo
  misc_feature: MA Experiment ID: 108546 Result: Down-regulated in Transcription
  misc_feature: MA Experiment 108546 PARAMETER Experiment Name: Zm_Imbibed_Seeds_P Parameter: Age (day) Value: 3 vs. 2
  misc_feature: MA Experiment 108546 PARAMETER Experiment Name: Zm_Imbibed_Seeds_P Parameter: Organism Value: Zea mays
  misc_feature: MA Experiment 108546 PARAMETER Experiment Name: Zm_Imbibed_Seeds_P Parameter: Plant Line Value: 35A19
  misc_feature: MA Experiment 108546 PARAMETER Experiment Name: Zm_Imbibed_Seeds_P Parameter: Tissue Value: Roots vs. Embryo
  misc_feature: MA Experiment ID: 108547 Result: Up-regulated in Transcription
  misc_feature: MA Experiment 108547 PARAMETER Experiment Name: Zm_Imbibed_Seeds_P Parameter: Age (day) Value: 4 vs. 2
  misc_feature: MA Experiment 108547 PARAMETER Experiment Name: Zm_Imbibed_Seeds_P Parameter: Organism Value: Zea mays
  misc_feature: MA Experiment 108547 PARAMETER Experiment Name: Zm_Imbibed_Seeds_P Parameter: Plant Line Value: 35A19
  misc_feature: MA Experiment 108547 PARAMETER Experiment Name: Zm_Imbibed_Seeds_P Parameter: Tissue Value: Aerial vs. Embryo
  misc_feature: MA Experiment ID: 108559 Result: Down-regulated in Transcription
  misc_feature: MA Experiment 108559 PARAMETER Experiment Name: Zm_5mM_NO_P Parameter: Age (day) Value: 8
  misc_feature: MA Experiment 108559 PARAMETER Experiment Name: Zm_5mM_NO_P Parameter: Organism Value: Zea mays
  misc_feature: MA Experiment 108559 PARAMETER Experiment Name: Zm_5mM_NO_P Parameter: Plant Line Value: 35A19
  misc_feature: MA Experiment 108559 PARAMETER Experiment Name: Zm_5mM_NO_P Parameter: Timepoint (hr) Value: 12
  misc_feature: MA Experiment 108559 PARAMETER Experiment Name: Zm_5mM_NO_P Parameter: Tissue Value: Aerial
  misc_feature: MA Experiment 108559 PARAMETER Experiment Name: Zm_5mM_NO_P Parameter: Treatment Value: 5mM NO vs. No Treatment
  misc_feature: MA Experiment ID: 20000477 Result: Down-regulated in Transcription
  misc_feature: MA Experiment 20000477 PARAMETER Experiment Name: Zm_5mM_SA_P Parameter: Age (day) Value: 10
  misc_feature: MA Experiment 20000477 PARAMETER Experiment Name: Zm_5mM_SA_P Parameter: Organism Value: Zea mays
  misc_feature: MA Experiment 20000477 PARAMETER Experiment Name: Zm_5mM_SA_P Parameter: Plant Line Value: 35A19
  misc_feature: MA Experiment 20000477 PARAMETER Experiment Name: Zm_5mM_SA_P Parameter: Timepoint (hr) Value: 48
  misc_feature: MA Experiment 20000477 PARAMETER Experiment Name: Zm_5mM_SA_P Parameter: Tissue Value: Aerial
  misc_feature: MA Experiment 20000477 PARAMETER Experiment Name: Zm_5mM_SA_P Parameter: Treatment Value: 5mM SA vs. No Treatment
  misc_feature: MA Experiment ID: 20000478 Result: Down-regulated in Transcription
  misc_feature: MA Experiment 20000478 PARAMETER Experiment Name: Zm_5mM_SA_P Parameter: Age (day) Value: 11
  misc_feature: MA Experiment 20000478 PARAMETER Experiment Name: Zm_5mM_SA_P Parameter: Organism Value: Zea mays
  misc_feature: MA Experiment 20000478 PARAMETER Experiment Name: Zm_5mM_SA_P Parameter: Plant Line Value: 35A19
  misc_feature: MA Experiment 20000478 PARAMETER Experiment Name: Zm_5mM_SA_P Parameter: Timepoint (hr) Value: 72
  misc_feature: MA Experiment 20000478 PARAMETER Experiment Name: Zm_5mM_SA_P Parameter: Tissue Value: Aerial
  misc_feature: MA Experiment 20000478 PARAMETER Experiment Name: Zm_5mM_SA_P Parameter: Treatment Value: 5mM SA vs. No Treatment
  misc_feature: MA Experiment ID: 20000534 Result: Down-regulated in Transcription
  misc_feature: MA Experiment 20000534 PARAMETER Experiment Name: Zm_Hybrid_Pollen_P Parameter: Age (day) Value: 8
  misc_feature: MA Experiment 20000534 PARAMETER Experiment Name: Zm_Hybrid_Pollen_P Parameter: Organism Value: Zea mays
  misc_feature: MA Experiment 20000534 PARAMETER Experiment Name: Zm_Hybrid_Pollen_P Parameter: Plant Line Value: 35A19
  misc_feature: MA Experiment 20000534 PARAMETER Experiment Name: Zm_Hybrid_Pollen_P Parameter: Tissue Value: Pollen vs. Aerial
  misc_feature: MA Experiment ID: 20000626 Result: Down-regulated in Transcription
  misc_feature: MA Experiment 20000626 PARAMETER Experiment Name: Zm_Herbicide-Treatments_P Parameter: Timepoint (hr) Value: 12
  misc_feature: MA Experiment 20000626 PARAMETER Experiment Name: Zm_Herbicide-Treatments_P Parameter: Tissue Value: Aerial
  misc_feature: MA Experiment 20000626 PARAMETER Experiment Name: Zm_Herbicide-Treatments_P Parameter: Treatment Value: Roundup vs. No Treatment
gcagatattctgtggctcaaacctttggaggcacgggcacgggcacggggcaccgaagtgttggtatacgcggcagccgggatagcgagcgtatggccacctacttcgtcctcaacaccggcgcgaagatcccgtcggtcgggctcggcacctggcaggccgacaacgggctcgtcggcgacgccgtctatgccgccgtgaaggcaggttacaggcacattgactgtgctcaagcatacaacaacgagaaagaggtcgggttggtctcaggagagtgctggacgagggcatagtcaagcgtgaagatctcttcatcacctccaagctttggaacattaaccatgcggcggaggacgtcccggttgcactgaacggcacactgaaggacttgcaaactgactacgtggatctctacctcatgcattggccggtgaggatgaagaaaggcgccggcttcggcccgcacgccgtcgtcccgtcagacatccccgcgacgtgggccgcgatggaggagctgtacgacgccgggaaggcgcgcgccatcggcgtcagcaacttctcgagcaagaagctggcggacctgctggccgtggcgcgcgtgcgccccgccgtcgaccaggtggagtgccacccggtgtggcggcagggcaggctccgcgcgttctgcgcctcccaagggatacacctctccgcctactcgccgctgggctcgccgggcacggcgacggtgaaggcgggcgcggtgctggagcacccggccgtcgtctcggcggcggagacgctggggaagacgccggcgcaggtggcgctgcgctggggcgtccagatggggcacagcgtgctcccgaagagcaccgacgaggggaggatcagggcgaatctcgacgtcttcggctggtccttgccggaggacctgctcgccaagttctctgagatcgagcaggaaaggctgattcgtgcgggcttctttgttgatcccgacagcgtgttcaaatccatcgaggagttttgggatggcgagatctgaacactgtgtcctgactgggaggagctgagtgacggaattttgccactggcaaggcgtactgtgcctgtggaagaataaatttatgcgtatgaactctgaaaggcagcgtagttttcaggtagtttgtgctcggcactccaataattcctcgacgctcaagtggtctatctatcctctaaaggccatgccgctcaagcggtcttttaagccaaaaaaaaaaaaaaaaaaaaaaaaaaaaaaaaaaaaaagaaaaaaaaaaaaaaaaaacggcacgagaagccggcacgag

SEQ ID NO: 8200 - protein, 202 aa, Zea mays subsp. mays
  peptide (1)..(202): Ceres Seq. ID no. 12369495
  misc_feature (1)..(202): Homolog of NCBI NO: 34908280 NR Description: putative aldose reductase [Oryza sativa (japonica group)] >gi|15408884|dbj|BAB64275.1| putative aldose reductase
  misc_feature (1)..(202): Homolog of NCBI NO: 30687261 NR Description: aldo/keto reductase family [Arabidopsis thaliana]
  misc_feature (1)..(202): Homolog of NCBI NO: 34908276 NR Description: putative aldose reductase [Oryza sativa (japonica group)] >gi|15408882|dbj|BAB64273.1| putative aldose reductase
  misc_feature (1)..(202): Homolog of NCBI NO: 30687247 NR Description: aldo/keto reductase family [Arabidopsis thaliana]
  misc_feature (1)..(175): Homolog of NCBI NO: 25283479 NR Description: probable alcohol dehydrogenase [imported] -
  misc_feature (175)..(202): Homolog of NCBI NO: 25283479 NR Description: probable alcohol dehydrogenase [imported] -
  misc_feature (1)..(202): Homolog of NCBI NO: 28393400 NR Description: putative aldo/keto reductase [Arabidopsis
  misc_feature (1)..(202): Homolog of NCBI NO: 13160397 NR Description: aldose reductase [Digitalis purpurea]
  misc_feature (1)..(202): Homolog of NCBI NO: 13160399 NR Description: aldose reductase [Digitalis purpurea]
  misc_feature (1)..(177): Homolog of NCBI NO: 7431114 NR Description: aldehyde dehydrogenase homolog At2g37770 - thaliana >gi|3236259|gb|AAC23647.1| putative alcohol
MHWPVRMKKGAGFGPHAVVPSDIPATWAAMEELYDAGKARAIGVSNFSSKKLADLLAVARVRPAVDQVECHPVWRQGRLRAFCASQGIHLSAYSPLGSPGTATVKAGAVLEHPAVVSAAETLGKTPAQVALRWGVQMGHSVLPKSTDEGRIRANLDVFGWSLPEDLLAKFSEIEQERLIRAGFFVDPDSVFKSIEEFWDGEI

SEQ ID NO: 8201 - protein, 196 aa, Zea mays subsp. mays
  peptide (1)..(196): Ceres Seq. ID no. 12369496
  misc_feature (1)..(196): Homolog of NCBI NO: 34908280 NR Description: putative aldose reductase [Oryza sativa (japonica group)] >gi|15408884|dbj|BAB64275.1| putative aldose reductase
  misc_feature (1)..(196): Homolog of NCBI NO: 30687261 NR Description: aldo/keto reductase family [Arabidopsis thaliana]
  misc_feature (1)..(196): Homolog of NCBI NO: 34908276 NR Description: putative aldose reductase [Oryza sativa (japonica group)] >gi|15408882|dbj|BAB64273.1| putative aldose reductase
  misc_feature (1)..(196): Homolog of NCBI NO: 30687247 NR Description: aldo/keto reductase family [Arabidopsis thaliana]
  misc_feature (1)..(169): Homolog of NCBI NO: 25283479 NR Description: probable alcohol dehydrogenase [imported] -
  misc_feature (169)..(196): Homolog of NCBI NO: 25283479 NR Description: probable alcohol dehydrogenase [imported] -
  misc_feature (1)..(196): Homolog of NCBI NO: 28393400 NR Description: putative aldo/keto reductase [Arabidopsis
  misc_feature (1)..(196): Homolog of NCBI NO: 13160397 NR Description: aldose reductase [Digitalis purpurea]
  misc_feature (1)..(196): Homolog of NCBI NO: 13160399 NR Description: aldose reductase [Digitalis purpurea]
  misc_feature (1)..(171): Homolog of NCBI NO: 7431114 NR Description: aldehyde dehydrogenase homolog At2g37770 - thaliana >gi|3236259|gb|AAC23647.1| putative alcohol
MKKGAGFGPHAVVPSDIPATWAAMEELYDAGKARAIGVSNFSSKKLADLLAVARVRPAVDQVECHPVWRQGRLRAFCASQGIHLSAYSPLGSPGTATVKAGAVLEHPAVVSAAETLGKTPAQVALRWGVQMGHSVLPKSTDEGRIRANLDVFGWSLPEDLLAKFSEIEQERLIRAGFFVDPDSVFKSIEEFWDGEI

SEQ ID NO: 8202 - protein, 173 aa, Zea mays subsp. mays
  peptide (1)..(173): Ceres Seq. ID no. 12369497
  misc_feature (1)..(173): Homolog of NCBI NO: 34908280 NR Description: putative aldose reductase [Oryza sativa (japonica group)] >gi|15408884|dbj|BAB64275.1| putative aldose reductase
  misc_feature (1)..(173): Homolog of NCBI NO: 30687261 NR Description: aldo/keto reductase family [Arabidopsis thaliana]
  misc_feature (1)..(173): Homolog of NCBI NO: 34908276 NR Description: putative aldose reductase [Oryza sativa (japonica group)] >gi|15408882|dbj|BAB64273.1| putative aldose reductase
  misc_feature (1)..(173): Homolog of NCBI NO: 30687247 NR Description: aldo/keto reductase family [Arabidopsis thaliana]
  misc_feature (1)..(146): Homolog of NCBI NO: 25283479 NR Description: probable alcohol dehydrogenase [imported] -
  misc_feature (146)..(173): Homolog of NCBI NO: 25283479 NR Description: probable alcohol dehydrogenase [imported] -
  misc_feature (1)..(173): Homolog of NCBI NO: 28393400 NR Description: putative aldo/keto reductase [Arabidopsis
  misc_feature (1)..(173): Homolog of NCBI NO: 13160397 NR Description: aldose reductase [Digitalis purpurea]
  misc_feature (1)..(173): Homolog of NCBI NO: 13160399 NR Description: aldose reductase [Digitalis purpurea]
  misc_feature (1)..(148): Homolog of NCBI NO: 7431114 NR Description: aldehyde dehydrogenase homolog At2g37770 - thaliana >gi|3236259|gb|AAC23647.1| putative alcohol
MEELYDAGKARAIGVSNFSSKKLADLLAVARVRPAVDQVECHPVWRQGRLRAFCASQGIHLSAYSPLGSPGTATVKAGAVLEHPAVVSAAETLGKTPAQVALRWGVQMGHSVLPKSTDEGRIRANLDVFGWSLPEDLLAKFSEIEQERLIRAGFFVDPDSVFKSIEEFWDGEI

SEQ ID NO: 8203 - DNA, 1100 bp, Zea mays subsp. mays
  misc_feature (1)..(1100): Ceres Seq. ID no. 12351532
  misc_feature: MA Experiment ID: 108530 Result: Down-regulated in Transcription
  misc_feature: MA Experiment 108530 PARAMETER Experiment Name: Zm_Imbibed_Seeds_P Parameter: Age (day) Value: 6 vs. 2
  misc_feature: MA Experiment 108530 PARAMETER Experiment Name: Zm_Imbibed_Seeds_P Parameter: Organism Value: Zea mays
  misc_feature: MA Experiment 108530 PARAMETER Experiment Name: Zm_Imbibed_Seeds_P Parameter: Plant Line Value: 35A19
  misc_feature: MA Experiment 108530 PARAMETER Experiment Name: Zm_Imbibed_Seeds_P Parameter: Tissue Value: Aerial vs. Embryo
  misc_feature: MA Experiment ID: 108535 Result: Up-regulated in Transcription
  misc_feature: MA Experiment 108535 PARAMETER Experiment Name: Zm_Meristem_P Parameter: Age (day) Value: 8
  misc_feature: MA Experiment 108535 PARAMETER Experiment Name: Zm_Meristem_P Parameter: Organism Value: Zea mays
  misc_feature: MA Experiment 108535 PARAMETER Experiment Name: Zm_Meristem_P Parameter: Plant Line Value: 35A19
  misc_feature: MA Experiment 108535 PARAMETER Experiment Name: Zm_Meristem_P Parameter: Tissue Value: Root Meristem vs. Above Root Meristem
  misc_feature: MA Experiment ID: 20000535 Result: Up-regulated in Transcription
  misc_feature: MA Experiment 20000535 PARAMETER Experiment Name: Zm_Hybrid_Seed_Dev_P Parameter: DAP Value: 30 vs. 12
  misc_feature: MA Experiment 20000535 PARAMETER Experiment Name: Zm_Hybrid_Seed_Dev_P Parameter: Organism Value: Zea mays
  misc_feature: MA Experiment 20000535 PARAMETER Experiment Name: Zm_Hybrid_Seed_Dev_P Parameter: Plant Line Value: 35A19
  misc_feature: MA Experiment 20000535 PARAMETER Experiment Name: Zm_Hybrid_Seed_Dev_P Parameter: Tissue Value: Embryo vs. Unfert Floret
cactcgccgcctcctccccactgcctcgtgtggccgtcgtctcccgttcggaacgccaagccccccctccggcgaaatggcccccaagcgaggtggcagggcgccggtgccggccaagaagaagacggataaagtgacgaaccctctattcgagaagaggccgaagcagttcggcatcggcggcgcgttgccgcccaagaaggacctgcaccggttcgtcaagtggcccaaggtcgtgcgtatccagcggcagcgccgcatcctcaagcagcgcctcaaggtaccaccggcgctcaaccagttcacccgcaccctcgacaagaacctcgctacgaacctgtttaagatgcttctcaagtaccggcctgaagacaaggctgccaagaaggagaggcttctgaagagggcccaagctgagaatgaaggaaaaactgttgagtcgaagaaaccaattgttgtgaagtatggccttaaccatgtgacttacctcattgagcagaacaaggctcagcttgttgtcatcgctcacgacgtggatccgatcgaacttgttgtgtggcttccagccctgtgcaggaagatggaggtcccttactgcattgttaaaggaaaggctcgccttggatcgattgttcacaagaagaatgcatcagtcttgtgtctgaccactgtcaagaacgaggataagcttgagttcagcaagatcttggaggctattaaggcaaacttcaacgacaagttcgatgaggtcaggaagaagtgaggaggtggcatcatgggatccaagtcgcaggccaagaccaaggcccgggaaaagttgctcgccaaggaggctgcgcagcggatgacctagattgtctattgtctactgctgtgtctgccctgtagtttgacggggaagaactgatgaactcgtattgtggtttttctgaatctagtttcatatgtttctgtccaccagaccatgtttagaagctttgcaagacagagttaccatgtttagaagctttgcaagacagagttacagtgtttatgtgatacctcagatccatgcagctttgcttctatttgcctaagagcaaccccaaaagtatttcatg

SEQ ID NO: 8204 - protein, 253 aa, Zea mays subsp. mays
  peptide (1)..(253): Ceres Seq. ID no. 12351533
  misc_feature (138)..(233): Pfam Name: Ribosomal protein L7Ae/L30e/S12e/Gadd45 family Pfam Description: Ribosomal protein L7Ae/L30e/S12e/Gadd45 family
  misc_feature (26)..(253): Homolog of NCBI NO: 548774 NR Description: 60S RIBOSOMAL PROTEIN L7A >gi|542158|pir||S38360
  misc_feature (26)..(253): Homolog of NCBI NO: 15229338 NR Description: 60S RIBOSOMAL PROTEIN L7A protein; protein id: supported by cDNA: 24272., supported by cDNA: gi_15529279, by cDNA: gi_16974412, supported by cDNA: gi_17065363 [Arabidopsis
  misc_feature (26)..(253): Homolog of NCBI NO: 15226635 NR Description: 60S ribosomal protein L7A; protein id: supported by cDNA: 6394., supported by cDNA: gi_14326530, by cDNA: gi_15450612 [Arabidopsis thaliana]
  misc_feature (19)..(253): Homolog of NCBI NO: 20161741 NR Description: putative 60S ribosomal protein [Oryza sativa
  misc_feature (22)..(253): Homolog of NCBI NO: 17530825 NR Description: Ribosomal protein L7A CG3314-PD
  misc_feature (22)..(253): Homolog of NCBI NO: 1173062 NR Description: 60S RIBOSOMAL PROTEIN L7A
  misc_feature (22)..(253): Homolog of NCBI NO: 4506661 NR Description: ribosomal protein L7a; 60S ribosomal protein L7a;
  misc_feature (22)..(253): Homolog of NCBI NO: 7305443 NR Description: ribosomal protein L7a; surfeit 3 [Mus musculus]
  misc_feature (22)..(253): Homolog of NCBI NO: 6094094 NR Description: 60S RIBOSOMAL PROTEIN L7A (SURFEIT LOCUS PROTEIN
  misc_feature (29)..(253): Homolog of NCBI NO: 34932126 NR Description: similar to Rpl7a protein [Rattus norvegicus]
TRRLLPTASCGRRLPFGTPSPPSGEMAPKRGGRAPVPAKKKTDKVTNPLFEKRPKQFGIGGALPPKKDLHRFVKWPKVVRIQRQRRILKQRLKVPPALNQFTRTLDKNLATNLFKMLLKYRPEDKAAKKERLLKRAQAENEGKTVESKKPIVVKYGLNHVTYLIEQNKAQLVVIAHDVDPIELVVWLPALCRKMEVPYCIVKGKARLGSIVHKKNASVLCLTTVKNEDKLEFSKILEAIKANFNDKFDEVRKK

SEQ ID NO: 8205 - protein, 228 aa, Zea mays subsp. mays
  peptide (1)..(228): Ceres Seq. ID no. 12351534
  misc_feature (113)..(208): Pfam Name: Ribosomal protein L7Ae/L30e/S12e/Gadd45 family Pfam Description: Ribosomal protein L7Ae/L30e/S12e/Gadd45 family
  misc_feature (1)..(228): Homolog of NCBI NO: 548774 NR Description: 60S RIBOSOMAL PROTEIN L7A >gi|542158|pir||S38360
  misc_feature (1)..(228): Homolog of NCBI NO: 15229338 NR Description: 60S RIBOSOMAL PROTEIN L7A protein; protein id: supported by cDNA: 24272., supported by cDNA: gi_15529279, by cDNA: gi_16974412, supported by cDNA: gi_17065363 [Arabidopsis
  misc_feature (1)..(228): Homolog of NCBI NO: 15226635 NR Description: 60S ribosomal protein L7A; protein id: supported by cDNA: 6394., supported by cDNA: gi_14326530, by cDNA: gi_15450612 [Arabidopsis thaliana]
  misc_feature (1)..(228): Homolog of NCBI NO: 20161741 NR Description: putative 60S ribosomal protein [Oryza sativa
  misc_feature (1)..(228): Homolog of NCBI NO: 17530825 NR Description: Ribosomal protein L7A CG3314-PD
  misc_feature (1)..(228): Homolog of NCBI NO: 1173062 NR Description: 60S RIBOSOMAL PROTEIN L7A
  misc_feature (1)..(228): Homolog of NCBI NO: 4506661 NR Description: ribosomal protein L7a; 60S ribosomal protein L7a;
  misc_feature (1)..(228): Homolog of NCBI NO: 7305443 NR Description: ribosomal protein L7a; surfeit 3 [Mus musculus]
  misc_feature (1)..(228): Homolog of NCBI NO: 6094094 NR Description: 60S RIBOSOMAL PROTEIN L7A (SURFEIT LOCUS PROTEIN
  misc_feature (4)..(228): Homolog of NCBI NO: 34932126 NR Description: similar to Rpl7a protein [Rattus norvegicus]
MAPKRGGRAPVPAKKKTDKVTNPLFEKRPKQFGIGGALPPKKDLHRFVKWPKVVRIQRQRRILKQRLKVPPALNQFTRTLDKNLATNLFKMLLKYRPEDKAAKKERLLKRAQAENEGKTVESKKPIVVKYGLNHVTYLIEQNKAQLVVIAHDVDPIELVVWLPALCRKMEVPYCIVKGKARLGSIVHKKNASVLCLTTVKNEDKLEFSKILEAIKANFNDKFDEVRKK

SEQ ID NO: 8206 - protein, 138 aa, Zea mays subsp. mays
  peptide (1)..(138): Ceres Seq. ID no. 12351535
  misc_feature (23)..(118): Pfam Name: Ribosomal protein L7Ae/L30e/S12e/Gadd45 family Pfam Description: Ribosomal protein L7Ae/L30e/S12e/Gadd45 family
  misc_feature (1)..(138): Homolog of NCBI NO: 548774 NR Description: 60S RIBOSOMAL PROTEIN L7A >gi|542158|pir||S38360
  misc_feature (1)..(138): Homolog of NCBI NO: 15229338 NR Description: 60S RIBOSOMAL PROTEIN L7A protein; protein id: supported by cDNA: 24272., supported by cDNA: gi_15529279, by cDNA: gi_16974412, supported by cDNA: gi_17065363 [Arabidopsis
  misc_feature (1)..(138): Homolog of NCBI NO: 15226635 NR Description: 60S ribosomal protein L7A; protein id: supported by cDNA: 6394., supported by cDNA: gi_14326530, by cDNA: gi_15450612 [Arabidopsis thaliana]
  misc_feature (1)..(138): Homolog of NCBI NO: 20161741 NR Description: putative 60S ribosomal protein [Oryza sativa
  misc_feature (1)..(138): Homolog of NCBI NO: 17530825 NR Description: Ribosomal protein L7A CG3314-PD
  misc_feature (1)..(138): Homolog of NCBI NO: 1173062 NR Description: 60S RIBOSOMAL PROTEIN L7A
  misc_feature (1)..(138): Homolog of NCBI NO: 4506661 NR Description: ribosomal protein L7a; 60S ribosomal protein L7a;
  misc_feature (1)..(138): Homolog of NCBI NO: 7305443 NR Description: ribosomal protein L7a; surfeit 3 [Mus musculus]
  misc_feature (1)..(138): Homolog of NCBI NO: 6094094 NR Description: 60S RIBOSOMAL PROTEIN L7A (SURFEIT LOCUS PROTEIN
  misc_feature (1)..(138): Homolog of NCBI NO: 34932126 NR Description: similar to Rpl7a protein [Rattus norvegicus]
MLLKYRPEDKAAKKERLLKRAQAENEGKTVESKKPIVVKYGLNHVTYLIEQNKAQLVVIAHDVDPIELVVWLPALCRKMEVPYCIVKGKARLGSIVHKKNASVLCLTTVKNEDKLEFSKILEAIKANFNDKFDEVRKK

SEQ ID NO: 8207 - DNA, 1958 bp, Zea mays subsp. mays
  misc_feature (1)..(1958): Ceres Seq. ID no. 13636500
  misc_feature: MA Experiment ID: 108534 Result: Up-regulated in Transcription
  misc_feature: MA Experiment 108534 PARAMETER Experiment Name: Zm_4deg_Cold_P Parameter: Age (hr) Value: 8
  misc_feature: MA Experiment 108534 PARAMETER Experiment Name: Zm_4deg_Cold_P Parameter: Organism Value: Zea mays
  misc_feature: MA Experiment 108534 PARAMETER Experiment Name: Zm_4deg_Cold_P Parameter: Plant Line Value: 35A19
  misc_feature: MA Experiment 108534 PARAMETER Experiment Name: Zm_4deg_Cold_P Parameter: Temperature (deg C) Value: 4 vs. 22
  misc_feature: MA Experiment 108534 PARAMETER Experiment Name: Zm_4deg_Cold_P Parameter: Timepoint (hr) Value: 6
  misc_feature: MA Experiment 108534 PARAMETER Experiment Name: Zm_4deg_Cold_P Parameter: Tissue Value: Aerial
  misc_feature: MA Experiment ID: 108535 Result: Down-regulated in Transcription
  misc_feature: MA Experiment 108535 PARAMETER Experiment Name: Zm_Meristem_P Parameter: Age (day) Value: 8
  misc_feature: MA Experiment 108535 PARAMETER Experiment Name: Zm_Meristem_P Parameter: Organism Value: Zea mays
  misc_feature: MA Experiment 108535 PARAMETER Experiment Name: Zm_Meristem_P Parameter: Plant Line Value: 35A19
  misc_feature: MA Experiment 108535 PARAMETER Experiment Name: Zm_Meristem_P Parameter: Tissue Value: Root Meristem vs. Above Root Meristem
  misc_feature: MA Experiment ID: 108556 Result: Down-regulated in Transcription
  misc_feature: MA Experiment 108556 PARAMETER Experiment Name: Zm_Drought_P Parameter: Age (day) Value: 9
  misc_feature: MA Experiment 108556 PARAMETER Experiment Name: Zm_Drought_P Parameter: Organism Value: Zea mays
  misc_feature: MA Experiment 108556 PARAMETER Experiment Name: Zm_Drought_P Parameter: Plant Line Value: 35A19
  misc_feature: MA Experiment 108556 PARAMETER Experiment Name: Zm_Drought_P Parameter: Timepoint (hr) Value: 24
  misc_feature: MA Experiment 108556 PARAMETER Experiment Name: Zm_Drought_P Parameter: Tissue Value: Aerial
  misc_feature: MA Experiment 108556 PARAMETER Experiment Name: Zm_Drought_P Parameter: Treatment Value: Drought vs. No Drought
  misc_feature: MA Experiment ID: 20000479 Result: Down-regulated in Transcription
  misc_feature: MA Experiment 20000479 PARAMETER Experiment Name: Zm_Drought_P Parameter: Age (day) Value: 10
  misc_feature: MA Experiment 20000479 PARAMETER Experiment Name: Zm_Drought_P Parameter: Organism Value: Zea mays
  misc_feature: MA Experiment 20000479 PARAMETER Experiment Name: Zm_Drought_P Parameter: Plant Line Value: 35A19
  misc_feature: MA Experiment 20000479 PARAMETER Experiment Name: Zm_Drought_P Parameter: Timepoint (hr) Value: 48
  misc_feature: MA Experiment 20000479 PARAMETER Experiment Name: Zm_Drought_P Parameter: Tissue Value: Aerial
  misc_feature: MA Experiment 20000479 PARAMETER Experiment Name: Zm_Drought_P Parameter: Treatment Value: Drought vs. No Drought
  misc_feature: MA Experiment ID: 20000480 Result: Down-regulated in Transcription
  misc_feature: MA Experiment 20000480 PARAMETER Experiment Name: Zm_Drought_P Parameter: Age (day) Value: 11
  misc_feature: MA Experiment 20000480 PARAMETER Experiment Name: Zm_Drought_P Parameter: Organism Value: Zea mays
  misc_feature: MA Experiment 20000480 PARAMETER Experiment Name: Zm_Drought_P Parameter: Plant Line Value: 35A19
  misc_feature: MA Experiment 20000480 PARAMETER Experiment Name: Zm_Drought_P Parameter: Timepoint (hr) Value: 72
  misc_feature: MA Experiment 20000480 PARAMETER Experiment Name: Zm_Drought_P Parameter: Tissue Value: Aerial
  misc_feature: MA Experiment 20000480 PARAMETER Experiment Name: Zm_Drought_P Parameter: Treatment Value: Drought vs. No Drought
  misc_feature: MA Experiment ID: 20000535 Result: Down-regulated in Transcription
  misc_feature: MA Experiment 20000535 PARAMETER Experiment Name: Zm_Hybrid_Seed_Dev_P Parameter: DAP Value: 30 vs. 12
  misc_feature: MA Experiment 20000535 PARAMETER Experiment Name: Zm_Hybrid_Seed_Dev_P Parameter: Organism Value: Zea mays
  misc_feature: MA Experiment 20000535 PARAMETER Experiment Name: Zm_Hybrid_Seed_Dev_P Parameter: Plant Line Value: 35A19
  misc_feature: MA Experiment 20000535 PARAMETER Experiment Name: Zm_Hybrid_Seed_Dev_P Parameter: Tissue Value: Embryo vs. Unfert Floret
aaccaacaaatcgacctagctaggcacaagagcgctagacgccgcagcgcagcacgcaccacccaccgagcggcggcggaggcagggcaatccgcaggaagcagaggccgcgcgcgcaggcatgggcgcgccggtgcacggcgccctcgacttgttcctcctgctcctggtgggggcaggggcggcgcccgaggtgacggcgccgcangaacccacattgccagccaccggctccggcgctaccggngcagcggcggtcggagtcaactccaactccgtgctggtggcgctgctggattcgcactacacggagctggcggaactggtggagaaggcgctgctcctgcagacgctggaggacgccgtcgggaagcacaacgtcaccatcttcgcgccgcggaacgaggcgctggagcgggacctggatccggagttcaagcgcttcctgctggagccgcgcaacctcaggtcgctgcaggcgctgctgctctaccacgtcctcccctcgcgcctgccctccgactcctggcccgcggcgtcccaccccacgctgtccggcgaggaggtcgagctcgcccccgccgccggcgccggcatgcgcgtcggccacgccgccgtcacgcgcccggacgccgtgctcaggcccgacggggtcatccacggcatcgagcgcctcctcgtgcccgcgctccgtgcaggaggacttcaaccgccgccgcagcctcgcggcgatctcggccgtgctgcccacgggcgcgcccgaggtggacccgcggacgcaccgcctcaagaagcccgcgccgccggttccccccggcgcgccccccgtgctccccgtctgggacgccatggcgcccggcccctccatcgcccccgcgccggcgcctggcccgggctccgggaagcaccacttcgacgggcacagccaggtcaaggacttcatccagacgctgctcctctacggcggctacaacgagctcgccgacatcctcgtcaacctcacctccctcgccaccgagatgggccgcctcgtctccgagggctacgtcctcaccgtgctcgcccccaacgacgaggccatggcgcgcctcaccacggaccagctcagcgagcccggctcgcccgagaacatcctctactaccacatgatccccgagtaccagaccgaggagtccatgtacaacgccgtgcgccgcttcggcaaggtgcgctacgacacgctgcgcctgccgcacaaggtcgtggcgcgggaggccgacggctccgtcaagttcggccagggcgagggctccgcctacctcttcgacccggacatctacaccgacgggaggatctccgtgcagggcatcgacgccgtgctgttcgcgccggacgacaccaaggccacgcagacagccgaccctaacaggaagcctcccgccatcgtcacccacaagaagaagatcaagctccggcgaggcaagttgttagaggcgacgtgccagatggccgggctcttcggtcagcgatcgcgattcgcgagctgccagtagacggagaaaggatctgttgatctccacgacaccgaaagacgaacgaacgaactgatgggctgccgcaggaggagggggagccgtccacattattgcttgtattttttttcactcttttgtttattgttgagaataataatgaatcaggtgggggatgtaaactctgtgggttgttgttggtgtgtcgtccagatggggaaaaaaatgagaaaaagaaaggcagccaaaaaaaattgtccatacatgaatgaagaagcccaggatcgttgtctttgtataggagaaggaattgaaaccttttgttttttctttttctgccattctttgcttctgttcccgttttgacaatgagaaatatcgggtaaacacacaatcattcttacttattatccattttccttcttttttatatatggtttttcgtcg

SEQ ID NO: 8208 - protein, 427 aa, Zea mays subsp. mays
  peptide (1)..(427): Ceres Seq. ID no. 13636501
  misc_feature (1)..(188): Homolog of NCBI NO: 27819499 NR Description: putative arabinogalactan-protein [Oryza sativa
  misc_feature (11)..(274): Homolog of NCBI NO: 33146739 NR Description: GPI-anchored protein -like [Oryza sativa
  misc_feature (11)..(274): Homolog of NCBI NO: 34899886 NR Description: OJ1714_H10.26 [Oryza sativa (japonica
  misc_feature (1)..(274): Homolog of NCBI NO: 15240029 NR Description: expressed protein [Arabidopsis thaliana] gb|AAF02137.1~gene_id:MHF15.9~strong similarity to unknown
  misc_feature (48)..(272): Homolog of NCBI NO: 25370583 NR Description: hypothetical protein At2g35860 [imported] - thaliana >gi|4510383|gb|AAD21471.1| unknown protein [Arabidopsis
  misc_feature (48)..(272): Homolog of NCBI NO: 30686588 NR Description: expressed protein [Arabidopsis thaliana] unknown protein [Arabidopsis thaliana]
  misc_feature (35)..(279): Homolog of NCBI NO: 6041822 NR Description: unknown protein [Arabidopsis thaliana]
  misc_feature (35)..(279): Homolog of NCBI NO: 18399319 NR Description: expressed protein [Arabidopsis thaliana] unknown protein [Arabidopsis thaliana] AT3g11700/T19F11_10 [Arabidopsis thaliana]
  misc_feature (48)..(274): Homolog of NCBI NO: 15231197 NR Description: predicted GPI-anchored protein [Arabidopsis
  misc_feature (200)..(427): Homolog of NCBI NO: 23018055 NR Description: hypothetical protein [Thermobifida fusca]
  misc_feature (1)..(188): Homolog of NCBI NO: 27819499 NR Description: putative arabinogalactan-protein [Oryza sativa
  misc_feature (11)..(274): Homolog of NCBI NO: 33146739 NR Description: GPI-anchored protein -like [Oryza sativa
  misc_feature (11)..(274): Homolog of NCBI NO: 34899886 NR Description: OJ1714_H10.26 [Oryza sativa (japonica
  misc_feature (1)..(274): Homolog of NCBI NO: 15240029 NR Description: expressed protein [Arabidopsis thaliana] gb|AAF02137.1~gene_id:MHF15.9~strong similarity to unknown
  misc_feature (48)..(272): Homolog of NCBI NO: 25370583 NR Description: hypothetical protein At2g35860 [imported] - thaliana >gi|4510383|gb|AAD21471.1| unknown protein [Arabidopsis
  misc_feature (48)..(272): Homolog of NCBI NO: 30686588 NR Description: expressed protein [Arabidopsis thaliana] unknown protein [Arabidopsis thaliana]
  misc_feature (35)..(279): Homolog of NCBI NO: 6041822 NR Description: unknown protein [Arabidopsis thaliana]
  misc_feature (35)..(279): Homolog of NCBI NO: 18399319 NR Description: expressed protein [Arabidopsis thaliana] unknown protein [Arabidopsis thaliana] AT3g11700/T19F11_10 [Arabidopsis thaliana]
  misc_feature (48)..(274): Homolog of NCBI NO: 15231197 NR Description: predicted GPI-anchored protein [Arabidopsis
  misc_feature (200)..(427): Homolog of NCBI NO: 23018055 NR Description: hypothetical protein [Thermobifida fusca]
  misc_feature (29)..(29): Xaa is any aa, unknown or other
  misc_feature (42)..(42): Xaa is any aa, unknown or other
MGAPVHGALDLFLLLLVGAGAAPEVTAPXEPTLPATGSGATXAAAVGVNSNSVLVALLDSHYTELAELVEKALLLQTLEDAVGKHNVTIFAPRNEALERDLDPEFKRFLLEPRNLRSLQALLLYHVLPSRLPSDSWPAASHPTLSGEEVELAPAAGAGMRVGHAAVTRPDAVLRPDGVIHGIERLLVPALRAGGLQPPPQPRGDLGRAAHGRARGGPADAPPQEARAAGSPRRAPRAPRLGRHGARPLHRPRAGAWPGLREAPLRRAQPGQGLHPDAAPLRRLQRARRHPRQPHLPRHRDGPPRLRGLRPHRARPQRRGHGAPHHGPAQRARLAREHPLLPHDPRVPDRGVHVQRRAPLRQGALRHAAPAAQGRGAGGRRLRQVRPGRGLRLPLRPGHLHRREDLRAGHRRRAVRAGRHQGHADSRP

SEQ ID NO: 8209 - protein, 382 aa, Zea mays subsp. mays
  peptide (1)..(382): Ceres Seq. ID no. 13636502
  misc_feature (299)..(382): Pfam Name: Equine herpesvirus glycoprotein gp2 Pfam Description: Equine herpesvirus glycoprotein gp2
  misc_feature (299)..(382): Pfam Name: Equine herpesvirus glycoprotein gp2 Pfam Description: Equine herpesvirus glycoprotein gp2
  misc_feature (13)..(382): Homolog of NCBI NO: 29247944 NR Description: GLP_26_54603_52153 [Giardia lamblia ATCC 50803]
  misc_feature (164)..(382): Homolog of NCBI NO: 39592411 NR Description: Hypothetical protein CBG07956 [Caenorhabditis
  misc_feature (115)..(382): Homolog of NCBI NO: 25143299 NR Description: pre-mRNA splicing SR protein related RSR-1 (68.2
  misc_feature (2)..(382): Homolog of NCBI NO: 30424862 NR Description: RIKEN cDNA 5033413A03 [Mus musculus]
  misc_feature (3)..(382): Homolog of NCBI NO: 11360494 NR Description: antifreeze glycopeptide AFGP polyprotein precursor
  misc_feature (164)..(382): Homolog of NCBI NO: 39592411 NR Description: Hypothetical protein CBG07956 [Caenorhabditis
  misc_feature (2)..(382): Homolog of NCBI NO: 30424862 NR Description: RIKEN cDNA 5033413A03 [Mus musculus]
  misc_feature (220)..(382): Homolog of NCBI NO: 28574039 NR Description: Salivary gland secretion 1 CG3047-PA [Drosophila
  misc_feature (15)..(382): Homolog of NCBI NO: 5821143 NR Description: RNA binding protein [Homo sapiens]
  misc_feature (15)..(382): Homolog of NCBI NO: 5821145 NR Description: RNA binding protein [Homo sapiens]
  misc_feature (164)..(382): Homolog of NCBI NO: 11360318 NR Description: probable mucin DKFZp434C196.1 - human (fragment)
  misc_feature (261)..(382): Homolog of NCBI NO: 6322209 NR Description: Required for invasion and pseudohyphae formation response to nitrogen starvation; Muc1p [Saccharomyces cerevisiae] Glucoamylase S1/S2 precursor sta1, len: 1367, CAI: 0.3,
  misc_feature (3)..(382): Homolog of NCBI NO: 11360494 NR Description: antifreeze glycopeptide AFGP polyprotein precursor
  misc_feature (115)..(382): Homolog of NCBI NO: 25143299 NR Description: pre-mRNA splicing SR protein related RSR-1 (68.2
  misc_feature (13)..(382): Homolog of NCBI NO: 29247944 NR Description: GLP_26_54603_52153 [Giardia lamblia ATCC 50803]
  misc_feature (261)..(382): Homolog of NCBI NO: 6322209 NR Description: Required for invasion and pseudohyphae formation response to nitrogen starvation; Muc1p [Saccharomyces cerevisiae] Glucoamylase S1/S2 precursor sta1, len: 1367, CAI: 0.3,
  misc_feature (164)..(382): Homolog of NCBI NO: 11360318 NR Description: probable mucin DKFZp434C196.1 - human (fragment)
  misc_feature (15)..(382): Homolog of NCBI NO: 5821145 NR Description: RNA binding protein [Homo sapiens]
  misc_feature (15)..(382): Homolog of NCBI NO: 5821143 NR Description: RNA binding protein [Homo sapiens]
  misc_feature (220)..(382): Homolog of NCBI NO: 28574039 NR Description: Salivary gland secretion 1 CG3047-PA [Drosophila
  misc_feature (70)..(70): Xaa is any aa, unknown or other
  misc_feature (83)..(83): Xaa is any aa, unknown or other
NQQIDLARHKSARRRSAARTTHRAAAEAGQSAGSRGRARRHGRAGARRPRLVPPAPGGGRGGARGDGAAXTHIASHRLRRYRXSGGRSQLQLRAGGAAGFALHGAGGTGGEGAAPADAGGRRREAQRHHLRAAERGAGAGPGSGVQALPAGAAQPQVAAGAAALPRPPLAPALRLLARGVPPHAVRRGGRARPRRRRRHARRPRRRHAPGRRAQARRGHPRHRAPPRARAPCRRTSTAAAASRRSRPCCPRARPRWTRGRTASRSPRRRFPPARPPCSPSGTPWRPAPPSPPRRRLARAPGSTTSTGTARSRTSSRRCSSTAATTSSPTSSSTSPPSPPRWAASSPRATSSPCSPPTTRPWRASPRTSSASPARPRTSSTTT

SEQ ID NO: 8210 - protein, 269 aa, Zea mays subsp. mays
  peptide (1)..(269): Ceres Seq. ID no. 13636503
  misc_feature (1)..(30): Homolog of NCBI NO: 27819499 NR Description: putative arabinogalactan-protein [Oryza sativa
  misc_feature (1)..(116): Homolog of NCBI NO: 33146739 NR Description: GPI-anchored protein -like [Oryza sativa
  misc_feature (1)..(116): Homolog of NCBI NO: 34899886 NR Description: OJ1714_H10.26 [Oryza sativa (japonica
  misc_feature (1)..(116): Homolog of NCBI NO: 15240029 NR Description: expressed protein [Arabidopsis thaliana] gb|AAF02137.1~gene_id:MHF15.9~strong similarity to unknown
  misc_feature (1)..(114): Homolog of NCBI NO: 25370583 NR Description: hypothetical protein At2g35860 [imported] - thaliana >gi|4510383|gb|AAD21471.1| unknown protein [Arabidopsis
  misc_feature (1)..(114): Homolog of NCBI NO: 30686588 NR Description: expressed protein [Arabidopsis thaliana] unknown protein [Arabidopsis thaliana]
  misc_feature (1)..(121): Homolog of NCBI NO: 6041822 NR Description: unknown protein [Arabidopsis thaliana]
  misc_feature (1)..(121): Homolog of NCBI NO: 18399319 NR Description: expressed protein [Arabidopsis thaliana] unknown protein [Arabidopsis thaliana] AT3g11700/T19F11_10 [Arabidopsis thaliana]
  misc_feature (1)..(116): Homolog of NCBI NO: 15231197 NR Description: predicted GPI-anchored protein [Arabidopsis
  misc_feature (42)..(269): Homolog of NCBI NO: 23018055 NR Description: hypothetical protein [Thermobifida fusca]
  misc_feature (1)..(114): Homolog of NCBI NO: 30686588 NR Description: expressed protein [Arabidopsis thaliana] unknown protein [Arabidopsis thaliana]
  misc_feature (1)..(121): Homolog of NCBI NO: 6041822 NR Description: unknown protein [Arabidopsis thaliana]
  misc_feature (1)..(121): Homolog of NCBI NO: 18399319 NR Description: expressed protein [Arabidopsis thaliana] unknown protein [Arabidopsis thaliana] AT3g11700/T19F11_10 [Arabidopsis thaliana]
  misc_feature (1)..(116): Homolog of NCBI NO: 15231197 NR Description: predicted GPI-anchored protein [Arabidopsis
  misc_feature (42)..(269): Homolog of NCBI NO: 23018055 NR Description: hypothetical protein [Thermobifida fusca]
  misc_feature (1)..(30): Homolog of NCBI NO: 27819499 NR Description: putative arabinogalactan-protein [Oryza sativa
  misc_feature (1)..(116): Homolog of NCBI NO: 33146739 NR Description: GPI-anchored protein -like [Oryza sativa
  misc_feature (1)..(116): Homolog of NCBI NO: 34899886 NR Description: OJ1714_H10.26 [Oryza sativa (japonica
  misc_feature (1)..(116): Homolog of NCBI NO: 15240029 NR Description: expressed protein [Arabidopsis thaliana] gb|AAF02137.1~gene_id:MHF15.9~strong similarity to unknown
  misc_feature (1)..(114): Homolog of NCBI NO: 25370583 NR Description: hypothetical protein At2g35860 [imported] - thaliana >gi|4510383|gb|AAD21471.1| unknown protein [Arabidopsis
MRVGHAAVTRPDAVLRPDGVIHGIERLLVPALRAGGLQPPPQPRGDLGRAAHGRARGGPADAPPQEARAAGSPRRAPRAPRLGRHGARPLHRPRAGAWPGLREAPLRRAQPGQGLHPDAAPLRRLQRARRHPRQPHLPRHRDGPPRLRGLRPHRARPQRRGHGAPHHGPAQRARLAREHPLLPHDPRVPDRGVHVQRRAPLRQGALRHAAPAAQGRGAGGRRLRQVRPGRGLRLPLRPGHLHRREDLRAGHRRRAVRAGRHQGHADSRP

SEQ ID NO: 8211 - DNA, 1213 bp, Zea mays subsp. mays
  misc_feature (1)..(1213): Ceres Seq. ID no. 12365777
  misc_feature: MA Experiment ID: 108504 Result: Down-regulated in Transcription
  misc_feature: MA Experiment 108504 PARAMETER Experiment Name: Zm_Drought_P Parameter: Age (day) Value: 8
  misc_feature: MA Experiment 108504 PARAMETER Experiment Name: Zm_Drought_P Parameter: Organism Value: Zea mays
  misc_feature: MA Experiment 108504 PARAMETER Experiment Name: Zm_Drought_P Parameter: Plant Line Value: 35A19
  misc_feature: MA Experiment 108504 PARAMETER Experiment Name: Zm_Drought_P Parameter: Timepoint (hr) Value: 12
  misc_feature: MA Experiment 108504 PARAMETER Experiment Name: Zm_Drought_P Parameter: Tissue Value: Aerial
  misc_feature: MA Experiment 108504 PARAMETER Experiment Name: Zm_Drought_P Parameter: Treatment Value: Drought vs. No Drought
  misc_feature: MA Experiment ID: 108522 Result: Down-regulated in Transcription
  misc_feature: MA Experiment 108522 PARAMETER Experiment Name: Zm_42deg_Heat_P Parameter: Age (day) Value: 8
  misc_feature: MA Experiment 108522 PARAMETER Experiment Name: Zm_42deg_Heat_P Parameter: Organism Value: Zea mays
  misc_feature: MA Experiment 108522 PARAMETER Experiment Name: Zm_42deg_Heat_P Parameter: Plant Line Value: 35A19
  misc_feature: MA Experiment 108522 PARAMETER Experiment Name: Zm_42deg_Heat_P Parameter: Temperature (deg C) Value: 42 vs. 22
  misc_feature: MA Experiment 108522 PARAMETER Experiment Name: Zm_42deg_Heat_P Parameter: Timepoint (hr) Value: 1
  misc_feature: MA Experiment 108522 PARAMETER Experiment Name: Zm_42deg_Heat_P Parameter: Tissue Value: Aerial
  misc_feature: MA Experiment ID: 108527 Result: Down-regulated in Transcription
  misc_feature: MA Experiment 108527 PARAMETER Experiment Name: Zm_5mM_NO_P Parameter: Age (day) Value: 8
  misc_feature: MA Experiment 108527 PARAMETER Experiment Name: Zm_5mM_NO_P Parameter: Organism Value: Zea mays
  misc_feature: MA Experiment 108527 PARAMETER Experiment Name: Zm_5mM_NO_P Parameter: Plant Line Value: 35A19
  misc_feature: MA Experiment 108527 PARAMETER Experiment Name: Zm_5mM_NO_P Parameter: Timepoint (hr) Value: 6
  misc_feature: MA Experiment 108527 PARAMETER Experiment Name: Zm_5mM_NO_P Parameter: Tissue Value: Aerial
  misc_feature: MA Experiment 108527 PARAMETER Experiment Name: Zm_5mM_NO_P Parameter: Treatment Value: 5mM NO vs. No Treatment
  misc_feature: MA Experiment ID: 108529 Result: Up-regulated in Transcription
  misc_feature: MA Experiment 108529 PARAMETER Experiment Name: Zm_Imbibed_Seeds_P Parameter: Age (day) Value: 5 vs. 2
  misc_feature: MA Experiment 108529 PARAMETER Experiment Name: Zm_Imbibed_Seeds_P Parameter: Organism Value: Zea mays
  misc_feature: MA Experiment 108529 PARAMETER Experiment Name: Zm_Imbibed_Seeds_P Parameter: Plant Line Value: 35A19
  misc_feature: MA Experiment 108529 PARAMETER Experiment Name: Zm_Imbibed_Seeds_P Parameter: Tissue Value: Roots vs. Embryo
  misc_feature: MA Experiment ID: 108535 Result: Down-regulated in Transcription
  misc_feature: MA Experiment 108535 PARAMETER Experiment Name: Zm_Meristem_P Parameter: Age (day) Value: 8
  misc_feature: MA Experiment 108535 PARAMETER Experiment Name: Zm_Meristem_P Parameter: Organism Value: Zea mays
  misc_feature: MA Experiment 108535 PARAMETER Experiment Name: Zm_Meristem_P Parameter: Plant Line Value: 35A19
  misc_feature: MA Experiment 108535 PARAMETER Experiment Name: Zm_Meristem_P Parameter: Tissue Value: Root Meristem vs. Above Root Meristem
  misc_feature: MA Experiment ID: 108540 Result: Down-regulated in Transcription
  misc_feature: MA Experiment 108540 PARAMETER Experiment Name: Zm_20percent_PEG_P Parameter: Age (day) Value: 8
  misc_feature: MA Experiment 108540 PARAMETER Experiment Name: Zm_20percent_PEG_P Parameter: Organism Value: Zea mays
  misc_feature: MA Experiment 108540 PARAMETER Experiment Name: Zm_20percent_PEG_P Parameter: Plant Line Value: 35A19
  misc_feature: MA Experiment 108540 PARAMETER Experiment Name: Zm_20percent_PEG_P Parameter: Timepoint (hr) Value: 6
  misc_feature: MA Experiment 108540 PARAMETER Experiment Name: Zm_20percent_PEG_P Parameter: Tissue Value: Aerial
  misc_feature: MA Experiment 108540 PARAMETER Experiment Name: Zm_20percent_PEG_P Parameter: Treatment Value: 20percent PEG vs. No Treatment
  misc_feature: MA Experiment ID: 108543 Result: Up-regulated in Transcription
  misc_feature: MA Experiment ID: 108544 Result: Up-regulated in Transcription
  misc_feature: MA Experiment ID: 108556 Result: Down-regulated in Transcription
  misc_feature: MA Experiment 108556 PARAMETER Experiment Name: Zm_Drought_P Parameter: Age (day) Value: 9
  misc_feature: MA Experiment 108556 PARAMETER Experiment Name: Zm_Drought_P Parameter: Organism Value: Zea mays
  misc_feature: MA Experiment 108556 PARAMETER Experiment Name: Zm_Drought_P Parameter: Plant Line Value: 35A19
  misc_feature: MA Experiment 108556 PARAMETER Experiment Name: Zm_Drought_P Parameter: Timepoint (hr) Value: 24
  misc_feature: MA Experiment 108556 PARAMETER Experiment Name: Zm_Drought_P Parameter: Tissue Value: Aerial
  misc_feature: MA Experiment 108556 PARAMETER Experiment Name: Zm_Drought_P Parameter: Treatment Value: Drought vs. No Drought
  misc_feature: MA Experiment ID: 108559 Result: Down-regulated in Transcription
  misc_feature: MA Experiment 108559 PARAMETER Experiment Name: Zm_5mM_NO_P Parameter: Age (day) Value: 8
  misc_feature: MA Experiment 108559 PARAMETER Experiment Name: Zm_5mM_NO_P Parameter: Organism Value: Zea mays
  misc_feature: MA Experiment 108559 PARAMETER Experiment Name: Zm_5mM_NO_P Parameter: Plant Line Value: 35A19
  misc_feature: MA Experiment 108559 PARAMETER Experiment Name: Zm_5mM_NO_P Parameter: Timepoint (hr) Value: 12
  misc_feature: MA Experiment 108559 PARAMETER Experiment Name: Zm_5mM_NO_P Parameter: Tissue Value: Aerial
  misc_feature: MA Experiment 108559 PARAMETER Experiment Name: Zm_5mM_NO_P Parameter: Treatment Value: 5mM NO vs. No Treatment
  misc_feature: MA Experiment ID: 108687 Result: Down-regulated in Transcription
  misc_feature: MA Experiment 108687 PARAMETER Experiment Name: Zm_Embryos-Flowers__P Parameter: Tissue Value: Embryo vs. Aerial+
  misc_feature: MA Experiment ID: 108688 Result: Down-regulated in Transcription
  misc_feature: MA Experiment 108688 PARAMETER Experiment Name: Zm_Embryos-Flowers__P Parameter: Tissue Value: Immature Flowers vs. Aerial+
  misc_feature: MA Experiment ID: 108689 Result: Down-regulated in Transcription
  misc_feature: MA Experiment 108689 PARAMETER Experiment Name: Zm_Drought_Roots_P Parameter: Age (day) Value: 9
  misc_feature: MA Experiment 108689 PARAMETER Experiment Name: Zm_Drought_Roots_P Parameter: Organism Value: Zea mays
  misc_feature: MA Experiment 108689 PARAMETER Experiment Name: Zm_Drought_Roots_P Parameter: Plant Line Value: 35A19
  misc_feature: MA Experiment 108689 PARAMETER Experiment Name: Zm_Drought_Roots_P Parameter: Timepoint (hr) Value: 24
  misc_feature: MA Experiment 108689 PARAMETER Experiment Name: Zm_Drought_Roots_P Parameter: Tissue Value: Roots
  misc_feature: MA Experiment 108689 PARAMETER Experiment Name: Zm_Drought_Roots_P Parameter: Treatment Value: Drought vs. No Drought
  misc_feature: MA Experiment ID: 20000477 Result: Down-regulated in Transcription
  misc_feature: MA Experiment 20000477 PARAMETER Experiment Name: Zm_5mM_SA_P Parameter: Age (day) Value: 10
  misc_feature: MA Experiment 20000477 PARAMETER Experiment Name: Zm_5mM_SA_P Parameter: Organism Value: Zea mays
  misc_feature: MA Experiment 20000477 PARAMETER Experiment Name: Zm_5mM_SA_P Parameter: Plant Line Value: 35A19
  misc_feature: MA Experiment 20000477 PARAMETER Experiment Name: Zm_5mM_SA_P Parameter: Timepoint (hr) Value: 48
  misc_feature: MA Experiment 20000477 PARAMETER Experiment Name: Zm_5mM_SA_P Parameter: Tissue Value: Aerial
  misc_feature: MA Experiment 20000477 PARAMETER Experiment Name: Zm_5mM_SA_P Parameter: Treatment Value: 5mM SA vs. No Treatment
  misc_feature: MA Experiment ID: 20000480 Result: Down-regulated in Transcription
  misc_feature: MA Experiment 20000480 PARAMETER Experiment Name: Zm_Drought_P Parameter: Age (day) Value: 11
  misc_feature: MA Experiment 20000480 PARAMETER Experiment Name: Zm_Drought_P Parameter: Organism Value: Zea mays
  misc_feature: MA Experiment 20000480 PARAMETER Experiment Name: Zm_Drought_P Parameter: Plant Line Value: 35A19
  misc_feature: MA Experiment 20000480 PARAMETER Experiment Name: Zm_Drought_P Parameter: Timepoint (hr) Value: 72
  misc_feature: MA Experiment 20000480 PARAMETER Experiment Name: Zm_Drought_P Parameter: Tissue Value: Aerial
  misc_feature: MA Experiment 20000480 PARAMETER Experiment Name: Zm_Drought_P Parameter: Treatment Value: Drought vs. No Drought
  misc_feature: MA Experiment ID: 20000487 Result: Down-regulated in Transcription
  misc_feature: MA Experiment 20000487 PARAMETER Experiment Name: Zm_50mM_NH4NO3_L_to_H_P Parameter: Organism Value: Zea mays
  misc_feature: MA Experiment 20000487 PARAMETER Experiment Name: Zm_50mM_NH4NO3_L_to_H_P Parameter: Timepoint (hr) Value: 4
  misc_feature: MA Experiment 20000487 PARAMETER Experiment Name: Zm_50mM_NH4NO3_L_to_H_P Parameter: Tissue Value: Leaves
  misc_feature: MA Experiment 20000487 PARAMETER Experiment Name: Zm_50mM_NH4NO3_L_to_H_P Parameter: Treatment Value: 50mM NH4NO3 vs. 100mM Mannitol
  misc_feature: MA Experiment ID: 20000488 Result: Down-regulated in Transcription
  misc_feature: MA Experiment 20000488 PARAMETER Experiment Name: Zm_50mM_NH4NO3_L_to_H_P Parameter: Organism Value: Zea mays
  misc_feature: MA Experiment 20000488 PARAMETER Experiment Name: Zm_50mM_NH4NO3_L_to_H_P Parameter: Timepoint (hr) Value: 8
  misc_feature: MA Experiment 20000488 PARAMETER Experiment Name: Zm_50mM_NH4NO3_L_to_H_P Parameter: Tissue Value: Leaves
  misc_feature: MA Experiment 20000488 PARAMETER Experiment Name: Zm_50mM_NH4NO3_L_to_H_P Parameter: Treatment Value: 50mM NH4NO3 vs. 100mM Mannitol
  misc_feature: MA Experiment ID: 20000535 Result: Down-regulated in Transcription
  misc_feature: MA Experiment 20000535 PARAMETER Experiment Name: Zm_Hybrid_Seed_Dev_P Parameter: DAP Value: 30 vs. 12
  misc_feature: MA Experiment 20000535 PARAMETER Experiment Name: Zm_Hybrid_Seed_Dev_P Parameter: Organism Value: Zea mays
  misc_feature: MA Experiment 20000535 PARAMETER Experiment Name: Zm_Hybrid_Seed_Dev_P Parameter: Plant Line Value: 35A19
  misc_feature: MA Experiment 20000535 PARAMETER Experiment Name: Zm_Hybrid_Seed_Dev_P Parameter: Tissue Value: Embryo vs. Unfert Floret
  misc_feature: MA Experiment ID: 20001606 Result: Down-regulated in Transcription
  misc_feature: MA Experiment 20001606 PARAMETER Experiment Name: Zm_50ppm_KNO3_L-to-H_P Parameter: Age (day) Value: 19
  misc_feature: MA Experiment 20001606 PARAMETER Experiment Name: Zm_50ppm_KNO3_L-to-H_P Parameter: Organism Value: Zea mays
  misc_feature: MA Experiment 20001606 PARAMETER Experiment Name: Zm_50ppm_KNO3_L-to-H_P Parameter: Plant Line Value: 35A19
  misc_feature: MA Experiment 20001606 PARAMETER Experiment Name: Zm_50ppm_KNO3_L-to-H_P Parameter: Timepoint (hr) Value: 8
  misc_feature: MA Experiment 20001606 PARAMETER Experiment Name: Zm_50ppm_KNO3_L-to-H_P Parameter: Tissue Value: Shoots
  misc_feature: MA Experiment 20001606 PARAMETER Experiment Name: Zm_50ppm_KNO3_L-to-H_P Parameter: Treatment Value: 50ppm KNO3 vs. 50ppm KCl
  misc_feature: MA Experiment ID: 20001608 Result: Down-regulated in Transcription
  misc_feature: MA Experiment 20001608 PARAMETER Experiment Name: Zm_50ppm_KNO3_L-to-H_P Parameter: Age (day) Value: 21
  misc_feature: MA Experiment 20001608 PARAMETER Experiment Name: Zm_50ppm_KNO3_L-to-H_P Parameter: Organism Value: Zea mays
  misc_feature: MA Experiment 20001608 PARAMETER Experiment Name: Zm_50ppm_KNO3_L-to-H_P Parameter: Plant Line Value: 35A19
  misc_feature: MA Experiment 20001608 PARAMETER Experiment Name: Zm_50ppm_KNO3_L-to-H_P Parameter: Timepoint (hr) Value: 48
  misc_feature: MA Experiment 20001608 PARAMETER Experiment Name: Zm_50ppm_KNO3_L-to-H_P Parameter: Tissue Value: Shoots
  misc_feature: MA Experiment 20001608 PARAMETER Experiment Name: Zm_50ppm_KNO3_L-to-H_P Parameter: Treatment Value: 50ppm KNO3 vs. 50ppm KCl
  misc_feature: MA Experiment ID: 20001610 Result: Down-regulated in Transcription
  misc_feature: MA Experiment 20001610 PARAMETER Experiment Name: Zm_50ppm_KNO3_L-to-H_P Parameter: Age (day) Value: 19
  misc_feature: MA Experiment 20001610 PARAMETER Experiment Name: Zm_50ppm_KNO3_L-to-H_P Parameter: Organism Value: Zea mays
  misc_feature: MA Experiment 20001610 PARAMETER Experiment Name: Zm_50ppm_KNO3_L-to-H_P Parameter: Plant Line Value: 35A19
  misc_feature: MA Experiment 20001610 PARAMETER Experiment Name: Zm_50ppm_KNO3_L-to-H_P Parameter: Timepoint (hr) Value: 2
  misc_feature: MA Experiment 20001610 PARAMETER Experiment Name: Zm_50ppm_KNO3_L-to-H_P Parameter: Tissue Value: Roots
  misc_feature: MA Experiment 20001610 PARAMETER Experiment Name: Zm_50ppm_KNO3_L-to-H_P Parameter: Treatment Value: 50ppm KNO3 vs. 50ppm KCl
  misc_feature: MA Experiment ID: 20001613 Result: Down-regulated in Transcription
  misc_feature: MA Experiment 20001613 PARAMETER Experiment Name: Zm_50ppm_KNO3_L-to-H_P Parameter: Age (day) Value: 20
  misc_feature: MA Experiment 20001613 PARAMETER Experiment Name: Zm_50ppm_KNO3_L-to-H_P Parameter: Organism Value: Zea mays
  misc_feature: MA Experiment 20001613 PARAMETER Experiment Name: Zm_50ppm_KNO3_L-to-H_P Parameter: Plant Line Value: 35A19
  misc_feature: MA Experiment 20001613 PARAMETER Experiment Name: Zm_50ppm_KNO3_L-to-H_P Parameter: Timepoint (hr) Value: 24
  misc_feature: MA Experiment 20001613 PARAMETER Experiment Name: Zm_50ppm_KNO3_L-to-H_P Parameter: Tissue Value: Roots
  misc_feature: MA Experiment 20001613 PARAMETER Experiment Name: Zm_50ppm_KNO3_L-to-H_P Parameter: Treatment Value: 50ppm KNO3 vs. 50ppm KCl
attaacaaagcacccatcccttcaacaaaccttgagttgggagagagagagagagaggagaggaggcaacaagaggcacgaacaaacagaggcaaaccggctcacgcctgtctcggtgcggtggccggctaatcatggctaccgtggggcagtccggggccctgagaagggtcaccgtgcactacgccagctcgcccacgcgcggcgcggtggtagaggtgagcctcgacgacctcgacgacgagctgctccagtttgtgctcgccgatcttcttcccggccaggagggtttacaccagtcgatcttggaaggagcacacggcagcaaccaggagaactatatgagaggcgcaggatccagtgcgccgtcacaggaataccatgcacagagcagcaccgctgctgcggcagcagctgcttcgtccaggaggaatccaggcacggatgacgcccagatcgcctcggacttcgagtacgccacgaagctgcagcaggagatggagggcctcagcgtcgacgacgacggcgacggtatcagctgcgtgccgtctccgtccgactctgacgacgggcacgaccatcacgacgaagaggacgaggatgaggaggatggtaatggtggtggtgatgatgatgatgatccagacaacatgacttatgagcaaagacaggcacttgtagagtctgtggggtctgaggacagaggcttatccgacgagctcatctcctacctgcagccatggaagtacaaggcatcagggtttttctcccggaaaacaaaccatgacgactgccctatctgcctgtcaactttcaggaaccgagagactatgataacgttgccgtgcatgcatcactaccacgcagcttgcgtcaccaaatggctcagggtcaacaagacatgccctgtatgcaaatatgaactgttcggaccttgctagcatccgacaatggagatggtaagacaaggtgatggggcgtcacactcacatccggctggttgcatcgtctacttttgttttgcaccaagaaaaaagaaaatgaaaaacaatncaaaaagagaagggaaaaaagttaggaagtgtagatcttgatcacacaagaaaaagaagaaaaaaaaactgaaatttatgtcttttttatctttccttcggcttttggaaatgtacgtaagtcacggtcttatatttgtttagaagcttgttttttttct

SEQ ID NO: 8212 - protein, 268 aa, Zea mays subsp. mays
  peptide (1)..(268): Ceres Seq. ID no. 12365778
  misc_feature (220)..(260): Pfam Name: Zinc finger, C3HC4 type (RING finger) Pfam Description: Zinc finger, C3HC4 type (RING finger)
  misc_feature (1)..(267): Homolog of NCBI NO: 34898016 NR Description: ESTs C26000(C11448),AU082130(C11448) correspond
  misc_feature (43)..(266): Homolog of NCBI NO: 38567912 NR Description: OSJNBa0088I22.8 [Oryza sativa (japonica
  misc_feature (128)..(268): Homolog of NCBI NO: 22331928 NR Description: putative protein; protein id: At3g63530.1 thaliana] >gi|21104275|emb|CAD32249.1| putative protein
  misc_feature (81)..(264): Homolog of NCBI NO: 10334499 NR Description: hypothetical protein [Cicer arietinum]
  misc_feature (152)..(264): Homolog of NCBI NO: 21536693 NR Description: unknown [Arabidopsis thaliana]
  misc_feature (152)..(264): Homolog of NCBI NO: 18402411 NR Description: expressed protein; protein id: At3g19910.1, by cDNA: 108568., supported by cDNA: gi_15010577, supported by gi_15028362, supported by cDNA: gi_19310706 [Arabidopsis
  misc_feature (73)..(260): Homolog of NCBI NO: 15232746 NR Description: zinc-finger protein-like protein; protein id:
  misc_feature (187)..(264): Homolog of NCBI NO: 34911538 NR Description: P0421H07.18 [Oryza sativa (japonica
  misc_feature (184)..(264): Homolog of NCBI NO: 15236782 NR Description: putative protein; protein id: At4g26580.1
MATVGQSGALRRVTVHYASSPTRGAVVEVSLDDLDDELLQFVLADLLPGQEGLHQSILEGAHGSNQENYMRGAGSSAPSQEYHAQSSTAAAAAAASSRRNPGTDDAQIASDFEYATKLQQEMEGLSVDDDGDGISCVPSPSDSDDGHDHHDEEDEDEEDGNGGGDDDDDPDNMTYEQRQALVESVGSEDRGLSDELISYLQPWKYKASGFFSRKTNHDDCPICLSTFRNRETMITLPCMHHYHAACVTKWLRVNKTCPVCKYELFGPC

SEQ ID NO: 8213 - protein, 199 aa, Zea mays subsp. mays
  peptide (1)..(199): Ceres Seq. ID no. 12365779
  misc_feature (151)..(191): Pfam Name: Zinc finger, C3HC4 type (RING finger) Pfam Description: Zinc finger, C3HC4 type (RING finger)
  misc_feature (1)..(198): Homolog of NCBI NO: 34898016 NR Description: ESTs C26000(C11448),AU082130(C11448) correspond
  misc_feature (1)..(197): Homolog of NCBI NO: 38567912 NR Description: OSJNBa0088I22.8 [Oryza sativa (japonica
  misc_feature (59)..(199): Homolog of NCBI NO: 22331928 NR Description: putative protein; protein id: At3g63530.1 thaliana] >gi|21104275|emb|CAD32249.1| putative protein
  misc_feature (12)..(195): Homolog of NCBI NO: 10334499 NR Description: hypothetical protein [Cicer arietinum]
  misc_feature (83)..(195): Homolog of NCBI NO: 21536693 NR Description: unknown [Arabidopsis thaliana]
  misc_feature (83)..(195): Homolog of NCBI NO: 18402411 NR Description: expressed protein; protein id: At3g19910.1, by cDNA: 108568., supported by cDNA: gi_15010577, supported by gi_15028362, supported by cDNA: gi_19310706 [Arabidopsis
  misc_feature (4)..(191): Homolog of NCBI NO: 15232746 NR Description: zinc-finger protein-like protein; protein id:
  misc_feature (118)..(195): Homolog of NCBI NO: 34911538 NR Description: P0421H07.18 [Oryza sativa (japonica
  misc_feature (115)..(195): Homolog of NCBI NO: 15236782 NR Description: putative protein; protein id: At4g26580.1
MRGAGSSAPSQEYHAQSSTAAAAAAASSRRNPGTDDAQIASDFEYATKLQQEMEGLSVDDDGDGISCVPSPSDSDDGHDHHDEEDEDEEDGNGGGDDDDDPDNMTYEQRQALVESVGSEDRGLSDELISYLQPWKYKASGFFSRKTNHDDCPICLSTFRNRETMITLPCMHHYHAACVTKWLRVNKTCPVCKYELFGPC

SEQ ID NO: 8214 - protein, 148 aa, Zea mays subsp. mays
  peptide (1)..(148): Ceres Seq. ID no. 12365780
LTKHPSLQQTLSWERERERRGGNKRHEQTEANRLTPVSVRWPANHGYRGAVRGPEKGHRALRQLAHARRGGRGEPRRPRRRAAPVCARRSSSRPGGFTPVDLGRSTRQQPGELYERRRIQCAVTGIPCTEQHRCCGSSCFVQEESRHG

SEQ ID NO: 8215 - DNA, 593 bp, Zea mays subsp. mays
  misc_feature (1)..(593): Ceres Seq. ID no. 12408576
  misc_feature: MA Experiment ID: 108543 Result: Up-regulated in Transcription
  misc_feature: MA Experiment ID: 108545 Result: Down-regulated in Transcription
  misc_feature: MA Experiment 108545 PARAMETER Experiment Name: Zm_Imbibed_Seeds_P Parameter: Age (day) Value: 3 vs. 2
  misc_feature: MA Experiment 108545 PARAMETER Experiment Name: Zm_Imbibed_Seeds_P Parameter: Organism Value: Zea mays
  misc_feature: MA Experiment 108545 PARAMETER Experiment Name: Zm_Imbibed_Seeds_P Parameter: Plant Line Value: 35A19
  misc_feature: MA Experiment 108545 PARAMETER Experiment Name: Zm_Imbibed_Seeds_P Parameter: Tissue Value: Aerial vs. Embryo
  misc_feature: MA Experiment ID: 108547 Result: Down-regulated in Transcription
  misc_feature: MA Experiment 108547 PARAMETER Experiment Name: Zm_Imbibed_Seeds_P Parameter: Age (day) Value: 4 vs. 2
  misc_feature: MA Experiment 108547 PARAMETER Experiment Name: Zm_Imbibed_Seeds_P Parameter: Organism Value: Zea mays
  misc_feature: MA Experiment 108547 PARAMETER Experiment Name: Zm_Imbibed_Seeds_P Parameter: Plant Line Value: 35A19
  misc_feature: MA Experiment 108547 PARAMETER Experiment Name: Zm_Imbibed_Seeds_P Parameter: Tissue Value: Aerial vs. Embryo
  misc_feature: MA Experiment ID: 20000492 Result: Down-regulated in Transcription
  misc_feature: MA Experiment 20000492 PARAMETER Experiment Name: Zm_Hybrid_Seed_Dev_P Parameter: DAP Value: 12
  misc_feature: MA Experiment 20000492 PARAMETER Experiment Name: Zm_Hybrid_Seed_Dev_P Parameter: Organism Value: Zea mays
  misc_feature: MA Experiment 20000492 PARAMETER Experiment Name: Zm_Hybrid_Seed_Dev_P Parameter: Plant Line Value: 35A19
  misc_feature: MA Experiment 20000492 PARAMETER Experiment Name: Zm_Hybrid_Seed_Dev_P Parameter: Tissue Value: Fert Kernel vs. Unfert Floret
  misc_feature: MA Experiment ID: 20000535 Result: Down-regulated in Transcription
  misc_feature: MA Experiment 20000535 PARAMETER Experiment Name: Zm_Hybrid_Seed_Dev_P Parameter: DAP Value: 30 vs. 12
  misc_feature: MA Experiment 20000535 PARAMETER Experiment Name: Zm_Hybrid_Seed_Dev_P Parameter: Organism Value: Zea mays
  misc_feature: MA Experiment 20000535 PARAMETER Experiment Name: Zm_Hybrid_Seed_Dev_P Parameter: Plant Line Value: 35A19
  misc_feature: MA Experiment 20000535 PARAMETER Experiment Name: Zm_Hybrid_Seed_Dev_P Parameter: Tissue Value: Embryo vs. Unfert Floret
acgcctctctctacttaggagtatacttcaaaagcgccgaaccagataggcaggcatctcgatcggcgacggctccagtcaaggggctggttggcatggagggcgagaagaaggcggccgccgtagcggaggatgaggttgtggttgtggctgctggcgatgtcagcctgaaggacctgtcaaagaagctcaacgacttcgccagggagagggactgggagcagttccatagccccaggaacctactgctcgncatgatcgccgaagtcggggagctgtcagagctgttcatgtggagaggggaggtgcggaagggcctcgcgggctgggacgaggccgagaaggagcacctgggcgaggagctctccgacgtgctgctctacctggtccaactctccgacatgtgcggcgtcgacctcggcgacgccgccgtcaggaaggatcggcaagaacgccgtcaagtacccggcgccgccgccgtcggaagaaggaagaagaaggcgcctgatagctttttttcttctggctgtgcatgtttgaaggccaatactacttgatgcagaaattgctcgtctgatagctttcgcctttcg

SEQ ID NO: 8216 - protein, 184 aa, Zea mays subsp. mays
  peptide (1)..(184): Ceres Seq. ID no. 12408577
  misc_feature (32)..(146): Homolog of NCBI NO: 32482945 NR Description: OSJNBb0072M01.10 [Oryza sativa (japonica
  misc_feature (54)..(146): Homolog of NCBI NO: 30687841 NR Description: expressed protein [Arabidopsis thaliana] contains similarity to unknown [Arabidopsis thaliana] >gi|28393817|gb|AAO42317.1| unknown
  misc_feature (55)..(165): Homolog of NCBI NO: 33468615 NR Description: SI:zC150A22.2 (novel protein) [Danio rerio]
  misc_feature (28)..(155): Homolog of NCBI NO: 20302079 NR Description: RS21-C6 protein [Rattus norvegicus]
  misc_feature (55)..(165): Homolog of NCBI NO: 13129100 NR Description: hypothetical protein MGC5627 [Homo sapiens] unnamed protein product [Homo sapiens] Unknown (protein for MGC:5627) [Homo sapiens]
  misc_feature (55)..(155): Homolog of NCBI NO: 12963573 NR Description: RIKEN cDNA 2410015N17 [Mus musculus]
  misc_feature (65)..(155): Homolog of NCBI NO: 34877104 NR Description: similar to RS21-C6 protein [Rattus norvegicus]
  misc_feature (55)..(155): Homolog of NCBI NO: 34864617 NR Description: similar to RS21-C6 protein [Rattus norvegicus]
  misc_feature (54)..(154): Homolog of NCBI NO: 34495748 NR Description: conserved hypothetical protein [Chromobacterium ATCC 12472] >gi|34101603|gb|AAQ57972.1| conserved hypothetical
  misc_feature (55)..(165): Homolog of NCBI NO: 39996459 NR Description: conserved hypothetical protein [Geobacter PCA] >gi|39983339|gb|AAR34733.1| conserved hypothetical protein
  misc_feature (84)..(84): Xaa is any aa, unknown or other
ASLYLGVYFKSAEPDRQASRSATAPVKGLVGMEGEKKAAAVAEDEVVVVAAGDVSLKDLSKKLNDFARERDWEQFHSPRNLLLXMIAEVGELSELFMWRGEVRKGLAGWDEAEKEHLGEELSDVLLYLVQLSDMCGVDLGDAAVRKDRQERRQVPGAAAVGRRKKKAPDSFFSSGCACLKANTT

SEQ ID NO: 8217 - protein, 153 aa, Zea mays subsp. mays
  peptide (1)..(153): Ceres Seq. ID no. 12408578
  misc_feature (1)..(115): Homolog of NCBI NO: 32482945 NR Description: OSJNBb0072M01.10 [Oryza sativa (japonica
  misc_feature (23)..(115): Homolog of NCBI NO: 30687841 NR Description: expressed protein [Arabidopsis thaliana] contains similarity to unknown [Arabidopsis thaliana] >gi|28393817|gb|AAO42317.1| unknown
  misc_feature (24)..(134): Homolog of NCBI NO: 33468615 NR Description: SI:zC150A22.2 (novel protein) [Danio rerio]
  misc_feature (1)..(124): Homolog of NCBI NO: 20302079 NR Description: RS21-C6 protein [Rattus norvegicus]
  misc_feature (24)..(134): Homolog of NCBI NO: 13129100 NR Description: hypothetical protein MGC5627 [Homo sapiens] unnamed protein product [Homo sapiens] Unknown (protein for MGC:5627) [Homo sapiens]
  misc_feature (24)..(124): Homolog of NCBI NO: 12963573 NR Description: RIKEN cDNA 2410015N17 [Mus musculus]
  misc_feature (34)..(124): Homolog of NCBI NO: 34877104 NR Description: similar to RS21-C6 protein [Rattus norvegicus]
  misc_feature (24)..(124): Homolog of NCBI NO: 34864617 NR Description: similar to RS21-C6 protein [Rattus norvegicus]
  misc_feature (23)..(123): Homolog of NCBI NO: 34495748 NR Description: conserved hypothetical protein [Chromobacterium ATCC 12472] >gi|34101603|gb|AAQ57972.1| conserved hypothetical
  misc_feature (24)..(134): Homolog of NCBI NO: 39996459 NR Description: conserved hypothetical protein [Geobacter PCA] >gi|39983339|gb|AAR34733.1| conserved hypothetical protein
  misc_feature (53)..(53): Xaa is any aa, unknown or other
MEGEKKAAAVAEDEVVVVAAGDVSLKDLSKKLNDFARERDWEQFHSPRNLLLXMIAEVGELSELFMWRGEVRKGLAGWDEAEKEHLGEELSDVLLYLVQLSDMCGVDLGDAAVRKDRQERRQVPGAAAVGRRKKKAPDSFFSSGCACLKANTT

SEQ ID NO: 8218 - protein, 100 aa, Zea mays subsp. mays
  peptide (1)..(100): Ceres Seq. ID no. 12408579
  misc_feature (1)..(62): Homolog of NCBI NO: 32482945 NR Description: OSJNBb0072M01.10 [Oryza sativa (japonica
  misc_feature (1)..(62): Homolog of NCBI NO: 30687841 NR Description: expressed protein [Arabidopsis thaliana] contains similarity to unknown [Arabidopsis thaliana] >gi|28393817|gb|AAO42317.1| unknown
  misc_feature (1)..(81): Homolog of NCBI NO: 33468615 NR Description: SI:zC150A22.2 (novel protein) [Danio rerio]
  misc_feature (1)..(71): Homolog of NCBI NO: 20302079 NR Description: RS21-C6 protein [Rattus norvegicus]
  misc_feature (1)..(81): Homolog of NCBI NO: 13129100 NR Description: hypothetical protein MGC5627 [Homo sapiens] unnamed protein product [Homo sapiens] Unknown (protein for MGC:5627) [Homo sapiens]
  misc_feature (1)..(71): Homolog of NCBI NO: 12963573 NR Description: RIKEN cDNA 2410015N17 [Mus musculus]
  misc_feature (1)..(71): Homolog of NCBI NO: 34877104 NR Description: similar to RS21-C6 protein [Rattus norvegicus]
  misc_feature (1)..(71): Homolog of NCBI NO: 34864617 NR Description: similar to RS21-C6 protein [Rattus norvegicus]
  misc_feature (1)..(70): Homolog of NCBI NO: 34495748 NR Description: conserved hypothetical protein [Chromobacterium ATCC 12472] >gi|34101603|gb|AAQ57972.1| conserved hypothetical
  misc_feature (1)..(81): Homolog of NCBI NO: 39996459 NR Description: conserved hypothetical protein [Geobacter PCA] >gi|39983339|gb|AAR34733.1| conserved hypothetical protein
MIAEVGELSELFMWRGEVRKGLAGWDEAEKEHLGEELSDVLLYLVQLSDMCGVDLGDAAVRKDRQERRQVPGAAAVGRRKKKAPDSFFSSGCACLKANTT

SEQ ID NO: 8219 - DNA, 1732 bp, Zea mays subsp. mays
  misc_feature (1)..(1732): Ceres Seq. ID no. 12336960
  misc_feature: MA Experiment ID: 108522 Result: Down-regulated in Transcription
  misc_feature: MA Experiment 108522 PARAMETER Experiment Name: Zm_42deg_Heat_P Parameter: Age (day) Value: 8
  misc_feature: MA Experiment 108522 PARAMETER Experiment Name: Zm_42deg_Heat_P Parameter: Organism Value: Zea mays
  misc_feature: MA Experiment 108522 PARAMETER Experiment Name: Zm_42deg_Heat_P Parameter: Plant Line Value: 35A19
  misc_feature: MA Experiment 108522 PARAMETER Experiment Name: Zm_42deg_Heat_P Parameter: Temperature (deg C) Value: 42 vs. 22
  misc_feature: MA Experiment 108522 PARAMETER Experiment Name: Zm_42deg_Heat_P Parameter: Timepoint (hr) Value: 1
  misc_feature: MA Experiment 108522 PARAMETER Experiment Name: Zm_42deg_Heat_P Parameter: Tissue Value: Aerial
  misc_feature: MA Experiment ID: 108523 Result: Down-regulated in Transcription
  misc_feature: MA Experiment 108523 PARAMETER Experiment Name: Zm_42deg_Heat_P Parameter: Age (day) Value: 8
  misc_feature: MA Experiment 108523 PARAMETER Experiment Name: Zm_42deg_Heat_P Parameter: Organism Value: Zea mays
  misc_feature: MA Experiment 108523 PARAMETER Experiment Name: Zm_42deg_Heat_P Parameter: Plant Line Value: 35A19
  misc_feature: MA Experiment 108523 PARAMETER Experiment Name: Zm_42deg_Heat_P Parameter: Temperature (deg C) Value: 42 vs. 22
  misc_feature: MA Experiment 108523 PARAMETER Experiment Name: Zm_42deg_Heat_P Parameter: Timepoint (hr) Value: 6
  misc_feature: MA Experiment 108523 PARAMETER Experiment Name: Zm_42deg_Heat_P Parameter: Tissue Value: Aerial
  misc_feature: MA Experiment ID: 108527 Result: Down-regulated in Transcription
  misc_feature: MA Experiment 108527 PARAMETER Experiment Name: Zm_5mM_NO_P Parameter: Age (day) Value: 8
  misc_feature: MA Experiment 108527 PARAMETER Experiment Name: Zm_5mM_NO_P Parameter: Organism Value: Zea mays
  misc_feature: MA Experiment 108527 PARAMETER Experiment Name: Zm_5mM_NO_P Parameter: Plant Line Value: 35A19
  misc_feature: MA Experiment 108527 PARAMETER Experiment Name: Zm_5mM_NO_P Parameter: Timepoint (hr) Value: 6
  misc_feature: MA Experiment 108527 PARAMETER Experiment Name: Zm_5mM_NO_P Parameter: Tissue Value: Aerial
  misc_feature: MA Experiment 108527 PARAMETER Experiment Name: Zm_5mM_NO_P Parameter: Treatment Value: 5mM NO vs. No Treatment
  misc_feature: MA Experiment ID: 20000479 Result: Down-regulated in Transcription
  misc_feature: MA Experiment 20000479 PARAMETER Experiment Name: Zm_Drought_P Parameter: Age (day) Value: 10
  misc_feature: MA Experiment 20000479 PARAMETER Experiment Name: Zm_Drought_P Parameter: Organism Value: Zea mays
  misc_feature: MA Experiment 20000479 PARAMETER Experiment Name: Zm_Drought_P Parameter: Plant Line Value: 35A19
  misc_feature: MA Experiment 20000479 PARAMETER Experiment Name: Zm_Drought_P Parameter: Timepoint (hr) Value: 48
  misc_feature: MA Experiment 20000479 PARAMETER Experiment Name: Zm_Drought_P Parameter: Tissue Value: Aerial
  misc_feature: MA Experiment 20000479 PARAMETER Experiment Name: Zm_Drought_P Parameter: Treatment Value: Drought vs. No Drought
  misc_feature: MA Experiment ID: 20000492 Result: Down-regulated in Transcription
  misc_feature: MA Experiment 20000492 PARAMETER Experiment Name: Zm_Hybrid_Seed_Dev_P Parameter: DAP Value: 12
  misc_feature: MA Experiment 20000492 PARAMETER Experiment Name: Zm_Hybrid_Seed_Dev_P Parameter: Organism Value: Zea mays
  misc_feature: MA Experiment 20000492 PARAMETER Experiment Name: Zm_Hybrid_Seed_Dev_P Parameter: Plant Line Value: 35A19
  misc_feature: MA Experiment 20000492 PARAMETER Experiment Name: Zm_Hybrid_Seed_Dev_P Parameter: Tissue Value: Fert Kernel vs. Unfert Floret
  misc_feature: MA Experiment ID: 20000535 Result: Down-regulated in Transcription
  misc_feature: MA Experiment 20000535 PARAMETER Experiment Name: Zm_Hybrid_Seed_Dev_P Parameter: DAP Value: 30 vs. 12
  misc_feature: MA Experiment 20000535 PARAMETER Experiment Name: Zm_Hybrid_Seed_Dev_P Parameter: Organism Value: Zea mays
  misc_feature: MA Experiment 20000535 PARAMETER Experiment Name: Zm_Hybrid_Seed_Dev_P Parameter: Plant Line Value: 35A19
  misc_feature: MA Experiment 20000535 PARAMETER Experiment Name: Zm_Hybrid_Seed_Dev_P Parameter: Tissue Value: Embryo vs. Unfert Floret
attcttagactaaaaacactatgagttagtgctaccaactgaaggatacgccatggctgttctgacactggttaatatccttatcagcttcgctgcttgtgctgaagctctaaggagagcagacttccctcaaggtttcgtctttggcactgcttcttcagcttaccagtatgaaggtgctgtcaacgagggtcaacgtggacctacaatatgggatactctcacaagacgacccggacgggtgatagatttcagcaatgcagatgttgccgttgatcactaccatcgttataaggaagatgtggacttgattaaggacattggcatggatgcataccggttctctatctcgtggtcacgtatctttccaaatggaactggtgaacctaatgaagaaggattgaattactataacagcctcataaatactctattagacaaaggtatacaaccatatgtaacactctttcactgggaccttccgcaagcactagaagacagatatggtggatggttaaacccccaaatcgtggatgattttgttcactatgcctctacttgcttcaaggaatttggagatagagtgaaacactggatcactttcaatgagccccataattttgcgattgaaggctatgaccttggcatccaggcacctgggaggtgttctattctgtctcatatattttgcagggagggcaaatcatcgactgagccttatgtcgtagctcacaacatactcttagcgcatgctggtgcctttcatacttataagcagcatttcaagaaagaacaaggaggtatcattggcattgcactcgattctaagtggtatgagccactgtcagatgttgatgaggacacagaggcagcagcacgagcaatggactttgagcttggatggttcctggatcccttaatgtttggccactatcctccttctatgcagaaacttgtgggcgacaggctgcctcagttttcagctcgggcttccgatgttagtgtcaggctcactagattttgtgggcataaaccattacaccacactgtatgttaggaacgacagaatgcggatcaggaaacttgtaatgaatgatgcttcaactgatgctgcggtcatacctactgcttatagacatggaaagaaaataggagaaacggcagcgtcaggatggctgcacatagtgccctggggcatgttcaagctgatgaagcacatcaaagaaaagtacgggaatccgcccgtgatcattactgaaaacggcatggatgatgcgaacaaccggttttcgaaattagaggatgatctgcaggatgataaacggatacagtaccacaaggactacatgtctaacctcctagacgcaattaggaaggaaggctgcaacgtccatggctacttcgtctggtcgctgctcgacaactgggagtggaactccgggtacacggtgcggtttgggctctactacatcgactacaacaacaatttgacacggatacccaaggcgtccgtggagtggttcaggcaggtcttggcccagaagacggctggtggagtacagtggttctacagtggccagtagttgagtgtatataacatacacggcacggctaccatcgatctgtacatgcgtacgtagctttagattagattgtgattattctcgatgtatatagactcaccatttggacgaccttcaaccgcacagttgaatgtgtcgttatgcttgct

SEQ ID NO: 8220 - protein, 334 aa, Zea mays subsp. mays
  peptide (1)..(334): Ceres Seq. ID no. 12336961
  misc_feature (17)..(310): Homolog of NCBI NO: 22327832 NR Description: glycosyl hydrolase family 1; protein id:
  misc_feature (17)..(310): Homolog of NCBI NO: 9758949 NR Description: beta-glucosidase [Arabidopsis thaliana]
  misc_feature (1)..(334): Homolog of NCBI NO: 15222734 NR Description: glycosyl hydrolase family 1; protein id: supported by cDNA: 125606., supported by cDNA: gi_15028208
  misc_feature (1)..(334): Homolog of NCBI NO: 21537259 NR Description: beta-glucosidase, putative [Arabidopsis thaliana]
  misc_feature (20)..(334): Homolog of NCBI NO: 22658440 NR Description: beta-glucosidase [Oryza sativa (japonica
  misc_feature (16)..(314): Homolog of NCBI NO: 7435445 NR Description: beta-glucosidase (EC 3.2.1.21) precursor isoform
  misc_feature (16)..(314): Homolog of NCBI NO: 15778634 NR Description: amygdalin hydrolase isoform AH I precursor
  misc_feature (16)..(314): Homolog of NCBI NO: 16757966 NR Description: amygdalin hydrolase isoform AH I precursor
  misc_feature (10)..(331): Homolog of NCBI NO: 3820531 NR Description: beta-glucosidase [Pinus contorta]
  misc_feature (20)..(316): Homolog of NCBI NO: 7435429 NR Description: furostanol glycoside 26-O-beta-glucosidase F26G -
MAVLTLVNILISFAACAEALRRADFPQGFVFGTASSAYQYEGAVNEGQRGPTIWDTLTRRPGRVIDFSNADVAVDHYHRYKEDVDLIKDIGMDAYRFSISWSRIFPNGTGEPNEEGLNYYNSLINTLLDKGIQPYVTLFHWDLPQALEDRYGGWLNPQIVDDFVHYASTCFKEFGDRVKHWITFNEPHNFAIEGYDLGIQAPGRCSILSHIFCREGKSSTEPYVVAHNILLAHAGAFHTYKQHFKKEQGGIIGIALDSKWYEPLSDVDEDTEAAARAMDFELGWFLDPLMFGHYPPSMQKLVGDRLPQFSARASDVSVRLTRFCGHKPLHHTVC

SEQ ID NO: 8221 - protein, 243 aa, Zea mays subsp. mays
  peptide (1)..(243): Ceres Seq. ID no. 12336962
  misc_feature (1)..(219): Homolog of NCBI NO: 22327832 NR Description: glycosyl hydrolase family 1; protein id:
  misc_feature (1)..(219): Homolog of NCBI NO: 9758949 NR Description: beta-glucosidase [Arabidopsis thaliana]
  misc_feature (1)..(243): Homolog of NCBI NO: 15222734 NR Description: glycosyl hydrolase family 1; protein id: supported by cDNA: 125606., supported by cDNA: gi_15028208
  misc_feature (1)..(243): Homolog of NCBI NO: 21537259 NR Description: beta-glucosidase, putative [Arabidopsis thaliana]
  misc_feature (1)..(243): Homolog of NCBI NO: 22658440 NR Description: beta-glucosidase [Oryza sativa (japonica
  misc_feature (1)..(223): Homolog of NCBI NO: 7435445 NR Description: beta-glucosidase (EC 3.2.1.21) precursor isoform
  misc_feature (1)..(223): Homolog of NCBI NO: 15778634 NR Description: amygdalin hydrolase isoform AH I precursor
  misc_feature (1)..(223): Homolog of NCBI NO: 16757966 NR Description: amygdalin hydrolase isoform AH I precursor
  misc_feature (1)..(240): Homolog of NCBI NO: 3820531 NR Description: beta-glucosidase [Pinus contorta]
  misc_feature (1)..(225): Homolog of NCBI NO: 7435429 NR Description: furostanol glycoside 26-O-beta-glucosidase F26G -
MDAYRFSISWSRIFPNGTGEPNEEGLNYYNSLINTLLDKGIQPYVTLFHWDLPQALEDRYGGWLNPQIVDDFVHYASTCFKEFGDRVKHWITFNEPHNFAIEGYDLGIQAPGRCSILSHIFCREGKSSTEPYVVAHNILLAHAGAFHTYKQHFKKEQGGIIGIALDSKWYEPLSDVDEDTEAAARAMDFELGWFLDPLMFGHYPPSMQKLVGDRLPQFSARASDVSVRLTRFCGHKPLHHTVC

SEQ ID NO: 8222 - protein, 195 aa, Zea mays subsp. mays
  peptide (1)..(195): Ceres Seq. ID no. 12336963
  misc_feature (3)..(181): Homolog of NCBI NO: 22327832 NR Description: glycosyl hydrolase family 1; protein id:
  misc_feature (3)..(181): Homolog of NCBI NO: 9758949 NR Description: beta-glucosidase [Arabidopsis thaliana]
  misc_feature (2)..(180): Homolog of NCBI NO: 15222734 NR Description: glycosyl hydrolase family 1; protein id: supported by cDNA: 125606., supported by cDNA: gi_15028208
  misc_feature (2)..(180): Homolog of NCBI NO: 21537259 NR Description: beta-glucosidase, putative [Arabidopsis thaliana]
  misc_feature (2)..(180): Homolog of NCBI NO: 22658440 NR Description: beta-glucosidase [Oryza sativa (japonica
  misc_feature (2)..(191): Homolog of NCBI NO: 7435445 NR Description: beta-glucosidase (EC 3.2.1.21) precursor isoform
  misc_feature (2)..(191): Homolog of NCBI NO: 16757966 NR Description: amygdalin hydrolase isoform AH I precursor
  misc_feature (2)..(191): Homolog of NCBI NO: 15778634 NR Description: amygdalin hydrolase isoform AH I precursor
  misc_feature (5)..(189): Homolog of NCBI NO: 3820531 NR Description: beta-glucosidase [Pinus contorta]
  misc_feature (2)..(180): Homolog of NCBI NO: 7435429 NR Description: furostanol glycoside 26-O-beta-glucosidase F26G -
MLVSGSLDFVGINHYTTLYVRNDRMRIRKLVMNDASTDAAVIPTAYRHGKKIGETAASGWLHIVPWGMFKLMKHIKEKYGNPPVIITENGMDDANNRFSKLEDDLQDDKRIQYHKDYMSNLLDAIRKEGCNVHGYFVWSLLDNWEWNSGYTVRFGLYYIDYNNNLTRIPKASVEWFRQVLAQKTAGGVQWFYSGQ

SEQ ID NO: 8223 - DNA, 1604 bp, Zea mays subsp. mays
  misc_feature (1)..(1604): Ceres Seq. ID no. 12343269
  misc_feature: MA Experiment ID: 108559 Result: Up-regulated in Transcription
  misc_feature: MA Experiment 108559 PARAMETER Experiment Name: Zm_5mM_NO_P Parameter: Age (day) Value: 8
  misc_feature: MA Experiment 108559 PARAMETER Experiment Name: Zm_5mM_NO_P Parameter: Organism Value: Zea mays
  misc_feature: MA Experiment 108559 PARAMETER Experiment Name: Zm_5mM_NO_P Parameter: Plant Line Value: 35A19
  misc_feature: MA Experiment 108559 PARAMETER Experiment Name: Zm_5mM_NO_P Parameter: Timepoint (hr) Value: 12
  misc_feature: MA Experiment 108559 PARAMETER Experiment Name: Zm_5mM_NO_P Parameter: Tissue Value: Aerial
  misc_feature: MA Experiment 108559 PARAMETER Experiment Name: Zm_5mM_NO_P Parameter: Treatment Value: 5mM NO vs. No Treatment
attggcacgtatgaatgctcagccacatgcgtatgtatacatcacggccacgttcacgcttcccccttctgcaagcaaacctaaccaagcctctgcggctcttcttcgaatccaactcctccccgatccccaaaatcgaacccaagtcgaaaccctaacctcggccttctcgatgtcggccgccacaaccgccccaacccctgcggtggccaccccgatggcgccgcctccgtcgtacccggcctcctccacgatctccgcctccgtggccgcgtcggtcgaggaagaggacgacctctatggccgcctcaagtcgctccagcgccacatggagttcgtcgagatccaggaggagtacgttaaagacgaacagaagaacctcaagcgcgaactcctccgtgcgcaggaggaggtcaagcggatccagtccgtaccgctcgtcatcggccagtttatggagatggtcgacggcaacaacggcatcgtgggttctactacgggcagcaactactatgtgcggatcctcagcaccatcaaccgcgagctgctcaagccgtcagcatctgtcgcgttgcatcgtcactccaacgctttagtcgacgtgctgccgcccgaggccgactccagcatctccttgctgggatcgtcggagaagcccaacgtcacctacaacgatattggaggatgcgacatccaaaagcaagaaatacgggaggcggttgagttacccttgactcatcatgagttgtacaagcagattggtattgatcctccaagaggggtgcttctgtatggtcctccgggtactggcaagaccatgcttgccaaagcagtcgcacatcataccaccgctgcttttatcagagtcgttggttcggagtttgtacagaagtacttgggcgagggccctagaatggtgcgtgatgtgttccgtttggctaaggagaatgctccagcaatcattttcattgatgaggttgatgctatagccactgctcgctttgatgctcagactggtgctgaccgagaagttcaacgcattcttatggagctactcaatcagatggatgggtttgatcaaacagtgaatgtgaaggttataatggcaactaatcgggcagacactctagatcctgctctgttgcgtcctggtagacttgacaggaaaattgagttccctttgccagaccggcgtcagaagaggcttgttttccaagtctgcactgccaaaatgaacctgagtgacgaggttgatttggaagactatgtttccagaccggataagatcagtgctgctgatattgctgctatctgtcaagaagctggcatgcatgctgtccgcaaaaaccgatatgtcatcctccccaaggactttgagaagggctaccgaaccaacgtgaaaaagcctgagacggacttcgatttctacaaatgaggcaacctgagtgttgagctcgtttcttgtttatcaattgaatatgttttagcataaagatgagtttcaggatagttgccaatatcaaatgtcgaagttgatggctgtaatgcttgagtcaatctttttacttgaaggtacagcggtgttatggaagttatgattatgc

SEQ ID NO: 8224 - protein, 477 aa, Zea mays subsp. mays
  peptide (1)..(477): Ceres Seq. ID no. 12343270
  misc_feature (260)..(447): Pfam Name: ATPase family associated with various cellular Pfam Description: ATPase family associated with various cellular
  misc_feature (68)..(477): Homolog of NCBI NO: 15237159 NR Description: 26S proteasome AAA-ATPase subunit RPT3; protein At5g58290.1, supported by cDNA: gi_17979230, supported by cDNA: [Arabidopsis thaliana] >gi|28558168|sp|Q9SEI4|PRS6_ARATH 26S
  misc_feature (110)..(477): Homolog of NCBI NO: 17298145 NR Description: 26S proteasome regulatory particle triple-A
  misc_feature (68)..(477): Homolog of NCBI NO: 1709798 NR Description: 26S PROTEASE REGULATORY SUBUNIT 6B HOMOLOG
  misc_feature (91)..(477): Homolog of NCBI NO: 18860063 NR Description: CG16916-PA [Drosophila melanogaster]
  misc_feature (95)..(477): Homolog of NCBI NO: 1172638 NR Description: 26S PROTEASE REGULATORY SUBUNIT 6B (ATPASE MS73)
  misc_feature (94)..(477): Homolog of NCBI NO: 5729991 NR Description: proteasome 26S ATPase subunit 4 isoform 1;
  misc_feature (94)..(477): Homolog of NCBI NO: 25742677 NR Description: proteasome 26S ATPase subunit 4 [Rattus
  misc_feature (94)..(477): Homolog of NCBI NO: 26341428 NR Description: unnamed protein product [Mus musculus]
  misc_feature (94)..(477): Homolog of NCBI NO: 3450955 NR Description: ATPase homolog [Homo sapiens]
  misc_feature (115)..(476): Homolog of NCBI NO: 23480119 NR Description: 26S proteasome ATPase [Plasmodium yoelii yoelii]
LARMNAQPHAYVYITATFTLPPSASKPNQASAALLRIQLLPDPQNRTQVETLTSAFSMSAATTAPTPAVATPMAPPPSYPASSTISASVAASVEEEDDLYGRLKSLQRHMEFVEIQEEYVKDEQKNLKRELLRAQEEVKRIQSVPLVIGQFMEMVDGNNGIVGSTTGSNYYVRILSTINRELLKPSASVALHRHSNALVDVLPPEADSSISLLGSSEKPNVTYNDIGGCDIQKQEIREAVELPLTHHELYKQIGIDPPRGVLLYGPPGTGKTMLAKAVAHHTTAAFIRVVGSEFVQKYLGEGPRMVRDVFRLAKENAPAIIFIDEVDAIATARFDAQTGADREVQRILMELLNQMDGFDQTVNVKVIMATNRADTLDPALLRPGRLDRKIEFPLPDRRQKRLVFQVCTAKMNLSDEVDLEDYVSRPDKISAADIAAICQEAGMHAVRKNRYVILPKDFEKGYRTNVKKPETDFDFYK

SEQ ID NO: 8225 - protein, 474 aa, Zea mays subsp. mays
  peptide (1)..(474): Ceres Seq. ID no. 12343271
  misc_feature (257)..(444): Pfam Name: ATPase family associated with various cellular Pfam Description: ATPase family associated with various cellular
  misc_feature (65)..(474): Homolog of NCBI NO: 15237159 NR Description: 26S proteasome AAA-ATPase subunit RPT3; protein At5g58290.1, supported by cDNA: gi_17979230, supported by cDNA: [Arabidopsis thaliana] >gi|28558168|sp|Q9SEI4|PRS6_ARATH 26S
  misc_feature (107)..(474): Homolog of NCBI NO: 17298145 NR Description: 26S proteasome regulatory particle triple-A
  misc_feature (65)..(474): Homolog of NCBI NO: 1709798 NR Description: 26S PROTEASE REGULATORY SUBUNIT 6B HOMOLOG
  misc_feature (88)..(474): Homolog of NCBI NO: 18860063 NR Description: CG16916-PA [Drosophila melanogaster]
  misc_feature (92)..(474): Homolog of NCBI NO: 1172638 NR Description: 26S PROTEASE REGULATORY SUBUNIT 6B (ATPASE MS73)
  misc_feature (91)..(474): Homolog of NCBI NO: 5729991 NR Description: proteasome 26S ATPase subunit 4 isoform 1;
  misc_feature (91)..(474): Homolog of NCBI NO: 25742677 NR Description: proteasome 26S ATPase subunit 4 [Rattus
  misc_feature (91)..(474): Homolog of NCBI NO: 26341428 NR Description: unnamed protein product [Mus musculus]
  misc_feature (91)..(474): Homolog of NCBI NO: 3450955 NR Description: ATPase homolog [Homo sapiens]
  misc_feature (112)..(473): Homolog of NCBI NO: 23480119 NR Description: 26S proteasome ATPase [Plasmodium yoelii yoelii]
MNAQPHAYVYITATFTLPPSASKPNQASAALLRIQLLPDPQNRTQVETLTSAFSMSAATTAPTPAVATPMAPPPSYPASSTISASVAASVEEEDDLYGRLKSLQRHMEFVEIQEEYVKDEQKNLKRELLRAQEEVKRIQSVPLVIGQFMEMVDGNNGIVGSTTGSNYYVRILSTINRELLKPSASVALHRHSNALVDVLPPEADSSISLLGSSEKPNVTYNDIGGCDIQKQEIREAVELPLTHHELYKQIGIDPPRGVLLYGPPGTGKTMLAKAVAHHTTAAFIRVVGSEFVQKYLGEGPRMVRDVFRLAKENAPAIIFIDEVDAIATARFDAQTGADREVQRILMELLNQMDGFDQTVNVKVIMATNRADTLDPALLRPGRLDRKIEFPLPDRRQKRLVFQVCTAKMNLSDEVDLEDYVSRPDKISAADIAAICQEAGMHAVRKNRYVILPKDFEKGYRTNVKKPETDFDFYK

SEQ ID NO: 8226 - protein, 420 aa, Zea mays subsp. mays
  peptide (1)..(420): Ceres Seq. ID no. 12343272
  misc_feature (203)..(390): Pfam Name: ATPase family associated with various cellular Pfam Description: ATPase family associated with various cellular
  misc_feature (11)..(420): Homolog of NCBI NO: 15237159 NR Description: 26S proteasome AAA-ATPase subunit RPT3; protein At5g58290.1, supported by cDNA: gi_17979230, supported by cDNA: [Arabidopsis thaliana] >gi|28558168|sp|Q9SEI4|PRS6_ARATH 26S
  misc_feature (53)..(420): Homolog of NCBI NO: 17298145 NR Description: 26S proteasome regulatory particle triple-A
  misc_feature (11)..(420): Homolog of NCBI NO: 1709798 NR Description: 26S PROTEASE REGULATORY SUBUNIT 6B HOMOLOG
  misc_feature (34)..(420): Homolog of NCBI NO: 18860063 NR Description: CG16916-PA [Drosophila melanogaster]
  misc_feature (38)..(420): Homolog of NCBI NO: 1172638 NR Description: 26S PROTEASE REGULATORY SUBUNIT 6B (ATPASE MS73)
  misc_feature (37)..(420): Homolog of NCBI NO: 5729991 NR Description: proteasome 26S ATPase subunit 4 isoform 1;
  misc_feature (37)..(420): Homolog of NCBI NO: 25742677 NR Description: proteasome 26S ATPase subunit 4 [Rattus
  misc_feature (37)..(420): Homolog of NCBI NO: 26341428 NR Description: unnamed protein product [Mus musculus]
  misc_feature (37)..(420): Homolog of NCBI NO: 3450955 NR Description: ATPase homolog [Homo sapiens]
  misc_feature (58)..(419): Homolog of NCBI NO: 23480119 NR Description: 26S proteasome ATPase [Plasmodium yoelii yoelii]
MSAATTAPTPAVATPMAPPPSYPASSTISASVAASVEEEDDLYGRLKSLQRHMEFVEIQEEYVKDEQKNLKRELLRAQEEVKRIQSVPLVIGQFMEMVDGNNGIVGSTTGSNYYVRILSTINRELLKPSASVALHRHSNALVDVLPPEADSSISLLGSSEKPNVTYNDIGGCDIQKQEIREAVELPLTHHELYKQIGIDPPRGVLLYGPPGTGKTMLAKAVAHHTTAAFIRVVGSEFVQKYLGEGPRMVRDVFRLAKENAPAIIFIDEVDAIATARFDAQTGADREVQRILMELLNQMDGFDQTVNVKVIMATNRADTLDPALLRPGRLDRKIEFPLPDRRQKRLVFQVCTAKMNLSDEVDLEDYVSRPDKISAADIAAICQEAGMHAVRKNRYVILPKDFEKGYRTNVKKPETDFDFYK

SEQ ID NO: 8227 - DNA, 1058 bp, Zea mays subsp. mays
  misc_feature (1)..(1058): Ceres Seq. ID no. 12346165
  misc_feature: MA Experiment ID: 108522 Result: Down-regulated in Transcription
  misc_feature: MA Experiment 108522 PARAMETER Experiment Name: Zm_42deg_Heat_P Parameter: Age (day) Value: 8
  misc_feature: MA Experiment 108522 PARAMETER Experiment Name: Zm_42deg_Heat_P Parameter: Organism Value: Zea mays
  misc_feature: MA Experiment 108522 PARAMETER Experiment Name: Zm_42deg_Heat_P Parameter: Plant Line Value: 35A19
  misc_feature: MA Experiment 108522 PARAMETER Experiment Name: Zm_42deg_Heat_P Parameter: Temperature (deg C) Value: 42 vs. 22
  misc_feature: MA Experiment 108522 PARAMETER Experiment Name: Zm_42deg_Heat_P Parameter: Timepoint (hr) Value: 1
  misc_feature: MA Experiment 108522 PARAMETER Experiment Name: Zm_42deg_Heat_P Parameter: Tissue Value: Aerial
ctcacacgccggccgccgcgcaagagccgtggccccgtcgacgtccgcccgcacaggactctccgagtgtgggattgagccgtagttttttttttttggtggctcgggccgatatccggtactgtatgagggttgccaactactagactttaagatcgctgattcaatggaggcctccgaggcagcacctgcagcggcggccaccgtcatggaagcagaggatgtgagcggcgggaagggcgaatggtacgtgcttggggagcgggcgctgatggtgccgtacacgcgggagcacgtgccgcggtaccacgactggatgcaggacccggcgctgctggaggccaccgcgtcggagcccctctccctctcgcaggagttcgaggtccaccgctcatggaccctcgaccctctaaagcacaccttcatagtgttggataaggagctcatagagggagagttcgtgccgggcaacccgcacattgaagctatggttggtgatgtgaacatatatatgaatgactctgatgatgtgcagatcgcggagatagagattatgatagctgaacataagagccgtgggaagggtattggtcaagaagcaatcttactgatgatggcatttgcagtagagaaatatggaattcacacgttcagggcaaaaattagcgaatcaaatatggcatcgcttaagctcttcaggaagttgggcttcaaggatgcttcatacagtgtggtgttcaaggaggtgactctggaggcacccgctgactcactcccgttgagatttcctctgaccattggagactggtgacgtttgacatgccccaagttaattccatgcagacgacacaagaagctaatgctgtttgtctgtactatctgaccaaaatttactcgggctgatattgtatgaaaaaaatgaataaaacagttgcacagttgtgattcaattgcattagaccagtcgggtttttcatgtcactattttgaagaccccatatcttataaacaaatgtagacaagttttatctcataatttttttatagtatctcccgtc

SEQ ID NO: 8228 - protein, 214 aa, Zea mays subsp. mays
  peptide (1)..(214): Ceres Seq. ID no. 12346166
  misc_feature (101)..(183): Pfam Name: Acetyltransferase (GNAT) family Pfam Description: Acetyltransferase (GNAT) family
  misc_feature (31)..(203): Homolog of NCBI NO: 18395874 NR Description: Expressed protein; protein id: At2g04845.1, by cDNA: 21909. [Arabidopsis thaliana]
  misc_feature (31)..(203): Homolog of NCBI NO: 21554294 NR Description: unknown [Arabidopsis thaliana]
  misc_feature (29)..(196): Homolog of NCBI NO: 13278945 NR Description: DKFZP564C103 protein [Homo sapiens]
  misc_feature (29)..(196): Homolog of NCBI NO: 7512719 NR Description: hypothetical protein DKFZp564C103.1 - human
  misc_feature (5)..(193): Homolog of NCBI NO: 24414273 NR Description: Unknown protein [Oryza sativa (japonica
  misc_feature (187)..(214): Homolog of NCBI NO: 24414273 NR Description: Unknown protein [Oryza sativa (japonica
  misc_feature (29)..(196): Homolog of NCBI NO: 31542521 NR Description: DKFZP564C103 protein [Homo sapiens]
  misc_feature (29)..(206): Homolog of NCBI NO: 13384782 NR Description: RIKEN cDNA 1110028N05 [Mus musculus] unnamed protein product [Mus musculus] RIKEN cDNA 1110028N05 gene [Mus musculus]
  misc_feature (29)..(213): Homolog of NCBI NO: 39584036 NR Description: Hypothetical protein CBG11716 [Caenorhabditis
  misc_feature (29)..(196): Homolog of NCBI NO: 34875069 NR Description: similar to RIKEN cDNA 1110028N05 [Rattus
MEASEAAPAAAATVMEAEDVSGGKGEWYVLGERALMVPYTREHVPRYHDWMQDPALLEATASEPLSLSQEFEVHRSWTLDPLKHTFIVLDKELIEGEFVPGNPHIEAMVGDVNIYMNDSDDVQIAEIEIMIAEHKSRGKGIGQEAILLMMAFAVEKYGIHTFRAKISESNMASLKLFRKLGFKDASYSVVFKEVTLEAPADSLPLRFPLTIGDW

SEQ ID NO: 8229 - protein, 200 aa, Zea mays subsp. mays
  peptide (1)..(200): Ceres Seq. ID no. 12346167
  misc_feature (87)..(169): Pfam Name: Acetyltransferase (GNAT) family Pfam Description: Acetyltransferase (GNAT) family
  misc_feature (1)..(179): Homolog of NCBI NO: 24414273 NR Description: Unknown protein [Oryza sativa (japonica
  misc_feature (173)..(200): Homolog of NCBI NO: 24414273 NR Description: Unknown protein [Oryza sativa (japonica
  misc_feature (17)..(189): Homolog of NCBI NO: 18395874 NR Description: Expressed protein; protein id: At2g04845.1, by cDNA: 21909. [Arabidopsis thaliana]
  misc_feature (17)..(189): Homolog of NCBI NO: 21554294 NR Description: unknown [Arabidopsis thaliana]
  misc_feature (15)..(182): Homolog of NCBI NO: 13278945 NR Description: DKFZP564C103 protein [Homo sapiens]
  misc_feature (15)..(182): Homolog of NCBI NO: 7512719 NR Description: hypothetical protein DKFZp564C103.1 - human
  misc_feature (15)..(182): Homolog of NCBI NO: 31542521 NR Description: DKFZP564C103 protein [Homo sapiens]
  misc_feature (15)..(192): Homolog of NCBI NO: 13384782 NR Description: RIKEN cDNA 1110028N05 [Mus musculus] unnamed protein product [Mus musculus] RIKEN cDNA 1110028N05 gene [Mus musculus]
  misc_feature (15)..(199): Homolog of NCBI NO: 39584036 NR Description: Hypothetical protein CBG11716 [Caenorhabditis
  misc_feature (15)..(182): Homolog of NCBI NO: 34875069 NR Description: similar to RIKEN cDNA 1110028N05 [Rattus
MEAEDVSGGKGEWYVLGERALMVPYTREHVPRYHDWMQDPALLEATASEPLSLSQEFEVHRSWTLDPLKHTFIVLDKELIEGEFVPGNPHIEAMVGDVNIYMNDSDDVQIAEIEIMIAEHKSRGKGIGQEAILLMMAFAVEKYGIHTFRAKISESNMASLKLFRKLGFKDASYSVVFKEVTLEAPADSLPLRFPLTIGDW

SEQ ID NO: 8230 - protein, 179 aa, Zea mays subsp. mays
  peptide (1)..(179): Ceres Seq. ID no. 12346168
  misc_feature (66)..(148): Pfam Name: Acetyltransferase (GNAT) family Pfam Description: Acetyltransferase (GNAT) family
  misc_feature (1)..(158): Homolog of NCBI NO: 24414273 NR Description: Unknown protein [Oryza sativa (japonica
  misc_feature (152)..(179): Homolog of NCBI NO: 24414273 NR Description: Unknown protein [Oryza sativa (japonica
  misc_feature (1)..(168): Homolog of NCBI NO: 18395874 NR Description: Expressed protein; protein id: At2g04845.1, by cDNA: 21909. [Arabidopsis thaliana]
  misc_feature (1)..(168): Homolog of NCBI NO: 21554294 NR Description: unknown [Arabidopsis thaliana]
  misc_feature (1)..(161): Homolog of NCBI NO: 13278945 NR Description: DKFZP564C103 protein [Homo sapiens]
  misc_feature (1)..(161): Homolog of NCBI NO: 7512719 NR Description: hypothetical protein DKFZp564C103.1 - human
  misc_feature (1)..(161): Homolog of NCBI NO: 31542521 NR Description: DKFZP564C103 protein [Homo sapiens]
  misc_feature (1)..(171): Homolog of NCBI NO: 13384782 NR Description: RIKEN cDNA 1110028N05 [Mus musculus] unnamed protein product [Mus musculus] RIKEN cDNA 1110028N05 gene [Mus musculus]
  misc_feature (1)..(178): Homolog of NCBI NO: 39584036 NR Description: Hypothetical protein CBG11716 [Caenorhabditis
  misc_feature (1)..(161): Homolog of NCBI NO: 34875069 NR Description: similar to RIKEN cDNA 1110028N05 [Rattus
MVPYTREHVPRYHDWMQDPALLEATASEPLSLSQEFEVHRSWTLDPLKHTFIVLDKELIEGEFVPGNPHIEAMVGDVNIYMNDSDDVQIAEIEIMIAEHKSRGKGIGQEAILLMMAFAVEKYGIHTFRAKISESNMASLKLFRKLGFKDASYSVVFKEVTLEAPADSLPLRFPLTIGDW

SEQ ID NO: 8231 - DNA, 1726 bp, Zea mays subsp. mays
  misc_feature (1)..(1726): Ceres Seq. ID no. 12359767
  misc_feature: MA Experiment ID: 108523 Result: Up-regulated in Transcription
  misc_feature: MA Experiment 108523 PARAMETER Experiment Name: Zm_42deg_Heat_P Parameter: Age (day) Value: 8
  misc_feature: MA Experiment 108523 PARAMETER Experiment Name: Zm_42deg_Heat_P Parameter: Organism Value: Zea mays
  misc_feature: MA Experiment 108523 PARAMETER Experiment Name: Zm_42deg_Heat_P Parameter: Plant Line Value: 35A19
  misc_feature: MA Experiment 108523 PARAMETER Experiment Name: Zm_42deg_Heat_P Parameter: Temperature (deg C) Value: 42 vs. 22
  misc_feature: MA Experiment 108523 PARAMETER Experiment Name: Zm_42deg_Heat_P Parameter: Timepoint (hr) Value: 6
  misc_feature: MA Experiment 108523 PARAMETER Experiment Name: Zm_42deg_Heat_P Parameter: Tissue Value: Aerial
  misc_feature: MA Experiment ID: 108529 Result: Down-regulated in Transcription
  misc_feature: MA Experiment 108529 PARAMETER Experiment Name: Zm_Imbibed_Seeds_P Parameter: Age (day) Value: 5 vs. 2
  misc_feature: MA Experiment 108529 PARAMETER Experiment Name: Zm_Imbibed_Seeds_P Parameter: Organism Value: Zea mays
  misc_feature: MA Experiment 108529 PARAMETER Experiment Name: Zm_Imbibed_Seeds_P Parameter: Plant Line Value: 35A19
  misc_feature: MA Experiment 108529 PARAMETER Experiment Name: Zm_Imbibed_Seeds_P Parameter: Tissue Value: Roots vs. Embryo
  misc_feature: MA Experiment ID: 108544 Result: Down-regulated in Transcription
  misc_feature: MA Experiment ID: 108546 Result: Down-regulated in Transcription
  misc_feature: MA Experiment 108546 PARAMETER Experiment Name: Zm_Imbibed_Seeds_P Parameter: Age (day) Value: 3 vs. 2
  misc_feature: MA Experiment 108546 PARAMETER Experiment Name: Zm_Imbibed_Seeds_P Parameter: Organism Value: Zea mays
  misc_feature: MA Experiment 108546 PARAMETER Experiment Name: Zm_Imbibed_Seeds_P Parameter: Plant Line Value: 35A19
  misc_feature: MA Experiment 108546 PARAMETER Experiment Name: Zm_Imbibed_Seeds_P Parameter: Tissue Value: Roots vs. Embryo
  misc_feature: MA Experiment ID: 108687 Result: Up-regulated in Transcription
  misc_feature: MA Experiment 108687 PARAMETER Experiment Name: Zm_Embryos-Flowers__P Parameter: Tissue Value: Embryo vs. Aerial+
  misc_feature: MA Experiment ID: 20000492 Result: Up-regulated in Transcription
  misc_feature: MA Experiment 20000492 PARAMETER Experiment Name: Zm_Hybrid_Seed_Dev_P Parameter: DAP Value: 12
  misc_feature: MA Experiment 20000492 PARAMETER Experiment Name: Zm_Hybrid_Seed_Dev_P Parameter: Organism Value: Zea mays
  misc_feature: MA Experiment 20000492 PARAMETER Experiment Name: Zm_Hybrid_Seed_Dev_P Parameter: Plant Line Value: 35A19
  misc_feature: MA Experiment 20000492 PARAMETER Experiment Name: Zm_Hybrid_Seed_Dev_P Parameter: Tissue Value: Fert Kernel vs. Unfert Floret
  misc_feature: MA Experiment ID: 20000535 Result: Up-regulated in Transcription
  misc_feature: MA Experiment 20000535 PARAMETER Experiment Name: Zm_Hybrid_Seed_Dev_P Parameter: DAP Value: 30 vs. 12
  misc_feature: MA Experiment 20000535 PARAMETER Experiment Name: Zm_Hybrid_Seed_Dev_P Parameter: Organism Value: Zea mays
  misc_feature: MA Experiment 20000535 PARAMETER Experiment Name: Zm_Hybrid_Seed_Dev_P Parameter: Plant Line Value: 35A19
  misc_feature: MA Experiment 20000535 PARAMETER Experiment Name: Zm_Hybrid_Seed_Dev_P Parameter: Tissue Value: Embryo vs. Unfert Floret
  misc_feature: MA Experiment ID: 20000632 Result: Down-regulated in Transcription
  misc_feature: MA Experiment 20000632 PARAMETER Experiment Name: Zm_Herbicide-Treatments_P Parameter: Timepoint (hr) Value: 4
  misc_feature: MA Experiment 20000632 PARAMETER Experiment Name: Zm_Herbicide-Treatments_P Parameter: Tissue Value: Aerial
  misc_feature: MA Experiment 20000632 PARAMETER Experiment Name: Zm_Herbicide-Treatments_P Parameter: Treatment Value: Glean vs. No Treatment
aatcaggccacaggggggctcccacttcttcctcctcgacagtcctcagtcctccgtgcgaaatctgttcgcactcgcagtcgcagtcaccactgttctccagggatggcgccgtgttgcctgctccagatcggttggtgtctcgagcgcccccgtggctttcgcctcgccgcggcgctgtgcgcggctgtggtcgcgctggcgctggcgcccgccttggatgccacgtcggcgtcgcttctgggcatcaactacggccgcgtggggaacaacctcccgccgcctcagtccgtcatgccgctgctcgagggcctcggtattggccgcgtgcggatgtacgacgccgaccccaccgtgctgcgcgcgttcgcccggaccggggtcgagctcatcgtcggcgtgcccgacgagtgcctggccgccgtggccgacccgagcggcgcggcacagtggctcaaggagaacgtcgcgcctttcctgccggacacgaagatctccgtgctcgccgtcggcaacgaggtgctcaccggcgccaacagctccacgctgtcgcgcaccctcctcccggcgatgcagtccctgcacggcgcggtggccgcgctcggcctcgacaagcagatcaccgtcacctcggcgcacaacctcggcgtgctcgggacgtcgtacccgccctcggcgggggccttccgcaaggacctgctcccgtacctctgccccatcctggactaccatgccaggaccggctcgccgttcctcgtgaaacgcgtatccctacttcgcctactccagcgaccccaggggcgtgcagcttgactacgcgctgctcgacccgggcttcgccggcgtgcaggaccccaactccaggctgcactaccccaacctcctcgtggcgcaggtggacgcggtgtaccacgccatcgcggcggccaataccgcggcgtcgcgggtggtggaggtgcgggtctcggagaccggctggccctccgcgggggccgccaacgagacggccgcgacgccgcagaacgcggcgcgctacaacagcaacgcgatgcgcctggtggcggaggacaagggcacgccgctcaagcccggggcgccgctccgcgcctacgtgttcgcgctcttcaacgagaacctcaagcccgggttggcgtctgagcgctactacggcctcttcaagcccgacggcacgccggcgtacgagctctccttcaagctaccgcgcgacaactccacgtttggtcacggcgataccggcaagggcggtggcggaatcggcggtaacggcaatggcaatggcagcagctggaacaatagcggcggcggaaacagcggctactatgacatctcggcttcagcacgtgacactacgggtcactggcggatgtgggcgcaggcggccatggcaggagcagtagccgtcctgacactgtagcgccaagggtaggatcaggaatggagcggagttgccgtcctggggcagcggcctgatttggtgctcctcgtatgctgtagtttctgagaccgacctgtgactgtgagtgaccttgtgcttccggaaatctggtggcatctaaagcactcctagttttaagcagcgctggatcaggtttgcctgcctgcttgaaatgaaaccctttccaaatactggtagcaccctggtaaaaatcctctaaaatagtgctgcgctgcttcgttttagacaacgctgttaattccggtcttt

SEQ ID NO: 8232 - protein, 471 aa, Zea mays subsp. mays
  peptide (1)..(471): Ceres Seq. ID no. 12359768
  misc_feature (249)..(449): Pfam Name: Equine herpesvirus glycoprotein gp2 Pfam Description: Equine herpesvirus glycoprotein gp2
  misc_feature (251)..(467): Homolog of NCBI NO: 28574039 NR Description: Salivary gland secretion 1 CG3047-PA
  misc_feature (251)..(459): Homolog of NCBI NO: 28574039 NR Description: Salivary gland secretion 1 CG3047-PA
  misc_feature (31)..(449): Homolog of NCBI NO: 29247944 NR Description: GLP_26_54603_52153 [Giardia lamblia ATCC 50803]
  misc_feature (251)..(459): Homolog of NCBI NO: 28574039 NR Description: Salivary gland secretion 1 CG3047-PA
SGHRGAPTSSSSTVLSPPCEICSHSQSQSPLFSRDGAVLPAPDRLVSRAPPWLSPRRGAVRGCGRAGAGARLGCHVGVASGHQLRPRGEQPPAASVRHAAARGPRYWPRADVRRRPHRAARVRPDRGRAHRRRARRVPGRRGRPERRGTVAQGERRAFPAGHEDLRARRRQRGAHRRQQLHAVAHPPPGDAVPARRGGRARPRQADHRHLGAQPRRARDVVPALGGGLPQGPAPVPLPHPGLPCQDRLAVPRETRIPTSPTPATPGACSLTTRCSTRASPACRTPTPGCTTPTSSWRRWTRCTTPSRRPIPRRRGWWRCGSRRPAGPPRGPPTRRPRRRRTRRATTATRCAWWRRTRARRSSPGRRSAPTCSRSSTRTSSPGWRLSATTASSSPTARRRTSSPSSYRATTPRLVTAIPARAVAESAVTAMAMAAAGTIAAAETAATMTSRLQHVTLRVTGGCGRRRPWQEQ

SEQ ID NO: 8233 - protein, 270 aa, Zea mays subsp. mays
  peptide (1)..(270): Ceres Seq. ID no. 12359769
  misc_feature (81)..(267): Pfam Name: Glycosyl hydrolases family 17 Pfam Description: Glycosyl hydrolases family 17
  misc_feature (60)..(267): Homolog of NCBI NO: 37531294 NR Description: putative beta-1,3-glucanase [Oryza sativa
  misc_feature (64)..(253): Homolog of NCBI NO: 6006371 NR Description: Similar to hypothetical protein - potato (S31196)
  misc_feature (76)..(253): Homolog of NCBI NO: 419789 NR Description: hypothetical protein - potato
  misc_feature (79)..(266): Homolog of NCBI NO: 15238298 NR Description: glycosyl hydrolase family 17; protein id: supported by cDNA: 11988., supported by cDNA: gi_15451219
  misc_feature (64)..(253): Homolog of NCBI NO: 30692765 NR Description: glycosyl hydrolase family 17 [Arabidopsis
  misc_feature (64)..(253): Homolog of NCBI NO: 25316443 NR Description: CDS protein F9L11.6 [imported] - Arabidopsis
  misc_feature (64)..(253): Homolog of NCBI NO: 38346337 NR Description: OSJNBa0073L04.8 [Oryza sativa (japonica
  misc_feature (57)..(253): Homolog of NCBI NO: 34908492 NR Description: putative beta-1,3-glucanase [Oryza sativa
  misc_feature (81)..(253): Homolog of NCBI NO: 18401444 NR Description: glycosyl hydrolase family 17; protein id: supported by cDNA: 1126., supported by cDNA: gi_17473571,
  misc_feature (81)..(253): Homolog of NCBI NO: 25316425 NR Description: probable beta-1,3-glucanase [imported] -
NQATGGLPLLPPRQSSVLRAKSVRTRSRSHHCSPGMAPCCLLQIGWCLERPRGFRLAAALCAAVVALALAPALDATSASLLGINYGRVGNNLPPPQSVMPLLEGLGIGRVRMYDADPTVLRAFARTGVELIVGVPDECLAAVADPSGAAQWLKENVAPFLPDTKISVLAVGNEVLTGANSSTLSRTLLPAMQSLHGAVAALGLDKQITVTSAHNLGVLGTSYPPSAGAFRKDLLPYLCPILDYHARTGSPFLVKRVSLLRLLQRPQGRAA

SEQ ID NO: 8234 - protein, 252 aa, Zea mays subsp. mays
  peptide (1)..(252): Ceres Seq. ID no. 12359770
  misc_feature (101)..(242): Pfam Name: Equine herpesvirus glycoprotein gp2 Pfam Description: Equine herpesvirus glycoprotein gp2
  misc_feature (97)..(245): Homolog of NCBI NO: 28574039 NR Description: Salivary gland secretion 1 CG3047-PA
  misc_feature (41)..(243): Homolog of NCBI NO: 28574039 NR Description: Salivary gland secretion 1 CG3047-PA
  misc_feature (83)..(243): Homolog of NCBI NO: 28574039 NR Description: Salivary gland secretion 1 CG3047-PA
  misc_feature (70)..(243): Homolog of NCBI NO: 28574039 NR Description: Salivary gland secretion 1 CG3047-PA
IRPQGGSHFFLLDSPQSSVRNLFALAVAVTTVLQGWRRVACSRSVGVSSAPVAFASPRRCARLWSRWRWRPPWMPRRRRFWASTTAAWGTTSRRLSPSCRCSRASVLAACGCTTPTPPCCARSPGPGSSSSSACPTSAWPPWPTRAARHSGSRRTSRLSCRTRRSPCSPSATRCSPAPTAPRCRAPSSRRCSPCTARWPRSASTSRSPSPRRTTSACSGRRTRPRRGPSARTCSRTSAPSWTTMPGPARRSS

SEQ ID NO: 8235 - DNA, 1105 bp, Zea mays subsp. mays
  misc_feature (1)..(1105): Ceres Seq. ID no. 12404952
  misc_feature: MA Experiment ID: 20000534 Result: Down-regulated in Transcription
  misc_feature: MA Experiment 20000534 PARAMETER Experiment Name: Zm_Hybrid_Pollen_P Parameter: Age (day) Value: 8
  misc_feature: MA Experiment 20000534 PARAMETER Experiment Name: Zm_Hybrid_Pollen_P Parameter: Organism Value: Zea mays
  misc_feature: MA Experiment 20000534 PARAMETER Experiment Name: Zm_Hybrid_Pollen_P Parameter: Plant Line Value: 35A19
  misc_feature: MA Experiment 20000534 PARAMETER Experiment Name: Zm_Hybrid_Pollen_P Parameter: Tissue Value: Pollen vs. Aerial
accagccgaaaccgaggctgacgctgcgcgagccaaccggcggtgatgcaggcggcagtcggccaccgcggcgccaaccttggctccccgtcactctcgcgcttccggtatggctcccgcctccccggccggtcccgcctcttctctgagggcgtggcggtggcgccactccgcgtcggctctctgccccagccacggacccatggcagcggcggtttcgcgcacctcggggccatggatggggaggcgccgaggctgccgcacgccctcaggagaatgcttatcgatcatcagaaaatggcatgtcccaaccttctgaaagctgctgtactttcaaccatgacattgcttgctgtacctcttgaggcgtcagcggagatgtgccagccacctagttctttcgccaatatgccaatttttattgttgtagctctaataggagctgctgttggcggattattagcacgccaaagaaaggcggaattgaagcggctcaataatcaacttcgccagatcaatgcagcacttagaaggcaggcacagattgagtcatttgcgcctggccttacttatgcgccagttgggagaacaaatgaaactgatgttattgttgacccaaggaagcagcagttggtcacaaacctgagaaatgggaagaattacatgaggaatcaagatcttgataaggctatagtggagttcagaacagctctggagcttgcagagagcataggtgatcgttttgaagaaaagaaagctgcccgaggactagaggctcgggaagtaccgagaagcaatgagacagtacagcaaggttctggagctgtccaaggagacaggtgaagattccggctgcaccgaggcctacggtgccatagcggactgctacaccgagctgggcgacctggagcgagcggcgaaggtgtatgacaagtacatatcgaggctgcagcccggcgagtaaggtagatttctttacagacgagacagcgagttccttcccgttcgttgagttttgtgttttgtcggtcttgttaaactcactgcaggtattggattgttttgagaacggttttaatattcgtatataaataactattgattt

SEQ ID NO: 8236 - protein, 265 aa, Zea mays subsp. mays
  peptide (1)..(265): Ceres Seq. ID no. 12404953
  misc_feature (73)..(244): Homolog of NCBI NO: 34914598 NR Description: P0520B06.12 [Oryza sativa (japonica
  misc_feature (94)..(244): Homolog of NCBI NO: 9294636 NR Description: emb|CAB41081.1~gene_id:MAG2.7~similar to unknown
  misc_feature (94)..(244): Homolog of NCBI NO: 18400278 NR Description: expressed protein; protein id: At3g14110.1, by cDNA: 36370., supported by cDNA: gi_15450618, supported by gi_17386153 [Arabidopsis thaliana] >gi|15450619|gb|AAK96581.1|
MQAAVGHRGANLGSPSLSRFRYGSRLPGRSRLFSEGVAVAPLRVGSLPQPRTHGSGGFAHLGAMDGEAPRLPHALRRMLIDHQKMACPNLLKAAVLSTMTLLAVPLEASAEMCQPPSSFANMPIFIVVALIGAAVGGLLARQRKAELKRLNNQLRQINAALRRQAQIESFAPGLTYAPVGRTNETDVIVDPRKQQLVTNLRNGKNYMRNQDLDKAIVEFRTALELAESIGDRFEEKKAARGLEAREVPRSNETVQQGSGAVQGDR

SEQ ID NO: 8237 - protein, 202 aa, Zea mays subsp. mays
  peptide (1)..(202): Ceres Seq. ID no. 12404954
  misc_feature (10)..(181): Homolog of NCBI NO: 34914598 NR Description: P0520B06.12 [Oryza sativa (japonica
  misc_feature (31)..(181): Homolog of NCBI NO: 9294636 NR Description: emb|CAB41081.1~gene_id:MAG2.7~similar to unknown
  misc_feature (31)..(181): Homolog of NCBI NO: 18400278 NR Description: expressed protein; protein id: At3g14110.1, by cDNA: 36370., supported by cDNA: gi_15450618, supported by gi_17386153 [Arabidopsis thaliana] >gi|15450619|gb|AAK96581.1|
MDGEAPRLPHALRRMLIDHQKMACPNLLKAAVLSTMTLLAVPLEASAEMCQPPSSFANMPIFIVVALIGAAVGGLLARQRKAELKRLNNQLRQINAALRRQAQIESFAPGLTYAPVGRTNETDVIVDPRKQQLVTNLRNGKNYMRNQDLDKAIVEFRTALELAESIGDRFEEKKAARGLEAREVPRSNETVQQGSGAVQGDR

SEQ ID NO: 8238 - protein, 188 aa, Zea mays subsp. mays
  peptide (1)..(188): Ceres Seq. ID no. 12404955
  misc_feature (1)..(167): Homolog of NCBI NO: 34914598 NR Description: P0520B06.12 [Oryza sativa (japonica
  misc_feature (17)..(167): Homolog of NCBI NO: 9294636 NR Description: emb|CAB41081.1~gene_id:MAG2.7~similar to unknown
  misc_feature (17)..(167): Homolog of NCBI NO: 18400278 NR Description: expressed protein; protein id: At3g14110.1, by cDNA: 36370., supported by cDNA: gi_15450618, supported by gi_17386153 [Arabidopsis thaliana] >gi|15450619|gb|AAK96581.1|
MLIDHQKMACPNLLKAAVLSTMTLLAVPLEASAEMCQPPSSFANMPIFIVVALIGAAVGGLLARQRKAELKRLNNQLRQINAALRRQAQIESFAPGLTYAPVGRTNETDVIVDPRKQQLVTNLRNGKNYMRNQDLDKAIVEFRTALELAESIGDRFEEKKAARGLEAREVPRSNETVQQGSGAVQGDR

SEQ ID NO: 8239 - DNA, 1701 bp, Zea mays subsp. mays
  misc_feature (1)..(1701): Ceres Seq. ID no. 12406634
  misc_feature: MA Experiment ID: 108515 Result: Down-regulated in Transcription
  misc_feature: MA Experiment 108515 PARAMETER Experiment Name: Zm_2mM_SA_P Parameter: Age (day) Value: 8
  misc_feature: MA Experiment 108515 PARAMETER Experiment Name: Zm_2mM_SA_P Parameter: Organism Value: Zea mays
  misc_feature: MA Experiment 108515 PARAMETER Experiment Name: Zm_2mM_SA_P Parameter: Plant Line Value: 35A19
  misc_feature: MA Experiment 108515 PARAMETER Experiment Name: Zm_2mM_SA_P Parameter: Timepoint (hr) Value: 12
  misc_feature: MA Experiment 108515 PARAMETER Experiment Name: Zm_2mM_SA_P Parameter: Tissue Value: Aerial
  misc_feature: MA Experiment 108515 PARAMETER Experiment Name: Zm_2mM_SA_P Parameter: Treatment Value: 2mM SA vs. No Treatment
  misc_feature: MA Experiment ID: 108535 Result: Up-regulated in Transcription
  misc_feature: MA Experiment 108535 PARAMETER Experiment Name: Zm_Meristem_P Parameter: Age (day) Value: 8
  misc_feature: MA Experiment 108535 PARAMETER Experiment Name: Zm_Meristem_P Parameter: Organism Value: Zea mays
  misc_feature: MA Experiment 108535 PARAMETER Experiment Name: Zm_Meristem_P Parameter: Plant Line Value: 35A19
  misc_feature: MA Experiment 108535 PARAMETER Experiment Name: Zm_Meristem_P Parameter: Tissue Value: Root Meristem vs. Above Root Meristem
  misc_feature: MA Experiment ID: 108543 Result: Up-regulated in Transcription
  misc_feature: MA Experiment ID: 108559 Result: Down-regulated in Transcription
  misc_feature: MA Experiment 108559 PARAMETER Experiment Name: Zm_5mM_NO_P Parameter: Age (day) Value: 8
  misc_feature: MA Experiment 108559 PARAMETER Experiment Name: Zm_5mM_NO_P Parameter: Organism Value: Zea mays
  misc_feature: MA Experiment 108559 PARAMETER Experiment Name: Zm_5mM_NO_P Parameter: Plant Line Value: 35A19
  misc_feature: MA Experiment 108559 PARAMETER Experiment Name: Zm_5mM_NO_P Parameter: Timepoint (hr) Value: 12
  misc_feature: MA Experiment 108559 PARAMETER Experiment Name: Zm_5mM_NO_P Parameter: Tissue Value: Aerial
  misc_feature: MA Experiment 108559 PARAMETER Experiment Name: Zm_5mM_NO_P Parameter: Treatment Value: 5mM NO vs. No Treatment
  misc_feature: MA Experiment ID: 108597 Result: Down-regulated in Transcription
  misc_feature: MA Experiment 108597 PARAMETER Experiment Name: Zm_100uM_ABA_P Parameter: Age (day) Value: 9
  misc_feature: MA Experiment 108597 PARAMETER Experiment Name: Zm_100uM_ABA_P Parameter: Organism Value: Zea mays
  misc_feature: MA Experiment 108597 PARAMETER Experiment Name: Zm_100uM_ABA_P Parameter: Plant Line Value: 35A19
  misc_feature: MA Experiment 108597 PARAMETER Experiment Name: Zm_100uM_ABA_P Parameter: Timepoint (hr) Value: 24
  misc_feature: MA Experiment 108597 PARAMETER Experiment Name: Zm_100uM_ABA_P Parameter: Tissue Value: Aerial
  misc_feature: MA Experiment 108597 PARAMETER Experiment Name: Zm_100uM_ABA_P Parameter: Treatment Value: 100uM ABA vs. No Treatment
  misc_feature: MA Experiment ID: 20000108 Result: Up-regulated in Transcription
  misc_feature: MA Experiment 20000108 PARAMETER Experiment Name: Zm_Root-Tips_P Parameter: Age (day) Value: 12
  misc_feature: MA Experiment 20000108 PARAMETER Experiment Name: Zm_Root-Tips_P Parameter: Organism Value: Zea mays
  misc_feature: MA Experiment 20000108 PARAMETER Experiment Name: Zm_Root-Tips_P Parameter: Tissue Value: Root tips vs. Root mid region    35
  misc_feature: MA Experiment 20000108 PARAMETER Experiment Name: Zm_Root-Tips_P Parameter: Tissue Value: Root tips vs. Root mid region   Sequence Listing-Misc Features (4)
  misc_feature: MA Experiment ID: 20000632 Result: Down-regulated in Transcription
  misc_feature: MA Experiment 20000632 PARAMETER Experiment Name: Zm_Herbicide-Treatments_P Parameter: Timepoint (hr) Value: 4
  misc_feature: MA Experiment 20000632 PARAMETER Experiment Name: Zm_Herbicide-Treatments_P Parameter: Tissue Value: Aerial
  misc_feature: MA Experiment 20000632 PARAMETER Experiment Name: Zm_Herbicide-Treatments_P Parameter: Treatment Value: Glean vs. No Treatment
gttctcccggggctcttctccgtccgtaaggcaccgccgccgcgtctcggctggaccgacagttcggccgatccgtcttctcatcctcctcctccacctgcggctgtgcaggtcggcttcggggacgatggcggcgagggcggctgatgagaacagaaggccgggggtggggaggcccgcgccatgcgtccgagacatggggagccggcgcgcgctcacggacatcaagaacctcgtcggggttgccccgaacccctgcgccgtcgccaagaagcccgtgctgcagaagagcagaaaggacgaaaagaagacagcgttgccaagcagccggccaatgacaaggaaattcgtcgcctccttggcgagcaaagagcaacctaaatgtcagccgaccggagctgatccagaacccggagttgatcaacggaaggaaccaatcgttgatggcaccgttgatatcgacgtggaactgggcgagccggtcgacgatagtgatggtgacatcgacatgggtgatgagacagagaacaaggacattatgaaccaagatgaatcgctcatggatattgatagtgcagactcggggaacccgcttgcagcaacagaatatgttgaagagctttacaagttttacagagaaaatgaggctaagagttgtgtaaaccctgattacatgtccagtcagcaagatataaatgcaaagatgagagcaattctgattgactggctaattgaggttcactacaagtttgaactgatggatgagacgctatttcttacggtaaacgtaatagatagattcttggaaaaggaagtggttccaaggaagaagctacaactggttggaatcacagctctgcttcttgcttgcaaatatgaggaggtctcagttccagttgttgaggaccttgtgctcatttctgaccgtgcctacacaaaagggcaaattctagaaatggaaaagttgattctgaacacgctgcaattcaacatgtctgttccaacaccttatgtcttcatgaagaggtttctgaaagcagcagacgcagataaacagtttgagctagtgtcatttttcatgctggagctctgcttggtagagtaccaaatgctgaactataggccttcacatctggctgctgctgcggtttatactgcacaatgtgctattaaccgttgccagcagtggacaaaggtttgcgagtcacatagcagatacactggcgaccaactcctggagtgctcgaggatgattgtagactttcaccagaaggctggaaccggcaagctcactggcgtgcacaggaagtacagtacctacaagtttgggtgcgcggccaagattgtgcctgcgcagttcatgctggagtcaggagggacagcaccgcctccttcaggtgcaatctaattgaatcgccctgttttaactgggtgggggtttttttttttaaaagattttagcatattctccgtgaacaaaagatgcagaaaacatcgtgttgatgttgcccaaaagtgcatcgaattttcttggagaattatgattaactgttttttttctatccgtgtcctgaatgacgagtgacggactgttttttgttatactgcggctaataacgaactgtcctgttcaggaatgttgttggaaccttgtaaagaaaaacaagttctgaatcaaatggtcaaatggatcctttgtcc

SEQ ID NO: 8240 - protein, 468 aa, Zea mays subsp. mays
  peptide (1)..(468): Ceres Seq. ID no. 12406635
  misc_feature (206)..(332): Pfam Name: Cyclin, N-terminal domain Pfam Description: Cyclin, N-terminal domain
  misc_feature (48)..(458): Homolog of NCBI NO: 38345935 NR Description: OSJNBb0078D11.10 [Oryza sativa (japonica
  misc_feature (48)..(458): Homolog of NCBI NO: 6331704 NR Description: cyclin [Oryza sativa]
  misc_feature (68)..(457): Homolog of NCBI NO: 3913236 NR Description: G2/mitotic-specific cyclin 2 (B-like cyclin)
  misc_feature (64)..(457): Homolog of NCBI NO: 1168893 NR Description: G2/mitotic-specific cyclin 1 (B-like cyclin) >gi|914861|emb|CAA57559.1| cycMs1 [Medicago sativa subsp. x
  misc_feature (64)..(457): Homolog of NCBI NO: 1362054 NR Description: mitosis-specific cyclin CycIII - alfalfa
  misc_feature (51)..(455): Homolog of NCBI NO: 22330658 NR Description: Cyclin B2;4; protein id: At1g76310.1 [Arabidopsis
  misc_feature (68)..(455): Homolog of NCBI NO: 25294186 NR Description: hypothetical protein F15M4.19 [imported] -
  misc_feature (68)..(457): Homolog of NCBI NO: 2130122 NR Description: cyclin III - maize >gi|516548|gb|AAA20236.1|
  misc_feature (68)..(455): Homolog of NCBI NO: 15217987 NR Description: Cyclin B2;3; protein id: At1g20610.1 [Arabidopsis
  misc_feature (68)..(455): Homolog of NCBI NO: 25294182 NR Description: protein F2D10.10 [imported] - Arabidopsis >gi|8778595|gb|AAF79603.1|AC027665_4 F5M15.6 [Arabidopsis >gi|8886952|gb|AAF80638.1|AC069251_31 F2D10.10 [Arabidopsis
FSRGSSPSVRHRRRVSAGPTVRPIRLLILLLHLRLCRSASGTMAARAADENRRPGVGRPAPCVRDMGSRRALTDIKNLVGVAPNPCAVAKKPVLQKSRKDEKKTALPSSRPMTRKFVASLASKEQPKCQPTGADPEPGVDQRKEPIVDGTVDIDVELGEPVDDSDGDIDMGDETENKDIMNQDESLMDIDSADSGNPLAATEYVEELYKFYRENEAKSCVNPDYMSSQQDINAKMRAILIDWLIEVHYKFELMDETLFLTVNVIDRFLEKEVVPRKKLQLVGITALLLACKYEEVSVPVVEDLVLISDRAYTKGQILEMEKLILNTLQFNMSVPTPYVFMKRFLKAADADKQFELVSFFMLELCLVEYQMLNYRPSHLAAAAVYTAQCAINRCQQWTKVCESHSRYTGDQLLECSRMIVDFHQKAGTGKLTGVHRKYSTYKFGCAAKIVPAQFMLESGGTAPPPSGAI

SEQ ID NO: 8241 - protein, 426 aa, Zea mays subsp. mays
  peptide (1)..(426): Ceres Seq. ID no. 12406636
  misc_feature (164)..(290): Pfam Name: Cyclin, N-terminal domain Pfam Description: Cyclin, N-terminal domain
  misc_feature (6)..(416): Homolog of NCBI NO: 38345935 NR Description: OSJNBb0078D11.10 [Oryza sativa (japonica
  misc_feature (6)..(416): Homolog of NCBI NO: 6331704 NR Description: cyclin [Oryza sativa]
  misc_feature (26)..(415): Homolog of NCBI NO: 3913236 NR Description: G2/mitotic-specific cyclin 2 (B-like cyclin)
  misc_feature (22)..(415): Homolog of NCBI NO: 1168893 NR Description: G2/mitotic-specific cyclin 1 (B-like cyclin) >gi|914861|emb|CAA57559.1| cycMs1 [Medicago sativa subsp. x
  misc_feature (22)..(415): Homolog of NCBI NO: 1362054 NR Description: mitosis-specific cyclin CycIII - alfalfa
  misc_feature (9)..(413): Homolog of NCBI NO: 22330658 NR Description: Cyclin B2;4; protein id: At1g76310.1 [Arabidopsis
  misc_feature (26)..(413): Homolog of NCBI NO: 25294186 NR Description: hypothetical protein F15M4.19 [imported] -
  misc_feature (26)..(415): Homolog of NCBI NO: 2130122 NR Description: cyclin III - maize >gi|516548|gb|AAA20236.1|
  misc_feature (26)..(413): Homolog of NCBI NO: 15217987 NR Description: Cyclin B2;3; protein id: At1g20610.1 [Arabidopsis
  misc_feature (26)..(413): Homolog of NCBI NO: 25294182 NR Description: protein F2D10.10 [imported] - Arabidopsis >gi|8778595|gb|AAF79603.1|AC027665_4 F5M15.6 [Arabidopsis >gi|8886952|gb|AAF80638.1|AC069251_31 F2D10.10 [Arabidopsis
MAARAADENRRPGVGRPAPCVRDMGSRRALTDIKNLVGVAPNPCAVAKKPVLQKSRKDEKKTALPSSRPMTRKFVASLASKEQPKCQPTGADPEPGVDQRKEPIVDGTVDIDVELGEPVDDSDGDIDMGDETENKDIMNQDESLMDIDSADSGNPLAATEYVEELYKFYRENEAKSCVNPDYMSSQQDINAKMRAILIDWLIEVHYKFELMDETLFLTVNVIDRFLEKEVVPRKKLQLVGITALLLACKYEEVSVPVVEDLVLISDRAYTKGQILEMEKLILNTLQFNMSVPTPYVFMKRFLKAADADKQFELVSFFMLELCLVEYQMLNYRPSHLAAAAVYTAQCAINRCQQWTKVCESHSRYTGDQLLECSRMIVDFHQKAGTGKLTGVHRKYSTYKFGCAAKIVPAQFMLESGGTAPPPSGAI

SEQ ID NO: 8242 - protein, 403 aa, Zea mays subsp. mays
  peptide (1)..(403): Ceres Seq. ID no. 12406637
  misc_feature (141)..(267): Pfam Name: Cyclin, N-terminal domain Pfam Description: Cyclin, N-terminal domain
  misc_feature (1)..(393): Homolog of NCBI NO: 38345935 NR Description: OSJNBb0078D11.10 [Oryza sativa (japonica
  misc_feature (1)..(393): Homolog of NCBI NO: 6331704 NR Description: cyclin [Oryza sativa]
  misc_feature (3)..(392): Homolog of NCBI NO: 3913236 NR Description: G2/mitotic-specific cyclin 2 (B-like cyclin)
  misc_feature (1)..(392): Homolog of NCBI NO: 1168893 NR Description: G2/mitotic-specific cyclin 1 (B-like cyclin) >gi|914861|emb|CAA57559.1| cycMs1 [Medicago sativa subsp. x
  misc_feature (1)..(392): Homolog of NCBI NO: 1362054 NR Description: mitosis-specific cyclin CycIII - alfalfa
  misc_feature (1)..(390): Homolog of NCBI NO: 22330658 NR Description: Cyclin B2;4; protein id: At1g76310.1 [Arabidopsis
  misc_feature (3)..(390): Homolog of NCBI NO: 25294186 NR Description: hypothetical protein F15M4.19 [imported] -
  misc_feature (3)..(392): Homolog of NCBI NO: 2130122 NR Description: cyclin III - maize >gi|516548|gb|AAA20236.1|
  misc_feature (3)..(390): Homolog of NCBI NO: 15217987 NR Description: Cyclin B2;3; protein id: At1g20610.1 [Arabidopsis
  misc_feature (3)..(390): Homolog of NCBI NO: 25294182 NR Description: protein F2D10.10 [imported] - Arabidopsis >gi|8778595|gb|AAF79603.1|AC027665_4 F5M15.6 [Arabidopsis >gi|8886952|gb|AAF80638.1|AC069251_31 F2D10.10 [Arabidopsis
MGSRRALTDIKNLVGVAPNPCAVAKKPVLQKSRKDEKKTALPSSRPMTRKFVASLASKEQPKCQPTGADPEPGVDQRKEPIVDGTVDIDVELGEPVDDSDGDIDMGDETENKDIMNQDESLMDIDSADSGNPLAATEYVEELYKFYRENEAKSCVNPDYMSSQQDINAKMRAILIDWLIEVHYKFELMDETLFLTVNVIDRFLEKEVVPRKKLQLVGITALLLACKYEEVSVPVVEDLVLISDRAYTKGQILEMEKLILNTLQFNMSVPTPYVFMKRFLKAADADKQFELVSFFMLELCLVEYQMLNYRPSHLAAAAVYTAQCAINRCQQWTKVCESHSRYTGDQLLECSRMIVDFHQKAGTGKLTGVHRKYSTYKFGCAAKIVPAQFMLESGGTAPPPSGAI

SEQ ID NO: 8243 - DNA, 831 bp, Zea mays subsp. mays
  misc_feature (1)..(831): Ceres Seq. ID no. 12373480
  misc_feature: MA Experiment ID: 108530 Result: Down-regulated in Transcription
  misc_feature: MA Experiment 108530 PARAMETER Experiment Name: Zm_Imbibed_Seeds_P Parameter: Age (day) Value: 6 vs. 2
  misc_feature: MA Experiment 108530 PARAMETER Experiment Name: Zm_Imbibed_Seeds_P Parameter: Organism Value: Zea mays
  misc_feature: MA Experiment 108530 PARAMETER Experiment Name: Zm_Imbibed_Seeds_P Parameter: Plant Line Value: 35A19
  misc_feature: MA Experiment 108530 PARAMETER Experiment Name: Zm_Imbibed_Seeds_P Parameter: Tissue Value: Aerial vs. Embryo
  misc_feature: MA Experiment ID: 20000492 Result: Up-regulated in Transcription
  misc_feature: MA Experiment 20000492 PARAMETER Experiment Name: Zm_Hybrid_Seed_Dev_P Parameter: DAP Value: 12
  misc_feature: MA Experiment 20000492 PARAMETER Experiment Name: Zm_Hybrid_Seed_Dev_P Parameter: Organism Value: Zea mays
  misc_feature: MA Experiment 20000492 PARAMETER Experiment Name: Zm_Hybrid_Seed_Dev_P Parameter: Plant Line Value: 35A19
  misc_feature: MA Experiment 20000492 PARAMETER Experiment Name: Zm_Hybrid_Seed_Dev_P Parameter: Tissue Value: Fert Kernel vs. Unfert Floret
aagatcagatcacactcgtagagagaaggaaaaatatccccaaaccctagctcccgatctcgatggcgaaccctcgcgtcttcttcgacatgaccgtcggcggcgccccggcgggccggatcgtgatggagctgtacgccaacgaggtgcccaagaccgcggagaacttccgcgcgctgtgcacgggcgagaagggcgtgggcaagtccgggaagccgctccactacaagggctccaccttccaccgcgtcatccccgagttcatgtgccagggcggcgacttcacccgcggcaacggcaccggcggcgagtccatctacggcgagaagttccccgacgagaagttcgtgcgcaagcacaccgctcccggtgtgctctccatggccaacgccgggcccaacaccaacggctcccagttcttcatctgcaccgtcgcgaccccttggctcgacggcaagcacgtcgtcttcggccaggtcgtcgagggcatggacgtcgtcaaggccatcgagaaggtgggcacccgcaacggctccacctccaaggtggtcaaggtcgctgactgcggacagctctcctagatctctctgatctggtctgttcggccgccctccctccgtcatcgtcgactccccctgcgtccgttcctttggatctgaataagatggtggtgatctgagtggtggtcttagtttatcatgtatcgctcgcagtttaatttagcggtttaggtgtggatctgtgaaccccatggcgcctctgcttgattcgtgtttcacctgttatgttctgagattcatgataatgctatgagaactgaaattcccgttt

SEQ ID NO: 8244 - protein, 186 aa, Zea mays subsp. mays
  peptide (1)..(186): Ceres Seq. ID no. 12373481
RSDHTRREKEKYPQTLAPDLDGEPSRLLRHDRRRRPGGPDRDGAVRQRGAQDRGELPRAVHGREGRGQVREAAPLQGLHLPPRHPRVHVPGRRLHPRQRHRRRVHLRREVPRREVRAQAHRSRCALHGQRRAQHQRLPVLHLHRRDPLARRQARRLRPGRRGHGRRQGHREGGHPQRLHLQGGQGR

SEQ ID NO: 8245 - protein, 172 aa, Zea mays subsp. mays
  peptide (1)..(172): Ceres Seq. ID no. 12373482
  misc_feature (1)..(172): Homolog of NCBI NO: 118104 NR Description: Peptidyl-prolyl cis-trans isomerase (PPIase)
  misc_feature (1)..(172): Homolog of NCBI NO: 1084455 NR Description: peptidylprolyl isomerase (EC 5.2.1.8) Cyp2 - rice
  misc_feature (1)..(171): Homolog of NCBI NO: 13925731 NR Description: cyclophilin A-1 [Triticum aestivum]
  misc_feature (1)..(171): Homolog of NCBI NO: 13925734 NR Description: cyclophilin A-2 [Triticum aestivum]
  misc_feature (1)..(172): Homolog of NCBI NO: 600769 NR Description: cyclophilin 2
  misc_feature (1)..(172): Homolog of NCBI NO: 18376589 NR Description: putative cyclosporin A-binding protein [Picea
  misc_feature (2)..(172): Homolog of NCBI NO: 18076088 NR Description: cyclophilin [Ricinus communis]
  misc_feature (1)..(171): Homolog of NCBI NO: 11270316 NR Description: peptidylprolyl isomerase (EC 5.2.1.8) - Digitalis lanata >gi|1563719|emb|CAA69622.1| cyclophylin
  misc_feature (1)..(172): Homolog of NCBI NO: 3334157 NR Description: Peptidyl-prolyl cis-trans isomerase (PPIase)
  misc_feature (1)..(171): Homolog of NCBI NO: 11270318 NR Description: peptidylprolyl isomerase (EC 5.2.1.8) CYP18 - Digitalis lanata >gi|1561575|emb|CAA69598.1| cyclophilin
MANPRVFFDMTVGGAPAGRIVMELYANEVPKTAENFRALCTGEKGVGKSGKPLHYKGSTFHRVIPEFMCQGGDFTRGNGTGGESIYGEKFPDEKFVRKHTAPGVLSMANAGPNTNGSQFFICTVATPWLDGKHVVFGQVVEGMDVVKAIEKVGTRNGSTSKVVKVADCGQLS

SEQ ID NO: 8246 - protein, 163 aa, Zea mays subsp. mays
  peptide (1)..(163): Ceres Seq. ID no. 12373483
  misc_feature (1)..(163): Homolog of NCBI NO: 118104 NR Description: Peptidyl-prolyl cis-trans isomerase (PPIase)
  misc_feature (1)..(163): Homolog of NCBI NO: 1084455 NR Description: peptidylprolyl isomerase (EC 5.2.1.8) Cyp2 - rice
  misc_feature (1)..(162): Homolog of NCBI NO: 13925731 NR Description: cyclophilin A-1 [Triticum aestivum]
  misc_feature (1)..(162): Homolog of NCBI NO: 13925734 NR Description: cyclophilin A-2 [Triticum aestivum]
  misc_feature (1)..(163): Homolog of NCBI NO: 600769 NR Description: cyclophilin 2
  misc_feature (1)..(163): Homolog of NCBI NO: 18376589 NR Description: putative cyclosporin A-binding protein [Picea
  misc_feature (1)..(163): Homolog of NCBI NO: 18076088 NR Description: cyclophilin [Ricinus communis]
  misc_feature (1)..(162): Homolog of NCBI NO: 11270316 NR Description: peptidylprolyl isomerase (EC 5.2.1.8) - Digitalis lanata >gi|1563719|emb|CAA69622.1| cyclophylin
  misc_feature (1)..(163): Homolog of NCBI NO: 3334157 NR Description: Peptidyl-prolyl cis-trans isomerase (PPIase)
  misc_feature (1)..(162): Homolog of NCBI NO: 11270318 NR Description: peptidylprolyl isomerase (EC 5.2.1.8) CYP18 - Digitalis lanata >gi|1561575|emb|CAA69598.1| cyclophilin
MTVGGAPAGRIVMELYANEVPKTAENFRALCTGEKGVGKSGKPLHYKGSTFHRVIPEFMCQGGDFTRGNGTGGESIYGEKFPDEKFVRKHTAPGVLSMANAGPNTNGSQFFICTVATPWLDGKHVVFGQVVEGMDVVKAIEKVGTRNGSTSKVVKVADCGQLS

SEQ ID NO: 8247 - DNA, 1573 bp, Zea mays subsp. mays
  misc_feature (1)..(1573): Ceres Seq. ID no. 12344354
  misc_feature: MA Experiment ID: 108504 Result: Down-regulated in Transcription
  misc_feature: MA Experiment 108504 PARAMETER Experiment Name: Zm_Drought_P Parameter: Age (day) Value: 8
  misc_feature: MA Experiment 108504 PARAMETER Experiment Name: Zm_Drought_P Parameter: Organism Value: Zea mays
  misc_feature: MA Experiment 108504 PARAMETER Experiment Name: Zm_Drought_P Parameter: Plant Line Value: 35A19
  misc_feature: MA Experiment 108504 PARAMETER Experiment Name: Zm_Drought_P Parameter: Timepoint (hr) Value: 12
  misc_feature: MA Experiment 108504 PARAMETER Experiment Name: Zm_Drought_P Parameter: Tissue Value: Aerial
  misc_feature: MA Experiment 108504 PARAMETER Experiment Name: Zm_Drought_P Parameter: Treatment Value: Drought vs. No Drought
  misc_feature: MA Experiment ID: 108523 Result: Down-regulated in Transcription
  misc_feature: MA Experiment 108523 PARAMETER Experiment Name: Zm_42deg_Heat_P Parameter: Age (day) Value: 8
  misc_feature: MA Experiment 108523 PARAMETER Experiment Name: Zm_42deg_Heat_P Parameter: Organism Value: Zea mays
  misc_feature: MA Experiment 108523 PARAMETER Experiment Name: Zm_42deg_Heat_P Parameter: Plant Line Value: 35A19
  misc_feature: MA Experiment 108523 PARAMETER Experiment Name: Zm_42deg_Heat_P Parameter: Temperature (deg C) Value: 42 vs. 22
  misc_feature: MA Experiment 108523 PARAMETER Experiment Name: Zm_42deg_Heat_P Parameter: Timepoint (hr) Value: 6
  misc_feature: MA Experiment 108523 PARAMETER Experiment Name: Zm_42deg_Heat_P Parameter: Tissue Value: Aerial
  misc_feature: MA Experiment ID: 108527 Result: Down-regulated in Transcription
  misc_feature: MA Experiment 108527 PARAMETER Experiment Name: Zm_5mM_NO_P Parameter: Age (day) Value: 8
  misc_feature: MA Experiment 108527 PARAMETER Experiment Name: Zm_5mM_NO_P Parameter: Organism Value: Zea mays
  misc_feature: MA Experiment 108527 PARAMETER Experiment Name: Zm_5mM_NO_P Parameter: Plant Line Value: 35A19
  misc_feature: MA Experiment 108527 PARAMETER Experiment Name: Zm_5mM_NO_P Parameter: Timepoint (hr) Value: 6
  misc_feature: MA Experiment 108527 PARAMETER Experiment Name: Zm_5mM_NO_P Parameter: Tissue Value: Aerial
  misc_feature: MA Experiment 108527 PARAMETER Experiment Name: Zm_5mM_NO_P Parameter: Treatment Value: 5mM NO vs. No Treatment
  misc_feature: MA Experiment ID: 108528 Result: Up-regulated in Transcription
  misc_feature: MA Experiment 108528 PARAMETER Experiment Name: Zm_Imbibed_Seeds_P Parameter: Age (day) Value: 5 vs. 2
  misc_feature: MA Experiment 108528 PARAMETER Experiment Name: Zm_Imbibed_Seeds_P Parameter: Organism Value: Zea mays
  misc_feature: MA Experiment 108528 PARAMETER Experiment Name: Zm_Imbibed_Seeds_P Parameter: Plant Line Value: 35A19
  misc_feature: MA Experiment 108528 PARAMETER Experiment Name: Zm_Imbibed_Seeds_P Parameter: Tissue Value: Aerial vs. Embryo
  misc_feature: MA Experiment ID: 108529 Result: Down-regulated in Transcription
  misc_feature: MA Experiment 108529 PARAMETER Experiment Name: Zm_Imbibed_Seeds_P Parameter: Age (day) Value: 5 vs. 2
  misc_feature: MA Experiment 108529 PARAMETER Experiment Name: Zm_Imbibed_Seeds_P Parameter: Organism Value: Zea mays
  misc_feature: MA Experiment 108529 PARAMETER Experiment Name: Zm_Imbibed_Seeds_P Parameter: Plant Line Value: 35A19
  misc_feature: MA Experiment 108529 PARAMETER Experiment Name: Zm_Imbibed_Seeds_P Parameter: Tissue Value: Roots vs. Embryo
  misc_feature: MA Experiment ID: 108530 Result: Up-regulated in Transcription
  misc_feature: MA Experiment 108530 PARAMETER Experiment Name: Zm_Imbibed_Seeds_P Parameter: Age (day) Value: 6 vs. 2
  misc_feature: MA Experiment 108530 PARAMETER Experiment Name: Zm_Imbibed_Seeds_P Parameter: Organism Value: Zea mays
  misc_feature: MA Experiment 108530 PARAMETER Experiment Name: Zm_Imbibed_Seeds_P Parameter: Plant Line Value: 35A19
  misc_feature: MA Experiment 108530 PARAMETER Experiment Name: Zm_Imbibed_Seeds_P Parameter: Tissue Value: Aerial vs. Embryo
  misc_feature: MA Experiment ID: 108534 Result: Up-regulated in Transcription
  misc_feature: MA Experiment 108534 PARAMETER Experiment Name: Zm_4deg_Cold_P Parameter: Age (hr) Value: 8
  misc_feature: MA Experiment 108534 PARAMETER Experiment Name: Zm_4deg_Cold_P Parameter: Organism Value: Zea mays
  misc_feature: MA Experiment 108534 PARAMETER Experiment Name: Zm_4deg_Cold_P Parameter: Plant Line Value: 35A19
  misc_feature: MA Experiment 108534 PARAMETER Experiment Name: Zm_4deg_Cold_P Parameter: Temperature (deg C) Value: 4 vs. 22
  misc_feature: MA Experiment 108534 PARAMETER Experiment Name: Zm_4deg_Cold_P Parameter: Timepoint (hr) Value: 6
  misc_feature: MA Experiment 108534 PARAMETER Experiment Name: Zm_4deg_Cold_P Parameter: Tissue Value: Aerial
  misc_feature: MA Experiment ID: 108536 Result: Down-regulated in Transcription
  misc_feature: MA Experiment 108536 PARAMETER Experiment Name: Zm_Meristem_P Parameter: Age (day) Value: 8
  misc_feature: MA Experiment 108536 PARAMETER Experiment Name: Zm_Meristem_P Parameter: Organism Value: Zea mays
  misc_feature: MA Experiment 108536 PARAMETER Experiment Name: Zm_Meristem_P Parameter: Plant Line Value: 35A19
  misc_feature: MA Experiment 108536 PARAMETER Experiment Name: Zm_Meristem_P Parameter: Tissue Value: Shoot Meristem vs. Above Shoot Meristem
  misc_feature: MA Experiment ID: 108543 Result: Down-regulated in Transcription
  misc_feature: MA Experiment ID: 108544 Result: Down-regulated in Transcription
  misc_feature: MA Experiment ID: 108545 Result: Up-regulated in Transcription
  misc_feature: MA Experiment 108545 PARAMETER Experiment Name: Zm_Imbibed_Seeds_P Parameter: Age (day) Value: 3 vs. 2
  misc_feature: MA Experiment 108545 PARAMETER Experiment Name: Zm_Imbibed_Seeds_P Parameter: Organism Value: Zea mays
  misc_feature: MA Experiment 108545 PARAMETER Experiment Name: Zm_Imbibed_Seeds_P Parameter: Plant Line Value: 35A19
  misc_feature: MA Experiment 108545 PARAMETER Experiment Name: Zm_Imbibed_Seeds_P Parameter: Tissue Value: Aerial vs. Embryo
  misc_feature: MA Experiment ID: 108546 Result: Down-regulated in Transcription
  misc_feature: MA Experiment 108546 PARAMETER Experiment Name: Zm_Imbibed_Seeds_P Parameter: Age (day) Value: 3 vs. 2
  misc_feature: MA Experiment 108546 PARAMETER Experiment Name: Zm_Imbibed_Seeds_P Parameter: Organism Value: Zea mays
  misc_feature: MA Experiment 108546 PARAMETER Experiment Name: Zm_Imbibed_Seeds_P Parameter: Plant Line Value: 35A19
  misc_feature: MA Experiment 108546 PARAMETER Experiment Name: Zm_Imbibed_Seeds_P Parameter: Tissue Value: Roots vs. Embryo
  misc_feature: MA Experiment ID: 108547 Result: Up-regulated in Transcription
  misc_feature: MA Experiment 108547 PARAMETER Experiment Name: Zm_Imbibed_Seeds_P Parameter: Age (day) Value: 4 vs. 2
  misc_feature: MA Experiment 108547 PARAMETER Experiment Name: Zm_Imbibed_Seeds_P Parameter: Organism Value: Zea mays
  misc_feature: MA Experiment 108547 PARAMETER Experiment Name: Zm_Imbibed_Seeds_P Parameter: Plant Line Value: 35A19
  misc_feature: MA Experiment 108547 PARAMETER Experiment Name: Zm_Imbibed_Seeds_P Parameter: Tissue Value: Aerial vs. Embryo
  misc_feature: MA Experiment ID: 108559 Result: Down-regulated in Transcription
  misc_feature: MA Experiment 108559 PARAMETER Experiment Name: Zm_5mM_NO_P Parameter: Age (day) Value: 8
  misc_feature: MA Experiment 108559 PARAMETER Experiment Name: Zm_5mM_NO_P Parameter: Organism Value: Zea mays
  misc_feature: MA Experiment 108559 PARAMETER Experiment Name: Zm_5mM_NO_P Parameter: Plant Line Value: 35A19
  misc_feature: MA Experiment 108559 PARAMETER Experiment Name: Zm_5mM_NO_P Parameter: Timepoint (hr) Value: 12
  misc_feature: MA Experiment 108559 PARAMETER Experiment Name: Zm_5mM_NO_P Parameter: Tissue Value: Aerial
  misc_feature: MA Experiment 108559 PARAMETER Experiment Name: Zm_5mM_NO_P Parameter: Treatment Value: 5mM NO vs. No Treatment
  misc_feature: MA Experiment ID: 108689 Result: Down-regulated in Transcription
  misc_feature: MA Experiment 108689 PARAMETER Experiment Name: Zm_Drought_Roots_P Parameter: Age (day) Value: 9
  misc_feature: MA Experiment 108689 PARAMETER Experiment Name: Zm_Drought_Roots_P Parameter: Organism Value: Zea mays
  misc_feature: MA Experiment 108689 PARAMETER Experiment Name: Zm_Drought_Roots_P Parameter: Plant Line Value: 35A19
  misc_feature: MA Experiment 108689 PARAMETER Experiment Name: Zm_Drought_Roots_P Parameter: Timepoint (hr) Value: 24
  misc_feature: MA Experiment 108689 PARAMETER Experiment Name: Zm_Drought_Roots_P Parameter: Tissue Value: Roots
  misc_feature: MA Experiment 108689 PARAMETER Experiment Name: Zm_Drought_Roots_P Parameter: Treatment Value: Drought vs. No Drought
  misc_feature: MA Experiment ID: 20000479 Result: Down-regulated in Transcription
  misc_feature: MA Experiment 20000479 PARAMETER Experiment Name: Zm_Drought_P Parameter: Age (day) Value: 10
  misc_feature: MA Experiment 20000479 PARAMETER Experiment Name: Zm_Drought_P Parameter: Organism Value: Zea mays
  misc_feature: MA Experiment 20000479 PARAMETER Experiment Name: Zm_Drought_P Parameter: Plant Line Value: 35A19
  misc_feature: MA Experiment 20000479 PARAMETER Experiment Name: Zm_Drought_P Parameter: Timepoint (hr) Value: 48
  misc_feature: MA Experiment 20000479 PARAMETER Experiment Name: Zm_Drought_P Parameter: Tissue Value: Aerial
  misc_feature: MA Experiment 20000479 PARAMETER Experiment Name: Zm_Drought_P Parameter: Treatment Value: Drought vs. No Drought
  misc_feature: MA Experiment ID: 20000480 Result: Down-regulated in Transcription
  misc_feature: MA Experiment 20000480 PARAMETER Experiment Name: Zm_Drought_P Parameter: Age (day) Value: 11
  misc_feature: MA Experiment 20000480 PARAMETER Experiment Name: Zm_Drought_P Parameter: Organism Value: Zea mays
  misc_feature: MA Experiment 20000480 PARAMETER Experiment Name: Zm_Drought_P Parameter: Plant Line Value: 35A19
  misc_feature: MA Experiment 20000480 PARAMETER Experiment Name: Zm_Drought_P Parameter: Timepoint (hr) Value: 72
  misc_feature: MA Experiment 20000480 PARAMETER Experiment Name: Zm_Drought_P Parameter: Tissue Value: Aerial
  misc_feature: MA Experiment 20000480 PARAMETER Experiment Name: Zm_Drought_P Parameter: Treatment Value: Drought vs. No Drought
  misc_feature: MA Experiment ID: 20000626 Result: Down-regulated in Transcription
  misc_feature: MA Experiment 20000626 PARAMETER Experiment Name: Zm_Herbicide-Treatments_P Parameter: Timepoint (hr) Value: 12
  misc_feature: MA Experiment 20000626 PARAMETER Experiment Name: Zm_Herbicide-Treatments_P Parameter: Tissue Value: Aerial
  misc_feature: MA Experiment 20000626 PARAMETER Experiment Name: Zm_Herbicide-Treatments_P Parameter: Treatment Value: Roundup vs. No Treatment
ataccgggatgggcgccatgggcatcgtcgtcagagcgtgggcgcctcccgctcttgccgccgcggccgcgccggcaccctccggctccagggacaccggtcaggcccagcggaggagcaagccctcgaggaccggccgcgtgcgcgtgctcggcggcactggccgtgtcggaggatccacggccaccgcactctccaaactccgccccaagcttggcatcctcgtcggtggcaggaaccgggagaaaggcgagtccattgcagccaagcttgggggccagtctgagttcgtccaggtcgacacccgcaacacaggcatgttggaggaagcgctgcaggtggtagctgttcgcggagttgccaaaccggaggcagctgcgacgccggcgaggcgctcgcgccccatccctctggcttccgtggccgtgtggagtctggttgccactggcgccgcaaatgctgccgagctatgggaccccttggccctgcacggatcatcaggactcgtcttggctgaccttggcattggagattggtttgggggtttgctgttttcagctgggcagcaggctaatgaggctgtccaagatcagttgtctgctcttagtttctctagcctagcagttatttttggtgctggacttgtaactagtttatctccttgtacactaagtgttctaccactaactctaggatatataggtgcatttggctcagggaaaagccgatccgaggttgttgggaattcaattgcattttcactaggactagcaacaaccttagccattcttggtgttgctgcttcttttgctggaaaggcttatggtcaggtaggacaagggctcccagtggctgcttccggtttggccattatcatgggattgaaccttctggaggtacttgaattgcaacttccctcatttttcagcgattttgaccctcgcgctgctgcagctaacctcccttcaggtgtacaagcataccttgctggtcttacatttgcattggcagcatcaccttgcagcacacctgttcttgctacccttctgggatatgtcgccacttcaagagacccaattattggaggaagtttattgttgacatacacaacgggctatgttgcgcctcttcttattgcagcttcatttgctggagcactgcagagtttgttgtcattcagaagatattcggcatggataaacccaatcagtggtgcatttctacttggtggaggtgtttataccctactggacagggtgtttccagcaacatcaatggccatgtagaccatcgttggacaagaattgataggcaccagtctgtttggcgtgcgaatgatatttggatgtgaagtagtgaaatgatggcaacaaagtttagccagatctctcagcgttgtataggcacgcaggacattttgatcgggacaagcaaagcaccttgacctaagtacagtagtctgcatcactgtatctgtatgggcctcgatacttggggccggtctaccctactaaaatgtatttctgggacagattgaaagagtatgaaatccatataagggtttgttcgttcc

SEQ ID NO: 8248 - protein, 427 aa, Zea mays subsp. mays
  peptide (1)..(427): Ceres Seq. ID no. 12344355
  misc_feature (209)..(416): Pfam Name: Cytochrome C biogenesis protein transmembrane region Pfam Description: Cytochrome C biogenesis protein transmembrane
  misc_feature (117)..(427): Homolog of NCBI NO: 27464261 NR Description: biogenesis protein [Hordeum vulgare subsp.
  misc_feature (149)..(427): Homolog of NCBI NO: 27464259 NR Description: biogenesis protein [Lotus japonicus]
  misc_feature (123)..(427): Homolog of NCBI NO: 15239604 NR Description: cytochrome c biogenesis protein precursor protein id: At5g54290.1, supported by cDNA: 32771., supported by gi_15292990, supported by cDNA: gi_7021485 [Arabidopsis
TGMGAMGIVVRAWAPPALAAAAAPAPSGSRDTGQAQRRSKPSRTGRVRVLGGTGRVGGSTATALSKLRPKLGILVGGRNREKGESIAAKLGGQSEFVQVDTRNTGMLEEALQVVAVRGVAKPEAAATPARRSRPIPLASVAVWSLVATGAANAAELWDPLALHGSSGLVLADLGIGDWFGGLLFSAGQQANEAVQDQLSALSFSSLAVIFGAGLVTSLSPCTLSVLPLTLGYIGAFGSGKSRSEVVGNSIAFSLGLATTLAILGVAASFAGKAYGQVGQGLPVAASGLAIIMGLNLLEVLELQLPSFFSDFDPRAAAANLPSGVQAYLAGLTFALAASPCSTPVLATLLGYVATSRDPIIGGSLLLTYTTGYVAPLLIAASFAGALQSLLSFRRYSAWINPISGAFLLGGGVYTLLDRVFPATSMAM

SEQ ID NO: 8249 - protein, 425 aa, Zea mays subsp. mays
  peptide (1)..(425): Ceres Seq. ID no. 12344356
  misc_feature (207)..(414): Pfam Name: Cytochrome C biogenesis protein transmembrane region Pfam Description: Cytochrome C biogenesis protein transmembrane
  misc_feature (115)..(425): Homolog of NCBI NO: 27464261 NR Description: biogenesis protein [Hordeum vulgare subsp.
  misc_feature (147)..(425): Homolog of NCBI NO: 27464259 NR Description: biogenesis protein [Lotus japonicus]
  misc_feature (121)..(425): Homolog of NCBI NO: 15239604 NR Description: cytochrome c biogenesis protein precursor protein id: At5g54290.1, supported by cDNA: 32771., supported by gi_15292990, supported by cDNA: gi_7021485 [Arabidopsis
MGAMGIVVRAWAPPALAAAAAPAPSGSRDTGQAQRRSKPSRTGRVRVLGGTGRVGGSTATALSKLRPKLGILVGGRNREKGESIAAKLGGQSEFVQVDTRNTGMLEEALQVVAVRGVAKPEAAATPARRSRPIPLASVAVWSLVATGAANAAELWDPLALHGSSGLVLADLGIGDWFGGLLFSAGQQANEAVQDQLSALSFSSLAVIFGAGLVTSLSPCTLSVLPLTLGYIGAFGSGKSRSEVVGNSIAFSLGLATTLAILGVAASFAGKAYGQVGQGLPVAASGLAIIMGLNLLEVLELQLPSFFSDFDPRAAAANLPSGVQAYLAGLTFALAASPCSTPVLATLLGYVATSRDPIIGGSLLLTYTTGYVAPLLIAASFAGALQSLLSFRRYSAWINPISGAFLLGGGVYTLLDRVFPATSMAM

SEQ ID NO: 8250 - protein, 422 aa, Zea mays subsp. mays
  peptide (1)..(422): Ceres Seq. ID no. 12344357
  misc_feature (204)..(411): Pfam Name: Cytochrome C biogenesis protein transmembrane region Pfam Description: Cytochrome C biogenesis protein transmembrane
  misc_feature (112)..(422): Homolog of NCBI NO: 27464261 NR Description: biogenesis protein [Hordeum vulgare subsp.
  misc_feature (144)..(422): Homolog of NCBI NO: 27464259 NR Description: biogenesis protein [Lotus japonicus]
  misc_feature (118)..(422): Homolog of NCBI NO: 15239604 NR Description: cytochrome c biogenesis protein precursor protein id: At5g54290.1, supported by cDNA: 32771., supported by gi_15292990, supported by cDNA: gi_7021485 [Arabidopsis
MGIVVRAWAPPALAAAAAPAPSGSRDTGQAQRRSKPSRTGRVRVLGGTGRVGGSTATALSKLRPKLGILVGGRNREKGESIAAKLGGQSEFVQVDTRNTGMLEEALQVVAVRGVAKPEAAATPARRSRPIPLASVAVWSLVATGAANAAELWDPLALHGSSGLVLADLGIGDWFGGLLFSAGQQANEAVQDQLSALSFSSLAVIFGAGLVTSLSPCTLSVLPLTLGYIGAFGSGKSRSEVVGNSIAFSLGLATTLAILGVAASFAGKAYGQVGQGLPVAASGLAIIMGLNLLEVLELQLPSFFSDFDPRAAAANLPSGVQAYLAGLTFALAASPCSTPVLATLLGYVATSRDPIIGGSLLLTYTTGYVAPLLIAASFAGALQSLLSFRRYSAWINPISGAFLLGGGVYTLLDRVFPATSMAM

SEQ ID NO: 8251 - DNA, 473 bp, Zea mays subsp. mays
  misc_feature (1)..(473): Ceres Seq. ID no. 1424194
  misc_feature: MA Experiment ID: 108529 Result: Down-regulated in Transcription
  misc_feature: MA Experiment 108529 PARAMETER Experiment Name: Zm_Imbibed_Seeds_P Parameter: Age (day) Value: 5 vs. 2
  misc_feature: MA Experiment 108529 PARAMETER Experiment Name: Zm_Imbibed_Seeds_P Parameter: Organism Value: Zea mays
  misc_feature: MA Experiment 108529 PARAMETER Experiment Name: Zm_Imbibed_Seeds_P Parameter: Plant Line Value: 35A19
  misc_feature: MA Experiment 108529 PARAMETER Experiment Name: Zm_Imbibed_Seeds_P Parameter: Tissue Value: Roots vs. Embryo
atcgattcttggcatcgcctctctctaaaccccaactcctcgactcgagcaatccctaggtctccgcgcgaggcgtggcggctgtgaggggattttgattgatttggctcgagatggcggaggacaaggtgcggcggatcttcgtcggcgggttgtcctggaagaccacggagcgcacgctcgagcgcaccttcggtcagtacggcaatgtcatcgaggcacaggttgtagtgaaaagggaaacaggccgctcgaggggatttggatttgtcacattctcagaacctcgggctgtggatgctgccattcgtggaatgcataatgcggaactggatggccgtaatatttctgtgaacaaagctcatcctaggattgctgacgatgactatggctatggtggtggtggtggtggtggttactcgtctggtgctagaggtggatatcgtagtggcggtgatgtagttccagcagtg

SEQ ID NO: 8252 - protein, 120 aa, Zea mays subsp. mays
  peptide (1)..(120): Ceres Seq. ID no. 1424195
  misc_feature (10)..(80): Pfam Name: RNA recognition motif. (a.k.a. RRM, RBD, or RNP domain) Pfam Description: RNA recognition motif. (a.k.a. RRM, RBD, or RNP
  misc_feature (1)..(119): Homolog of NCBI NO: 33146923 NR Description: glycine-rich RNA-binding protein-like [Oryza
  misc_feature (1)..(114): Homolog of NCBI NO: 15226605 NR Description: glycine-rich RNA binding protein AtGRP7; protein At2g21660.1, supported by cDNA: 13879., supported by cDNA: supported by cDNA: gi_16226371, supported by cDNA: gi_166836
  misc_feature (1)..(114): Homolog of NCBI NO: 21553354 NR Description: glycine-rich RNA binding protein 7 [Arabidopsis
  misc_feature (8)..(114): Homolog of NCBI NO: 20152613 NR Description: putative glycine rich protein [Rumex obtusifolius]
  misc_feature (1)..(114): Homolog of NCBI NO: 1346180 NR Description: Glycine-rich RNA-binding protein GRP1A
  misc_feature (1)..(114): Homolog of NCBI NO: 2119042 NR Description: glycine-rich RNA-binding protein RGP-1a - wood
  misc_feature (1)..(114): Homolog of NCBI NO: 7439982 NR Description: RNA-binding glycine-rich protein-1 (RGP-1c) -
  misc_feature (1)..(114): Homolog of NCBI NO: 2674201 NR Description: glycine-rich RNA-binding protein [Euphorbia esula]
  misc_feature (2)..(114): Homolog of NCBI NO: 18103931 NR Description: glycine rich RNA binding protein [Oryza sativa]
  misc_feature (1)..(108): Homolog of NCBI NO: 31712074 NR Description: putative RNA-binding protein [Oryza sativa
MAEDKVRRIFVGGLSWKTTERTLERTFGQYGNVIEAQVVVKRETGRSRGFGFVTFSEPRAVDAAIRGMHNAELDGRNISVNKAHPRIADDDYGYGGGGGGGYSSGARGGYRSGGDVVPAV

SEQ ID NO: 8253 - DNA, 1457 bp, Zea mays subsp. mays
  misc_feature (1)..(1457): Ceres Seq. ID no. 12352588
  misc_feature: MA Experiment ID: 108522 Result: Up-regulated in Transcription
  misc_feature: MA Experiment 108522 PARAMETER Experiment Name: Zm_42deg_Heat_P Parameter: Age (day) Value: 8
  misc_feature: MA Experiment 108522 PARAMETER Experiment Name: Zm_42deg_Heat_P Parameter: Organism Value: Zea mays
  misc_feature: MA Experiment 108522 PARAMETER Experiment Name: Zm_42deg_Heat_P Parameter: Plant Line Value: 35A19
  misc_feature: MA Experiment 108522 PARAMETER Experiment Name: Zm_42deg_Heat_P Parameter: Temperature (deg C) Value: 42 vs. 22
  misc_feature: MA Experiment 108522 PARAMETER Experiment Name: Zm_42deg_Heat_P Parameter: Timepoint (hr) Value: 1
  misc_feature: MA Experiment 108522 PARAMETER Experiment Name: Zm_42deg_Heat_P Parameter: Tissue Value: Aerial
  misc_feature: MA Experiment ID: 108523 Result: Up-regulated in Transcription
  misc_feature: MA Experiment 108523 PARAMETER Experiment Name: Zm_42deg_Heat_P Parameter: Age (day) Value: 8
  misc_feature: MA Experiment 108523 PARAMETER Experiment Name: Zm_42deg_Heat_P Parameter: Organism Value: Zea mays
  misc_feature: MA Experiment 108523 PARAMETER Experiment Name: Zm_42deg_Heat_P Parameter: Plant Line Value: 35A19
  misc_feature: MA Experiment 108523 PARAMETER Experiment Name: Zm_42deg_Heat_P Parameter: Temperature (deg C) Value: 42 vs. 22
  misc_feature: MA Experiment 108523 PARAMETER Experiment Name: Zm_42deg_Heat_P Parameter: Timepoint (hr) Value: 6
  misc_feature: MA Experiment 108523 PARAMETER Experiment Name: Zm_42deg_Heat_P Parameter: Tissue Value: Aerial
gaacgatttgggggaggaggtgttctattacacaaaagaggcaaaaaacaaaagccggtaacggaaaccctaatccccccaaatcccgaatccctctcgaatttctatttaatgttcctgttcttcccctccgatccgatgtccccaactgcgctcccgtcggcgatcaaacaccggatcgcggcactcgccgccgttgaggaggaggtttccggcgctgcttccagcgccttgccgtcagcaccatgaggaagaagctggacacgcgtttccccgctcctcggattaaaaagatcatgcaaacagatgaagacgtcggcaagattgctcaagctgtacctgttctagtgtccaaagcattggagctatttctgcaagatttatgtgataggacatatgatattacaattcggaagggggtcaagactgtgggttcttcccatttgaaacaatgcatacaaacgtacaacgtctatgacttcttgagggaagtagtcagcaaagttccagacattggtccttctgatgttattgctgatgataagcttggcaaaaggaggaaagccgaagaagatggaagtgaggaagaattgaagaggacaagaaatgagacagaaagctatacaagcaatggcagaggccgtgggagaggtcgtgggagaggtcgccgtggtgtacgtggagcttggcgggaggtggtcacaagtcctgagcaattcaaggaggagaatcaatctagcaaggtagccagcctaaaggtggaggtagcagatgaggtctcgaatgtaactgaagcaaaacaggacactacaccaatgagcaacgccaggccttccttaaggaacattgacttgaatttagatccaaccgatgaagaggatgaggttacagtgccaccccaaccccagctgtcagctccagcaactagttgcgatgcagccactgcagcacctggaccatctgttccacggttaagggaaggagcaaaactcaaggacttctttggtgcttgggaactggctgacatgaacaagatggagatggaccctgtccagtttgctctgtcaacaaaccatagattggaggaggacgaggattatgacaatgaagactagctccgccgttatatagcttcagagttgatgagtaggaatagcaggacaactgtaggttcagcttaactctgtagcagttctcatgtatcatatagccgccaaagctgccgatgtagcttataatgtcccagaggttaaggtcgtttgactagttgactgtaatgttctcaagttaggttctattagcagctattgctttcgcagatagtaccgtttgtacattccagttgctctccagttttatgttatctatccttctgctttcttggatagctgagacctgttggcggatgtatcatgtatggcaagttggcaacaaaaagcaagaaggctttcagattc

SEQ ID NO: 8254 - protein, 289 aa, Zea mays subsp. mays
  peptide (1)..(289): Ceres Seq. ID no. 12352589
  misc_feature (7)..(71): Pfam Name: Histone-like transcription factor (CBF/NF-Y) and Pfam Description: Histone-like transcription factor (CBF/NF-Y)
  misc_feature (1)..(288): Homolog of NCBI NO: 30682195 NR Description: transcription factor Hap5a, putative [Arabidopsis >gi|15795167|dbj|BAB03155.1| gene_id:MQC3.30~unknown protein thaliana] >gi|18087597|gb|AAL58929.1|AF462841_1 At3g12480/MQC3.32
  misc_feature (1)..(288): Homolog of NCBI NO: 12321975 NR Description: unknown protein; 69004-67516 [Arabidopsis
  misc_feature (1)..(211): Homolog of NCBI NO: 18481624 NR Description: repressor protein [Oryza sativa]
  misc_feature (1)..(197): Homolog of NCBI NO: 18481626 NR Description: repressor protein [Zea mays]
  misc_feature (30)..(215): Homolog of NCBI NO: 15239766 NR Description: putative protein; protein id: At5g19490.1
  misc_feature (2)..(134): Homolog of NCBI NO: 28279647 NR Description: Similar to Dr1 associated protein 1 (negative
  misc_feature (2)..(112): Homolog of NCBI NO: 21313424 NR Description: RIKEN cDNA 2310074H19 [Mus musculus]
  misc_feature (2)..(112): Homolog of NCBI NO: 18426973 NR Description: DR1-associated protein 1; negative cofactor 2 DR1- associated corepressor [Homo sapiens]
  misc_feature (2)..(172): Homolog of NCBI NO: 10242351 NR Description: NC2alpha [Drosophila melanogaster]
  misc_feature (2)..(172): Homolog of NCBI NO: 24657218 NR Description: CG10318-PA [Drosophila melanogaster]
MRKKLDTRFPAPRIKKIMQTDEDVGKIAQAVPVLVSKALELFLQDLCDRTYDITIRKGVKTVGSSHLKQCIQTYNVYDFLREVVSKVPDIGPSDVIADDKLGKRRKAEEDGSEEELKRTRNETESYTSNGRGRGRGRGRGRRGVRGAWREVVTSPEQFKEENQSSKVASLKVEVADEVSNVTEAKQDTTPMSNARPSLRNIDLNLDPTDEEDEVTVPPQPQLSAPATSCDAATAAPGPSVPRLREGAKLKDFFGAWELADMNKMEMDPVQFALSTNHRLEEDEDYDNED

SEQ ID NO: 8255 - protein, 272 aa, Zea mays subsp. mays
  peptide (1)..(272): Ceres Seq. ID no. 12352590
  misc_feature (1)..(54): Pfam Name: Histone-like transcription factor (CBF/NF-Y) and Pfam Description: Histone-like transcription factor (CBF/NF-Y)
  misc_feature (1)..(271): Homolog of NCBI NO: 30682195 NR Description: transcription factor Hap5a, putative [Arabidopsis >gi|15795167|dbj|BAB03155.1| gene_id:MQC3.30~unknown protein thaliana] >gi|18087597|gb|AAL58929.1|AF462841_1 At3g12480/MQC3.32
  misc_feature (1)..(271): Homolog of NCBI NO: 12321975 NR Description: unknown protein; 69004-67516 [Arabidopsis
  misc_feature (1)..(194): Homolog of NCBI NO: 18481624 NR Description: repressor protein [Oryza sativa]
  misc_feature (1)..(180): Homolog of NCBI NO: 18481626 NR Description: repressor protein [Zea mays]
  misc_feature (13)..(198): Homolog of NCBI NO: 15239766 NR Description: putative protein; protein id: At5g19490.1
  misc_feature (1)..(117): Homolog of NCBI NO: 28279647 NR Description: Similar to Dr1 associated protein 1 (negative
  misc_feature (1)..(95): Homolog of NCBI NO: 21313424 NR Description: RIKEN cDNA 2310074H19 [Mus musculus]
  misc_feature (1)..(95): Homolog of NCBI NO: 18426973 NR Description: DR1-associated protein 1; negative cofactor 2 DR1- associated corepressor [Homo sapiens]
  misc_feature (1)..(155): Homolog of NCBI NO: 10242351 NR Description: NC2alpha [Drosophila melanogaster]
  misc_feature (1)..(155): Homolog of NCBI NO: 24657218 NR Description: CG10318-PA [Drosophila melanogaster]
MQTDEDVGKIAQAVPVLVSKALELFLQDLCDRTYDITIRKGVKTVGSSHLKQCIQTYNVYDFLREVVSKVPDIGPSDVIADDKLGKRRKAEEDGSEEELKRTRNETESYTSNGRGRGRGRGRGRRGVRGAWREVVTSPEQFKEENQSSKVASLKVEVADEVSNVTEAKQDTTPMSNARPSLRNIDLNLDPTDEEDEVTVPPQPQLSAPATSCDAATAAPGPSVPRLREGAKLKDFFGAWELADMNKMEMDPVQFALSTNHRLEEDEDYDNED

SEQ ID NO: 8256 - DNA, 640 bp, Zea mays subsp. mays
  misc_feature (1)..(640): Ceres Seq. ID no. 12412545
  misc_feature: MA Experiment ID: 108559 Result: Up-regulated in Transcription
  misc_feature: MA Experiment 108559 PARAMETER Experiment Name: Zm_5mM_NO_P Parameter: Age (day) Value: 8
  misc_feature: MA Experiment 108559 PARAMETER Experiment Name: Zm_5mM_NO_P Parameter: Organism Value: Zea mays
  misc_feature: MA Experiment 108559 PARAMETER Experiment Name: Zm_5mM_NO_P Parameter: Plant Line Value: 35A19
  misc_feature: MA Experiment 108559 PARAMETER Experiment Name: Zm_5mM_NO_P Parameter: Timepoint (hr) Value: 12
  misc_feature: MA Experiment 108559 PARAMETER Experiment Name: Zm_5mM_NO_P Parameter: Tissue Value: Aerial
  misc_feature: MA Experiment 108559 PARAMETER Experiment Name: Zm_5mM_NO_P Parameter: Treatment Value: 5mM NO vs. No Treatment
tcactcgtcacatgcgctgacgcgcatccccccggcgtggcgtgcgctttgatctagctcttcttctcgaatccagcccgaggcctttttcttctgcggtttcatccgtacccatcctgcacacgaagcctagaatagccctcccctgctccgccacctcctcggatcccgaccaccccacccccaccccagacaacaggttgatggaggctaagatgggacgcttcttcgagtccgtgagcaatttcttcaccggaggcgaccacatcccctggtgcgaccgcgacctcatcgccggctgtgaaggagagcttgtcaatgctgtaaatgaggaacaaaggaatgaaagccttatgaggttgtcatgggcccttgtgcactccaggcagacagacgatgtaaaccgtggaatcagcatgcttcaagcttctttggataattctgccagtcctctgcagactagggaaaagctgtacttgttggctgttggattctacaggattggcgactactcaaaaagcaggcaacttgcagatcgttgtttggagattcaagcggattggcggcaggccatatcgctgaagaaggcaatagaagataaaattgccaaagatggtctgattggaataggaattgcgac

SEQ ID NO: 8257 - protein, 145 aa, Zea mays subsp. mays
  peptide (1)..(145): Ceres Seq. ID no. 12412546
  misc_feature (1)..(144): Homolog of NCBI NO: 18410639 NR Description: expressed protein; protein id: At3g57090.1, by cDNA: 36499., supported by cDNA: gi_15215651, supported by
  misc_feature (1)..(144): Homolog of NCBI NO: 19386833 NR Description: B1147A04.28 [Oryza sativa (japonica
  misc_feature (1)..(144): Homolog of NCBI NO: 18416852 NR Description: putative protein; protein id: At5g12390.1 thaliana] >gi|14586369|emb|CAC42900.1| putative protein thaliana] >gi|26451525|dbj|BAC42860.1| unknown protein
  misc_feature (34)..(144): Homolog of NCBI NO: 32408377 NR Description: hypothetical protein [Neurospora crassa]
  misc_feature (54)..(144): Homolog of NCBI NO: 27664028 NR Description: similar to RIKEN cDNA 2010003O14 [Mus musculus]
  misc_feature (54)..(144): Homolog of NCBI NO: 7705632 NR Description: CGI-135 protein [Homo sapiens]
  misc_feature (54)..(144): Homolog of NCBI NO: 33112470 NR Description: Tetratricopeptide repeat protein 11 (TPR repeat
  misc_feature (54)..(144): Homolog of NCBI NO: 33391189 NR Description: putative mitochondrial fission protein Tbfis1p
  misc_feature (54)..(144): Homolog of NCBI NO: 40889302 NR Description: Chain A, Solution Structure Of Human Mitochondria
  misc_feature (54)..(144): Homolog of NCBI NO: 13384998 NR Description: RIKEN cDNA 2010003O14 [Mus musculus] unnamed protein product [Mus musculus] unnamed protein product [Mus musculus]
MEAKMGRFFESVSNFFTGGDHIPWCDRDLIAGCEGELVNAVNEEQRNESLMRLSWALVHSRQTDDVNRGISMLQASLDNSASPLQTREKLYLLAVGFYRIGDYSKSRQLADRCLEIQADWRQAISLKKAIEDKIAKDGLIGIGIA

SEQ ID NO: 8258 - protein, 141 aa, Zea mays subsp. mays
  peptide (1)..(141): Ceres Seq. ID no. 12412547
  misc_feature (1)..(140): Homolog of NCBI NO: 18410639 NR Description: expressed protein; protein id: At3g57090.1, by cDNA: 36499., supported by cDNA: gi_15215651, supported by
  misc_feature (1)..(140): Homolog of NCBI NO: 19386833 NR Description: B1147A04.28 [Oryza sativa (japonica
  misc_feature (1)..(140): Homolog of NCBI NO: 18416852 NR Description: putative protein; protein id: At5g12390.1 thaliana] >gi|14586369|emb|CAC42900.1| putative protein thaliana] >gi|26451525|dbj|BAC42860.1| unknown protein
  misc_feature (30)..(140): Homolog of NCBI NO: 32408377 NR Description: hypothetical protein [Neurospora crassa]
  misc_feature (50)..(140): Homolog of NCBI NO: 27664028 NR Description: similar to RIKEN cDNA 2010003O14 [Mus musculus]
  misc_feature (50)..(140): Homolog of NCBI NO: 7705632 NR Description: CGI-135 protein [Homo sapiens]
  misc_feature (50)..(140): Homolog of NCBI NO: 33112470 NR Description: Tetratricopeptide repeat protein 11 (TPR repeat
  misc_feature (50)..(140): Homolog of NCBI NO: 33391189 NR Description: putative mitochondrial fission protein Tbfis1p
  misc_feature (50)..(140): Homolog of NCBI NO: 40889302 NR Description: Chain A, Solution Structure Of Human Mitochondria
  misc_feature (50)..(140): Homolog of NCBI NO: 13384998 NR Description: RIKEN cDNA 2010003O14 [Mus musculus] unnamed protein product [Mus musculus] unnamed protein product [Mus musculus]
MGRFFESVSNFFTGGDHIPWCDRDLIAGCEGELVNAVNEEQRNESLMRLSWALVHSRQTDDVNRGISMLQASLDNSASPLQTREKLYLLAVGFYRIGDYSKSRQLADRCLEIQADWRQAISLKKAIEDKIAKDGLIGIGIA

SEQ ID NO: 8259 - protein, 95 aa, Zea mays subsp. mays
  peptide (1)..(95): Ceres Seq. ID no. 12412548
  misc_feature (1)..(94): Homolog of NCBI NO: 18410639 NR Description: expressed protein; protein id: At3g57090.1, by cDNA: 36499., supported by cDNA: gi_15215651, supported by
  misc_feature (1)..(94): Homolog of NCBI NO: 19386833 NR Description: B1147A04.28 [Oryza sativa (japonica
  misc_feature (1)..(94): Homolog of NCBI NO: 18416852 NR Description: putative protein; protein id: At5g12390.1 thaliana] >gi|14586369|emb|CAC42900.1| putative protein thaliana] >gi|26451525|dbj|BAC42860.1| unknown protein
  misc_feature (1)..(94): Homolog of NCBI NO: 32408377 NR Description: hypothetical protein [Neurospora crassa]
  misc_feature (4)..(94): Homolog of NCBI NO: 27664028 NR Description: similar to RIKEN cDNA 2010003O14 [Mus musculus]
  misc_feature (4)..(94): Homolog of NCBI NO: 7705632 NR Description: CGI-135 protein [Homo sapiens]
  misc_feature (4)..(94): Homolog of NCBI NO: 33112470 NR Description: Tetratricopeptide repeat protein 11 (TPR repeat
  misc_feature (4)..(94): Homolog of NCBI NO: 33391189 NR Description: putative mitochondrial fission protein Tbfis1p
  misc_feature (4)..(94): Homolog of NCBI NO: 40889302 NR Description: Chain A, Solution Structure Of Human Mitochondria
  misc_feature (4)..(94): Homolog of NCBI NO: 13384998 NR Description: RIKEN cDNA 2010003O14 [Mus musculus] unnamed protein product [Mus musculus] unnamed protein product [Mus musculus]
MRLSWALVHSRQTDDVNRGISMLQASLDNSASPLQTREKLYLLAVGFYRIGDYSKSRQLADRCLEIQADWRQAISLKKAIEDKIAKDGLIGIGIA

SEQ ID NO: 8260 - DNA, 1246 bp, Zea mays subsp. mays
  misc_feature (1)..(1246): Ceres Seq. ID no. 12358706
  misc_feature: MA Experiment ID: 108534 Result: Down-regulated in Transcription
  misc_feature: MA Experiment 108534 PARAMETER Experiment Name: Zm_4deg_Cold_P Parameter: Age (hr) Value: 8
  misc_feature: MA Experiment 108534 PARAMETER Experiment Name: Zm_4deg_Cold_P Parameter: Organism Value: Zea mays
  misc_feature: MA Experiment 108534 PARAMETER Experiment Name: Zm_4deg_Cold_P Parameter: Plant Line Value: 35A19
  misc_feature: MA Experiment 108534 PARAMETER Experiment Name: Zm_4deg_Cold_P Parameter: Temperature (deg C) Value: 4 vs. 22
  misc_feature: MA Experiment 108534 PARAMETER Experiment Name: Zm_4deg_Cold_P Parameter: Timepoint (hr) Value: 6
  misc_feature: MA Experiment 108534 PARAMETER Experiment Name: Zm_4deg_Cold_P Parameter: Tissue Value: Aerial
  misc_feature: MA Experiment ID: 108544 Result: Down-regulated in Transcription
aaaaaaccctatttcatgtgacgtgaacccctttcgctcgctccgagtgcggaggaaggggagctcgacgcacccaagtcgcccgcccacggaacgcgccgccgccgccgccgccatcacatcacagaggcctcgccgtcgtctcggatattccccgccgtaggaccagtttccctccagctgccggagaccatgtcgggcggcctggacatgtccctggacgacctcatcaagcagtccaagtcccgacccaaggacagcccggcgtccttgtcggggcctgcccgccgcgcgccacaccccgcccgcgccgcgccctacccaccggccgctcccaaggcccgtgccgccgccgactcgccctacggggtctactccaagcacatcgccgcgatagcgccgcccccgctggccaaagcaaggtcgcttgagacgggaacgaagctgcacatctccaaccttgactccggcgtcaccatcgaggatgtccaggaactcttctcagaagttggggagctcaagcgttattctatgaattatgacaaggatgggagatctaaggggactgtggaagttgtctttgcaaggaaagtggatgctttggatgctatcaagagatacaatggtgttctacttgatgggaagccaatgaatctagagctcattggaaacaatgtcgaaccacctcccatgccaccagtaatacacagtcgtcctttgcagaactataatgatatccatagcagtatgcctcaatcccaaagaggtggtcagcgaagagtaccccaaggcaacggtcggggtggacgcagtagtcaaagcagtggtggccggggacaggggaaaggccgaggccaggaccggaatcgcaccaccatttctgctgcagatcttgacgccgaacttgacaagtaccatgcagcggcagtgaaggaggaatgaggctctggcgttctgtttactaaacagctggtaaggcgccgggacagtgtggccttctgctttagaagcatgaagtttgctatcttagtcctagtgttttatgctagaaattttttttggcccatgtacaaccgcgtctctgcgtcaagattcctggtgttttatgtgtagcatgaagttgtggtcctactttgcaggaactatcaatcatatttacagctctgcgggcacgattgagaacaattggaaactaaggggtgtttggtttgaagagtcaatccattctagatgagttggtgaaatc

SEQ ID NO: 8261 - protein, 249 aa, Zea mays subsp. mays
  peptide (1)..(249): Ceres Seq. ID no. 12358707
  misc_feature (1)..(179): Homolog of NCBI NO: 34900544 NR Description: P0565A07.3 [Oryza sativa (japonica
  misc_feature (192)..(249): Homolog of NCBI NO: 34900544 NR Description: P0565A07.3 [Oryza sativa (japonica
  misc_feature (1)..(220): Homolog of NCBI NO: 33146678 NR Description: putative RNA and export factor binding protein
  misc_feature (1)..(243): Homolog of NCBI NO: 30697310 NR Description: RNA and export factor binding protein, putative
  misc_feature (1)..(243): Homolog of NCBI NO: 30697313 NR Description: RNA and export factor binding protein, putative
  misc_feature (1)..(243): Homolog of NCBI NO: 9757916 NR Description: RNA and export factor binding protein 2-I-like
  misc_feature (1)..(206): Homolog of NCBI NO: 30693141 NR Description: RNA and export factor binding protein, putative
  misc_feature (189)..(246): Homolog of NCBI NO: 30693141 NR Description: RNA and export factor binding protein, putative
  misc_feature (1)..(243): Homolog of NCBI NO: 21555029 NR Description: transcriptional coactivator-like protein
  misc_feature (26)..(247): Homolog of NCBI NO: 11358209 NR Description: hypothetical protein T22P11.120 - Arabidopsis >gi|7413642|emb|CAB85990.1| putative protein [Arabidopsis
MSGGLDMSLDDLIKQSKSRPKDSPASLSGPARRAPHPARAAPYPPAAPKARAAADSPYGVYSKHIAAIAPPPLAKARSLETGTKLHISNLDSGVTIEDVQELFSEVGELKRYSMNYDKDGRSKGTVEVVFARKVDALDAIKRYNGVLLDGKPMNLELIGNNVEPPPMPPVIHSRPLQNYNDIHSSMPQSQRGGQRRVPQGNGRGGRSSQSSGGRGQGKGRGQDRNRTTISAADLDAELDKYHAAAVKEE

SEQ ID NO: 8262 - protein, 243 aa, Zea mays subsp. mays
  peptide (1)..(243): Ceres Seq. ID no. 12358708
  misc_feature (1)..(173): Homolog of NCBI NO: 34900544 NR Description: P0565A07.3 [Oryza sativa (japonica
  misc_feature (186)..(243): Homolog of NCBI NO: 34900544 NR Description: P0565A07.3 [Oryza sativa (japonica
  misc_feature (1)..(214): Homolog of NCBI NO: 33146678 NR Description: putative RNA and export factor binding protein
  misc_feature (1)..(237): Homolog of NCBI NO: 30697310 NR Description: RNA and export factor binding protein, putative
  misc_feature (1)..(237): Homolog of NCBI NO: 30697313 NR Description: RNA and export factor binding protein, putative
  misc_feature (1)..(237): Homolog of NCBI NO: 9757916 NR Description: RNA and export factor binding protein 2-I-like
  misc_feature (1)..(200): Homolog of NCBI NO: 30693141 NR Description: RNA and export factor binding protein, putative
  misc_feature (183)..(240): Homolog of NCBI NO: 30693141 NR Description: RNA and export factor binding protein, putative
  misc_feature (1)..(237): Homolog of NCBI NO: 21555029 NR Description: transcriptional coactivator-like protein
  misc_feature (20)..(241): Homolog of NCBI NO: 11358209 NR Description: hypothetical protein T22P11.120 - Arabidopsis >gi|7413642|emb|CAB85990.1| putative protein [Arabidopsis
MSLDDLIKQSKSRPKDSPASLSGPARRAPHPARAAPYPPAAPKARAAADSPYGVYSKHIAAIAPPPLAKARSLETGTKLHISNLDSGVTIEDVQELFSEVGELKRYSMNYDKDGRSKGTVEVVFARKVDALDAIKRYNGVLLDGKPMNLELIGNNVEPPPMPPVIHSRPLQNYNDIHSSMPQSQRGGQRRVPQGNGRGGRSSQSSGGRGQGKGRGQDRNRTTISAADLDAELDKYHAAAVKEE

SEQ ID NO: 8263 - protein, 136 aa, Zea mays subsp. mays
  peptide (1)..(136): Ceres Seq. ID no. 12358709
  misc_feature (1)..(66): Homolog of NCBI NO: 34900544 NR Description: P0565A07.3 [Oryza sativa (japonica
  misc_feature (79)..(136): Homolog of NCBI NO: 34900544 NR Description: P0565A07.3 [Oryza sativa (japonica
  misc_feature (1)..(107): Homolog of NCBI NO: 33146678 NR Description: putative RNA and export factor binding protein
  misc_feature (1)..(130): Homolog of NCBI NO: 30697310 NR Description: RNA and export factor binding protein, putative
  misc_feature (1)..(130): Homolog of NCBI NO: 30697313 NR Description: RNA and export factor binding protein, putative
  misc_feature (1)..(130): Homolog of NCBI NO: 9757916 NR Description: RNA and export factor binding protein 2-I-like
  misc_feature (1)..(93): Homolog of NCBI NO: 30693141 NR Description: RNA and export factor binding protein, putative
  misc_feature (76)..(133): Homolog of NCBI NO: 30693141 NR Description: RNA and export factor binding protein, putative
  misc_feature (1)..(130): Homolog of NCBI NO: 21555029 NR Description: transcriptional coactivator-like protein
  misc_feature (1)..(134): Homolog of NCBI NO: 11358209 NR Description: hypothetical protein T22P11.120 - Arabidopsis >gi|7413642|emb|CAB85990.1| putative protein [Arabidopsis
MNYDKDGRSKGTVEVVFARKVDALDAIKRYNGVLLDGKPMNLELIGNNVEPPPMPPVIHSRPLQNYNDIHSSMPQSQRGGQRRVPQGNGRGGRSSQSSGGRGQGKGRGQDRNRTTISAADLDAELDKYHAAAVKEE

SEQ ID NO: 8264 - DNA, 1619 bp, Zea mays subsp. mays
  misc_feature (1)..(1619): Ceres Seq. ID no. 13498683
  misc_feature: MA Experiment ID: 108515 Result: Up-regulated in Transcription
  misc_feature: MA Experiment 108515 PARAMETER Experiment Name: Zm_2mM_SA_P Parameter: Age (day) Value: 8
  misc_feature: MA Experiment 108515 PARAMETER Experiment Name: Zm_2mM_SA_P Parameter: Organism Value: Zea mays
  misc_feature: MA Experiment 108515 PARAMETER Experiment Name: Zm_2mM_SA_P Parameter: Plant Line Value: 35A19
  misc_feature: MA Experiment 108515 PARAMETER Experiment Name: Zm_2mM_SA_P Parameter: Timepoint (hr) Value: 12
  misc_feature: MA Experiment 108515 PARAMETER Experiment Name: Zm_2mM_SA_P Parameter: Tissue Value: Aerial
  misc_feature: MA Experiment 108515 PARAMETER Experiment Name: Zm_2mM_SA_P Parameter: Treatment Value: 2mM SA vs. No Treatment
  misc_feature: MA Experiment ID: 108527 Result: Up-regulated in Transcription
  misc_feature: MA Experiment 108527 PARAMETER Experiment Name: Zm_5mM_NO_P Parameter: Age (day) Value: 8
  misc_feature: MA Experiment 108527 PARAMETER Experiment Name: Zm_5mM_NO_P Parameter: Organism Value: Zea mays
  misc_feature: MA Experiment 108527 PARAMETER Experiment Name: Zm_5mM_NO_P Parameter: Plant Line Value: 35A19
  misc_feature: MA Experiment 108527 PARAMETER Experiment Name: Zm_5mM_NO_P Parameter: Timepoint (hr) Value: 6
  misc_feature: MA Experiment 108527 PARAMETER Experiment Name: Zm_5mM_NO_P Parameter: Tissue Value: Aerial
  misc_feature: MA Experiment 108527 PARAMETER Experiment Name: Zm_5mM_NO_P Parameter: Treatment Value: 5mM NO vs. No Treatment
  misc_feature: MA Experiment ID: 108534 Result: Down-regulated in Transcription
  misc_feature: MA Experiment 108534 PARAMETER Experiment Name: Zm_4deg_Cold_P Parameter: Age (hr) Value: 8
  misc_feature: MA Experiment 108534 PARAMETER Experiment Name: Zm_4deg_Cold_P Parameter: Organism Value: Zea mays
  misc_feature: MA Experiment 108534 PARAMETER Experiment Name: Zm_4deg_Cold_P Parameter: Plant Line Value: 35A19
  misc_feature: MA Experiment 108534 PARAMETER Experiment Name: Zm_4deg_Cold_P Parameter: Temperature (deg C) Value: 4 vs. 22
  misc_feature: MA Experiment 108534 PARAMETER Experiment Name: Zm_4deg_Cold_P Parameter: Timepoint (hr) Value: 6
  misc_feature: MA Experiment 108534 PARAMETER Experiment Name: Zm_4deg_Cold_P Parameter: Tissue Value: Aerial
  misc_feature: MA Experiment ID: 108535 Result: Down-regulated in Transcription
  misc_feature: MA Experiment 108535 PARAMETER Experiment Name: Zm_Meristem_P Parameter: Age (day) Value: 8
  misc_feature: MA Experiment 108535 PARAMETER Experiment Name: Zm_Meristem_P Parameter: Organism Value: Zea mays
  misc_feature: MA Experiment 108535 PARAMETER Experiment Name: Zm_Meristem_P Parameter: Plant Line Value: 35A19
  misc_feature: MA Experiment 108535 PARAMETER Experiment Name: Zm_Meristem_P Parameter: Tissue Value: Root Meristem vs. Above Root Meristem
  misc_feature: MA Experiment ID: 108543 Result: Down-regulated in Transcription
  misc_feature: MA Experiment ID: 108544 Result: Down-regulated in Transcription
  misc_feature: MA Experiment ID: 108559 Result: Up-regulated in Transcription
  misc_feature: MA Experiment 108559 PARAMETER Experiment Name: Zm_5mM_NO_P Parameter: Age (day) Value: 8
  misc_feature: MA Experiment 108559 PARAMETER Experiment Name: Zm_5mM_NO_P Parameter: Organism Value: Zea mays
  misc_feature: MA Experiment 108559 PARAMETER Experiment Name: Zm_5mM_NO_P Parameter: Plant Line Value: 35A19
  misc_feature: MA Experiment 108559 PARAMETER Experiment Name: Zm_5mM_NO_P Parameter: Timepoint (hr) Value: 12
  misc_feature: MA Experiment 108559 PARAMETER Experiment Name: Zm_5mM_NO_P Parameter: Tissue Value: Aerial
  misc_feature: MA Experiment 108559 PARAMETER Experiment Name: Zm_5mM_NO_P Parameter: Treatment Value: 5mM NO vs. No Treatment
  misc_feature: MA Experiment ID: 108687 Result: Down-regulated in Transcription
  misc_feature: MA Experiment 108687 PARAMETER Experiment Name: Zm_Embryos-Flowers__P Parameter: Tissue Value: Embryo vs. Aerial+
  misc_feature: MA Experiment ID: 20000478 Result: Up-regulated in Transcription
  misc_feature: MA Experiment 20000478 PARAMETER Experiment Name: Zm_5mM_SA_P Parameter: Age (day) Value: 11
  misc_feature: MA Experiment 20000478 PARAMETER Experiment Name: Zm_5mM_SA_P Parameter: Organism Value: Zea mays
  misc_feature: MA Experiment 20000478 PARAMETER Experiment Name: Zm_5mM_SA_P Parameter: Plant Line Value: 35A19
  misc_feature: MA Experiment 20000478 PARAMETER Experiment Name: Zm_5mM_SA_P Parameter: Timepoint (hr) Value: 72
  misc_feature: MA Experiment 20000478 PARAMETER Experiment Name: Zm_5mM_SA_P Parameter: Tissue Value: Aerial
  misc_feature: MA Experiment 20000478 PARAMETER Experiment Name: Zm_5mM_SA_P Parameter: Treatment Value: 5mM SA vs. No Treatment
  misc_feature: MA Experiment ID: 20000626 Result: Up-regulated in Transcription
  misc_feature: MA Experiment 20000626 PARAMETER Experiment Name: Zm_Herbicide-Treatments_P Parameter: Timepoint (hr) Value: 12
  misc_feature: MA Experiment 20000626 PARAMETER Experiment Name: Zm_Herbicide-Treatments_P Parameter: Tissue Value: Aerial
  misc_feature: MA Experiment 20000626 PARAMETER Experiment Name: Zm_Herbicide-Treatments_P Parameter: Treatment Value: Roundup vs. No Treatment
taatcgaaaaaacaaaactgcaattatctcagtctccttcaaacaactgttttttccattgttagactcaaagcctatccccttcacggagctcgccaagcgctatgggggacgccaacggcggcagtatgcacgttgtgatgctgccatggctggcgttcggccacatcctccccttcacggagctcgccaagcgcatagctaggcagggccaccgggtcaccctcttctccacgccaagaaacacccggcggttaatccgcatccctccagaactcgcggggcatatccgcgtcgtggacatcgcgctgccgcgcgtggagcgcctgccggaggactgcgaggcgagcatagacctgccatccgacgacctccgcccgtacctccgcgtagcctacgacgccgccttcgccgacaaactctcggccatcctgcaggagccgcggccggagaggccggactgggttctcatcgactacgccgcgtactgggcgcccgcggccgcggcgaggcacggcgtgccgtgcgccttcctgagcctgttcggcgccgcgaccctcagtttctatgggcccccggaggggctcatgggacgcggcaagtacgccaggacgaagccggaggacctcaccgtagtacccgactacgtgccgttcccaacaaccgtcgcgcaccgcggcttcgaggcgcgcgagctattcaagccaggccttgtcccggacgactccggcgtgtcggagggccacaggttcggcgtgtccatcggagagagccagatcgtaggcatcaggagcagaacagagctcgagtcggagtggctgcaggtgcttggcaagctctacaagaagccggtgatcccgatcggcctgttccctccgccgcccacgcaagacatcgccggccacgaggcgactttgcggtggctggacagacaggctcagggctccgtcgtgtacgcggccttcggcagcgaggcgaagctgacgagcgcgcagctccaaacaattgcgctaggtttggaggcttccggcctgccgttcctctgggcattcaggccgccaaccgacgccgcaccaggacaaggcacgggcgggttgcccgaaggcttcaaggagcgtgtcaatggccggggattggtctgccgcggctgggtgcctcaacccaggctgttggctcatgaatcggttggtgggtttctgacccacgccggctggaactccatcgccgaaggcctctcgcggggcgtcacgatggtgctgttgccgctgatgttcgatcagggcctcaacgccaggcttcttgtggataagaagatcgggattgaggtggagagggacgaagacgacggcacgttcgcgcccaaagacatcgcggatgctctgaggacggccatggcggagaaccaagacgggactagggtcaaggaactggccgaggtgtttggaaatgacgaggccaatgatcagtgcctgcgagatttcctccggtatctgttagaatacatcaggcagcatcaaggttagttccagtccatttcgaggctaatgttaatgcagaaaagggcaaagaaatggtagtgagtcacgtcacgctatcaaaaaaaaaaaatccttccaggt

SEQ ID NO: 8265 - protein, 472 aa, Zea mays subsp. mays
  peptide (1)..(472): Ceres Seq. ID no. 13498684
  misc_feature (10)..(469): Pfam Name: UDP-glucoronosyl and UDP-glucosyl transferase Pfam Description: UDP-glucoronosyl and UDP-glucosyl transferase
  misc_feature (2)..(472): Homolog of NCBI NO: 34908562 NR Description: putative anthocyanidine rhamnosyl-transferase
  misc_feature (3)..(464): Homolog of NCBI NO: 15450577 NR Description: At2g22590/T9I22.3 [Arabidopsis thaliana]
  misc_feature (5)..(466): Homolog of NCBI NO: 20149064 NR Description: putative anthocyanidine rhamnosyl-transferase
  misc_feature (3)..(464): Homolog of NCBI NO: 18400022 NR Description: glycosyltransferase family [Arabidopsis thaliana]
  misc_feature (1)..(463): Homolog of NCBI NO: 15240534 NR Description: UDP-glycosyltransferase family [Arabidopsis
  misc_feature (9)..(454): Homolog of NCBI NO: 34393985 NR Description: putative UDP-glucosyltransferase [Oryza sativa
  misc_feature (1)..(463): Homolog of NCBI NO: 21435782 NR Description: UDP-glucosyltransferase [Stevia rebaudiana]
  misc_feature (1)..(260): Homolog of NCBI NO: 34393978 NR Description: putative UDP-glucosyltransferase [Oryza sativa
  misc_feature (271)..(466): Homolog of NCBI NO: 34393978 NR Description: putative UDP-glucosyltransferase [Oryza sativa
  misc_feature (9)..(463): Homolog of NCBI NO: 15238503 NR Description: UDP-glycosyltransferase family [Arabidopsis
MGDANGGSMHVVMLPWLAFGHILPFTELAKRIARQGHRVTLFSTPRNTRRLIRIPPELAGHIRVVDIALPRVERLPEDCEASIDLPSDDLRPYLRVAYDAAFADKLSAILQEPRPERPDWVLIDYAAYWAPAAAARHGVPCAFLSLFGAATLSFYGPPEGLMGRGKYARTKPEDLTVVPDYVPFPTTVAHRGFEARELFKPGLVPDDSGVSEGHRFGVSIGESQIVGIRSRTELESEWLQVLGKLYKKPVIPIGLFPPPPTQDIAGHEATLRWLDRQAQGSVVYAAFGSEAKLTSAQLQTIALGLEASGLPFLWAFRPPTDAAPGQGTGGLPEGFKERVNGRGLVCRGWVPQPRLLAHESVGGFLTHAGWNSIAEGLSRGVTMVLLPLMFDQGLNARLLVDKKIGIEVERDEDDGTFAPKDIADALRTAMAENQDGTRVKELAEVFGNDEANDQCLRDFLRYLLEYIRQHQG

SEQ ID NO: 8266 - protein, 464 aa, Zea mays subsp. mays
  peptide (1)..(464): Ceres Seq. ID no. 13498685
  misc_feature (2)..(461): Pfam Name: UDP-glucoronosyl and UDP-glucosyl transferase Pfam Description: UDP-glucoronosyl and UDP-glucosyl transferase
  misc_feature (1)..(464): Homolog of NCBI NO: 34908562 NR Description: putative anthocyanidine rhamnosyl-transferase
  misc_feature (1)..(456): Homolog of NCBI NO: 15450577 NR Description: At2g22590/T9I22.3 [Arabidopsis thaliana]
  misc_feature (1)..(458): Homolog of NCBI NO: 20149064 NR Description: putative anthocyanidine rhamnosyl-transferase
  misc_feature (1)..(456): Homolog of NCBI NO: 18400022 NR Description: glycosyltransferase family [Arabidopsis thaliana]
  misc_feature (1)..(455): Homolog of NCBI NO: 15240534 NR Description: UDP-glycosyltransferase family [Arabidopsis
  misc_feature (1)..(446): Homolog of NCBI NO: 34393985 NR Description: putative UDP-glucosyltransferase [Oryza sativa
  misc_feature (1)..(455): Homolog of NCBI NO: 21435782 NR Description: UDP-glucosyltransferase [Stevia rebaudiana]
  misc_feature (1)..(252): Homolog of NCBI NO: 34393978 NR Description: putative UDP-glucosyltransferase [Oryza sativa
  misc_feature (263)..(458): Homolog of NCBI NO: 34393978 NR Description: putative UDP-glucosyltransferase [Oryza sativa
  misc_feature (1)..(455): Homolog of NCBI NO: 15238503 NR Description: UDP-glycosyltransferase family [Arabidopsis
MHVVMLPWLAFGHILPFTELAKRIARQGHRVTLFSTPRNTRRLIRIPPELAGHIRVVDIALPRVERLPEDCEASIDLPSDDLRPYLRVAYDAAFADKLSAILQEPRPERPDWVLIDYAAYWAPAAAARHGVPCAFLSLFGAATLSFYGPPEGLMGRGKYARTKPEDLTVVPDYVPFPTTVAHRGFEARELFKPGLVPDDSGVSEGHRFGVSIGESQIVGIRSRTELESEWLQVLGKLYKKPVIPIGLFPPPPTQDIAGHEATLRWLDRQAQGSVVYAAFGSEAKLTSAQLQTIALGLEASGLPFLWAFRPPTDAAPGQGTGGLPEGFKERVNGRGLVCRGWVPQPRLLAHESVGGFLTHAGWNSIAEGLSRGVTMVLLPLMFDQGLNARLLVDKKIGIEVERDEDDGTFAPKDIADALRTAMAENQDGTRVKELAEVFGNDEANDQCLRDFLRYLLEYIRQHQG

SEQ ID NO: 8267 - protein, 460 aa, Zea mays subsp. mays
  peptide (1)..(460): Ceres Seq. ID no. 13498686
  misc_feature (1)..(457): Pfam Name: UDP-glucoronosyl and UDP-glucosyl transferase Pfam Description: UDP-glucoronosyl and UDP-glucosyl transferase
  misc_feature (1)..(451): Homolog of NCBI NO: 15238503 NR Description: UDP-glycosyltransferase family [Arabidopsis
  misc_feature (1)..(460): Homolog of NCBI NO: 34908562 NR Description: putative anthocyanidine rhamnosyl-transferase
  misc_feature (1)..(452): Homolog of NCBI NO: 15450577 NR Description: At2g22590/T9I22.3 [Arabidopsis thaliana]
  misc_feature (1)..(454): Homolog of NCBI NO: 20149064 NR Description: putative anthocyanidine rhamnosyl-transferase
  misc_feature (1)..(452): Homolog of NCBI NO: 18400022 NR Description: glycosyltransferase family [Arabidopsis thaliana]
  misc_feature (1)..(451): Homolog of NCBI NO: 15240534 NR Description: UDP-glycosyltransferase family [Arabidopsis
  misc_feature (1)..(442): Homolog of NCBI NO: 34393985 NR Description: putative UDP-glucosyltransferase [Oryza sativa
  misc_feature (1)..(451): Homolog of NCBI NO: 21435782 NR Description: UDP-glucosyltransferase [Stevia rebaudiana]
  misc_feature (1)..(248): Homolog of NCBI NO: 34393978 NR Description: putative UDP-glucosyltransferase [Oryza sativa
  misc_feature (259)..(454): Homolog of NCBI NO: 34393978 NR Description: putative UDP-glucosyltransferase [Oryza sativa
MLPWLAFGHILPFTELAKRIARQGHRVTLFSTPRNTRRLIRIPPELAGHIRVVDIALPRVERLPEDCEASIDLPSDDLRPYLRVAYDAAFADKLSAILQEPRPERPDWVLIDYAAYWAPAAAARHGVPCAFLSLFGAATLSFYGPPEGLMGRGKYARTKPEDLTVVPDYVPFPTTVAHRGFEARELFKPGLVPDDSGVSEGHRFGVSIGESQIVGIRSRTELESEWLQVLGKLYKKPVIPIGLFPPPPTQDIAGHEATLRWLDRQAQGSVVYAAFGSEAKLTSAQLQTIALGLEASGLPFLWAFRPPTDAAPGQGTGGLPEGFKERVNGRGLVCRGWVPQPRLLAHESVGGFLTHAGWNSIAEGLSRGVTMVLLPLMFDQGLNARLLVDKKIGIEVERDEDDGTFAPKDIADALRTAMAENQDGTRVKELAEVFGNDEANDQCLRDFLRYLLEYIRQHQG

SEQ ID NO: 8268 - DNA, 924 bp, Zea mays subsp. mays
  misc_feature (1)..(924): Ceres Seq. ID no. 12367187
  misc_feature: MA Experiment ID: 108535 Result: Up-regulated in Transcription
  misc_feature: MA Experiment 108535 PARAMETER Experiment Name: Zm_Meristem_P Parameter: Age (day) Value: 8
  misc_feature: MA Experiment 108535 PARAMETER Experiment Name: Zm_Meristem_P Parameter: Organism Value: Zea mays
  misc_feature: MA Experiment 108535 PARAMETER Experiment Name: Zm_Meristem_P Parameter: Plant Line Value: 35A19
  misc_feature: MA Experiment 108535 PARAMETER Experiment Name: Zm_Meristem_P Parameter: Tissue Value: Root Meristem vs. Above Root Meristem
  misc_feature: MA Experiment ID: 20000108 Result: Up-regulated in Transcription
  misc_feature: MA Experiment 20000108 PARAMETER Experiment Name: Zm_Root-Tips_P Parameter: Age (day) Value: 12
  misc_feature: MA Experiment 20000108 PARAMETER Experiment Name: Zm_Root-Tips_P Parameter: Organism Value: Zea mays
  misc_feature: MA Experiment 20000108 PARAMETER Experiment Name: Zm_Root-Tips_P Parameter: Tissue Value: Root tips vs. Root mid region    35
  misc_feature: MA Experiment 20000108 PARAMETER Experiment Name: Zm_Root-Tips_P Parameter: Tissue Value: Root tips vs. Root mid region   Sequence Listing-Misc Features (4)
  misc_feature: MA Experiment ID: 20000488 Result: Up-regulated in Transcription
  misc_feature: MA Experiment 20000488 PARAMETER Experiment Name: Zm_50mM_NH4NO3_L_to_H_P Parameter: Organism Value: Zea mays
  misc_feature: MA Experiment 20000488 PARAMETER Experiment Name: Zm_50mM_NH4NO3_L_to_H_P Parameter: Timepoint (hr) Value: 8
  misc_feature: MA Experiment 20000488 PARAMETER Experiment Name: Zm_50mM_NH4NO3_L_to_H_P Parameter: Tissue Value: Leaves
  misc_feature: MA Experiment 20000488 PARAMETER Experiment Name: Zm_50mM_NH4NO3_L_to_H_P Parameter: Treatment Value: 50mM NH4NO3 vs. 100mM Mannitol
agtttttcatgggctgacccggttatgtggccttgttagttttcgcctaatttcaaataacagcaatttcttagtggcccgtacactctgcagcagtgcggtgcgggcgtgcggcctccctttttttctccagttcctccggcggcggcgtgcttggcggtgcgccaggtgcccagatctccaccatcttagtcgccggcgacgagcatcaccaggttcccgatgaccatggcgcagcgcacgatgtgcctgcttcggcggtccattgggtttacagcgccgcaggcacagagagccctgagtaccactgccgcaccagcggcggagggtgcggccgtggctgaagctacggcgaaggaggcgaagaggaggaggaagaatctgtttgacgtagtgcagttcctgccagagtggggcattggatacaaggttgccaagaccacctggcgtgacgtctcctatcagatcaccaagatcaacctgtacaaggatggtcggcatggaaaggcgtgggggcttcggtacaaggcaggtgtgcaagctgcagacaccccaactaggatcagcggtgttaacaaacgtgggtggaagtacataaaagaatcacagaagaaactacaagaagcccccaaagtagacgtagctgttgctgctgcctagttcgtagttacatgcatgtttgttgtaagatgattcggtaaatctttagatggctgttgccagggtgagaacagggaaccacttttttttggatcgactctatacttttttgtcgatgacgactgaacctctctgcaacatgtccagtttcttttcttttccttatggaacgaacctttaccgtaatgtactgatgcagaagaactgcgttgattgtggcgatctagttttcattcaaacgcaagccttgtttcattctgagcc

SEQ ID NO: 8269 - protein, 145 aa, Zea mays subsp. mays
  peptide (1)..(145): Ceres Seq. ID no. 12367188
  misc_feature (8)..(143): Homolog of NCBI NO: 15237795 NR Description: putative protein; protein id: At5g58990.1, by cDNA: gi_15450823, supported by cDNA: gi_20148678 [Arabidopsis >gi|9759230|dbj|BAB09642.1| gene_id:K19M22.18~unknown protein
  misc_feature (8)..(143): Homolog of NCBI NO: 18423383 NR Description: expressed protein; protein id: At5g52370.1, by cDNA: gi_14334577, supported by cDNA: gi_17104516 [Arabidopsis >gi|10177403|dbj|BAB10534.1| gene_id:K24M7.11~unknown protein
MTMAQRTMCLLRRSIGFTAPQAQRALSTTAAPAAEGAAVAEATAKEAKRRRKNLFDVVQFLPEWGIGYKVAKTTWRDVSYQITKINLYKDGRHGKAWGLRYKAGVQAADTPTRISGVNKRGWKYIKESQKKLQEAPKVDVAVAAA

SEQ ID NO: 8270 - protein, 143 aa, Zea mays subsp. mays
  peptide (1)..(143): Ceres Seq. ID no. 12367189
  misc_feature (6)..(141): Homolog of NCBI NO: 15237795 NR Description: putative protein; protein id: At5g58990.1, by cDNA: gi_15450823, supported by cDNA: gi_20148678 [Arabidopsis >gi|9759230|dbj|BAB09642.1| gene_id:K19M22.18~unknown protein
  misc_feature (6)..(141): Homolog of NCBI NO: 18423383 NR Description: expressed protein; protein id: At5g52370.1, by cDNA: gi_14334577, supported by cDNA: gi_17104516 [Arabidopsis >gi|10177403|dbj|BAB10534.1| gene_id:K24M7.11~unknown protein
MAQRTMCLLRRSIGFTAPQAQRALSTTAAPAAEGAAVAEATAKEAKRRRKNLFDVVQFLPEWGIGYKVAKTTWRDVSYQITKINLYKDGRHGKAWGLRYKAGVQAADTPTRISGVNKRGWKYIKESQKKLQEAPKVDVAVAAA

SEQ ID NO: 8271 - protein, 138 aa, Zea mays subsp. mays
  peptide (1)..(138): Ceres Seq. ID no. 12367190
  misc_feature (1)..(136): Homolog of NCBI NO: 15237795 NR Description: putative protein; protein id: At5g58990.1, by cDNA: gi_15450823, supported by cDNA: gi_20148678 [Arabidopsis >gi|9759230|dbj|BAB09642.1| gene_id:K19M22.18~unknown protein
  misc_feature (1)..(136): Homolog of NCBI NO: 18423383 NR Description: expressed protein; protein id: At5g52370.1, by cDNA: gi_14334577, supported by cDNA: gi_17104516 [Arabidopsis >gi|10177403|dbj|BAB10534.1| gene_id:K24M7.11~unknown protein
MCLLRRSIGFTAPQAQRALSTTAAPAAEGAAVAEATAKEAKRRRKNLFDVVQFLPEWGIGYKVAKTTWRDVSYQITKINLYKDGRHGKAWGLRYKAGVQAADTPTRISGVNKRGWKYIKESQKKLQEAPKVDVAVAAA

SEQ ID NO: 8272 - DNA, 1189 bp, Zea mays subsp. mays
  misc_feature (1)..(1189): Ceres Seq. ID no. 13498621
  misc_feature: MA Experiment ID: 108543 Result: Down-regulated in Transcription
attatcgaccagcaccctcatctatatccatcaacatcgatccatccatccatcatggcggcggagcagcagcatcagctggatctgccggggttccggttccacccgacggaggaggagctgctggagttctacctgaagcaggcggcgcgcgggaggaagctcaagttcgacatcatccccacggtgcacctgtaccggcacgacccctgggagctgccgagcctggcgcgcgtcgttggcgagcgcgagtggtacttcttcgtgccccgcgacggcggcgggcgggcggccaagcagcagcccggctccggcggccggcctagccgcaccacggagcgcgggttctggaaggccacggggtcggaccgcgccgtgcggtgcgccgccgaccccaagcgcctcatcgggctcaagaagacgctcgtctactacgagggccgcgcgccgcggggcaccaagacggactgggtcatgaacgagtaccgcctccccgacgctgccgacgctagcagcgacgcgcgcgtgccgcaggtggacgtggtgctgtgcaaggtctaccgcaaggccgtgtcgctcaaggagctggagcagcgggtggccatggaggagctcgcgcgcgccaccgccacgccgtccgcgtcccacagcaccggctcccccgccgactccatgtcgtcgtcggagatcgtgatggtgcccgtgggcggcgtctcgctctcaccgtcagctgcgatgagcatgaagagagaggaggcggcgaagaatcagcagcagcaggaccccttcctgacgcagctgcggagcccacggatggagagctggtggtctgcctactacgccagcgtcctcaacttctaaccaaaatccacacaatccaacagctttatatgtaaagcgaaggcccacgctcacagtcgtcggcccaactgatgcccgtgcgccgcgcgctgggccgcacggcccaagagctaccaagcgcgggcacgcaccgcggcagcccaaggatctctccaccttatctccctgctcgggactcgggacctttacctatcttcttcgttcttccatgggagcgagctagagagagggcgccatggatcagcagcttctcgtggatgactccaatcatattaacgatatactaacttataatgtgccgatcgttgaacaccgtttattttgattc

SEQ ID NO: 8273 - protein, 286 aa, Zea mays subsp. mays
  peptide (1)..(286): Ceres Seq. ID no. 13498622
  misc_feature (29)..(165): Pfam Name: No apical meristem (NAM) protein Pfam Description: No apical meristem (NAM) protein
  misc_feature (27)..(261): Homolog of NCBI NO: 25411775 NR Description: NAM (no apical meristem)-like protein [imported]
  misc_feature (52)..(261): Homolog of NCBI NO: 18398293 NR Description: No apical meristem (NAM) protein family thaliana] >gi|13605647|gb|AAK32817.1|AF361804_1 At2g17040 thaliana] >gi|20857250|gb|AAM26707.1| At2g17040/At2g17040
  misc_feature (20)..(189): Homolog of NCBI NO: 30678000 NR Description: No apical meristem (NAM) protein family thaliana] >gi|24030186|gb|AAN41274.1| putative NAM (no apical
  misc_feature (20)..(189): Homolog of NCBI NO: 30678002 NR Description: No apical meristem (NAM) protein family
  misc_feature (20)..(165): Homolog of NCBI NO: 25410986 NR Description: NAM (no apical meristem)-like protein [imported]
  misc_feature (22)..(231): Homolog of NCBI NO: 40786563 NR Description: putative NAC-domain protein [Oryza sativa
  misc_feature (18)..(257): Homolog of NCBI NO: 34897020 NR Description: putative NAM (no apical meristem) protein [Oryza
  misc_feature (22)..(170): Homolog of NCBI NO: 10177980 NR Description: NAM (no apical meristem)-like protein
  misc_feature (18)..(285): Homolog of NCBI NO: 4218535 NR Description: GRAB1 protein [Triticum sp.]
  misc_feature (29)..(231): Homolog of NCBI NO: 15223376 NR Description: No apical meristem (NAM) protein family
IIDQHPHLYPSTSIHPSIMAAEQQHQLDLPGFRFHPTEEELLEFYLKQAARGRKLKFDIIPTVHLYRHDPWELPSLARVVGEREWYFFVPRDGGGRAAKQQPGSGGRPSRTTERGFWKATGSDRAVRCAADPKRLIGLKKTLVYYEGRAPRGTKTDWVMNEYRLPDAADASSDARVPQVDVVLCKVYRKAVSLKELEQRVAMEELARATATPSASHSTGSPADSMSSSEIVMVPVGGVSLSPSAAMSMKREEAAKNQQQQDPFLTQLRSPRMESWWSAYYASVLNF

SEQ ID NO: 8274 - protein, 268 aa, Zea mays subsp. mays
  peptide (1)..(268): Ceres Seq. ID no. 13498623
  misc_feature (11)..(147): Pfam Name: No apical meristem (NAM) protein Pfam Description: No apical meristem (NAM) protein
  misc_feature (9)..(243): Homolog of NCBI NO: 25411775 NR Description: NAM (no apical meristem)-like protein [imported]
  misc_feature (34)..(243): Homolog of NCBI NO: 18398293 NR Description: No apical meristem (NAM) protein family thaliana] >gi|13605647|gb|AAK32817.1|AF361804_1 At2g17040 thaliana] >gi|20857250|gb|AAM26707.1| At2g17040/At2g17040
  misc_feature (2)..(171): Homolog of NCBI NO: 30678000 NR Description: No apical meristem (NAM) protein family thaliana] >gi|24030186|gb|AAN41274.1| putative NAM (no apical
  misc_feature (2)..(171): Homolog of NCBI NO: 30678002 NR Description: No apical meristem (NAM) protein family
  misc_feature (2)..(147): Homolog of NCBI NO: 25410986 NR Description: NAM (no apical meristem)-like protein [imported]
  misc_feature (4)..(213): Homolog of NCBI NO: 40786563 NR Description: putative NAC-domain protein [Oryza sativa
  misc_feature (1)..(239): Homolog of NCBI NO: 34897020 NR Description: putative NAM (no apical meristem) protein [Oryza
  misc_feature (4)..(152): Homolog of NCBI NO: 10177980 NR Description: NAM (no apical meristem)-like protein
  misc_feature (1)..(267): Homolog of NCBI NO: 4218535 NR Description: GRAB1 protein [Triticum sp.]
  misc_feature (11)..(213): Homolog of NCBI NO: 15223376 NR Description: No apical meristem (NAM) protein family
MAAEQQHQLDLPGFRFHPTEEELLEFYLKQAARGRKLKFDIIPTVHLYRHDPWELPSLARVVGEREWYFFVPRDGGGRAAKQQPGSGGRPSRTTERGFWKATGSDRAVRCAADPKRLIGLKKTLVYYEGRAPRGTKTDWVMNEYRLPDAADASSDARVPQVDVVLCKVYRKAVSLKELEQRVAMEELARATATPSASHSTGSPADSMSSSEIVMVPVGGVSLSPSAAMSMKREEAAKNQQQQDPFLTQLRSPRMESWWSAYYASVLNF

SEQ ID NO: 8275 - DNA, 1672 bp, Zea mays subsp. mays
  misc_feature (1)..(1672): Ceres Seq. ID no. 12367459
  misc_feature: MA Experiment ID: 108522 Result: Down-regulated in Transcription
  misc_feature: MA Experiment 108522 PARAMETER Experiment Name: Zm_42deg_Heat_P Parameter: Age (day) Value: 8
  misc_feature: MA Experiment 108522 PARAMETER Experiment Name: Zm_42deg_Heat_P Parameter: Organism Value: Zea mays
  misc_feature: MA Experiment 108522 PARAMETER Experiment Name: Zm_42deg_Heat_P Parameter: Plant Line Value: 35A19
  misc_feature: MA Experiment 108522 PARAMETER Experiment Name: Zm_42deg_Heat_P Parameter: Temperature (deg C) Value: 42 vs. 22
  misc_feature: MA Experiment 108522 PARAMETER Experiment Name: Zm_42deg_Heat_P Parameter: Timepoint (hr) Value: 1
  misc_feature: MA Experiment 108522 PARAMETER Experiment Name: Zm_42deg_Heat_P Parameter: Tissue Value: Aerial
  misc_feature: MA Experiment ID: 108523 Result: Down-regulated in Transcription
  misc_feature: MA Experiment 108523 PARAMETER Experiment Name: Zm_42deg_Heat_P Parameter: Age (day) Value: 8
  misc_feature: MA Experiment 108523 PARAMETER Experiment Name: Zm_42deg_Heat_P Parameter: Organism Value: Zea mays
  misc_feature: MA Experiment 108523 PARAMETER Experiment Name: Zm_42deg_Heat_P Parameter: Plant Line Value: 35A19
  misc_feature: MA Experiment 108523 PARAMETER Experiment Name: Zm_42deg_Heat_P Parameter: Temperature (deg C) Value: 42 vs. 22
  misc_feature: MA Experiment 108523 PARAMETER Experiment Name: Zm_42deg_Heat_P Parameter: Timepoint (hr) Value: 6
  misc_feature: MA Experiment 108523 PARAMETER Experiment Name: Zm_42deg_Heat_P Parameter: Tissue Value: Aerial
  misc_feature: MA Experiment ID: 108689 Result: Up-regulated in Transcription
  misc_feature: MA Experiment 108689 PARAMETER Experiment Name: Zm_Drought_Roots_P Parameter: Age (day) Value: 9
  misc_feature: MA Experiment 108689 PARAMETER Experiment Name: Zm_Drought_Roots_P Parameter: Organism Value: Zea mays
  misc_feature: MA Experiment 108689 PARAMETER Experiment Name: Zm_Drought_Roots_P Parameter: Plant Line Value: 35A19
  misc_feature: MA Experiment 108689 PARAMETER Experiment Name: Zm_Drought_Roots_P Parameter: Timepoint (hr) Value: 24
  misc_feature: MA Experiment 108689 PARAMETER Experiment Name: Zm_Drought_Roots_P Parameter: Tissue Value: Roots
  misc_feature: MA Experiment 108689 PARAMETER Experiment Name: Zm_Drought_Roots_P Parameter: Treatment Value: Drought vs. No Drought
  misc_feature: MA Experiment ID: 20000488 Result: Down-regulated in Transcription
  misc_feature: MA Experiment 20000488 PARAMETER Experiment Name: Zm_50mM_NH4NO3_L_to_H_P Parameter: Organism Value: Zea mays
  misc_feature: MA Experiment 20000488 PARAMETER Experiment Name: Zm_50mM_NH4NO3_L_to_H_P Parameter: Timepoint (hr) Value: 8
  misc_feature: MA Experiment 20000488 PARAMETER Experiment Name: Zm_50mM_NH4NO3_L_to_H_P Parameter: Tissue Value: Leaves
  misc_feature: MA Experiment 20000488 PARAMETER Experiment Name: Zm_50mM_NH4NO3_L_to_H_P Parameter: Treatment Value: 50mM NH4NO3 vs. 100mM Mannitol
  misc_feature: MA Experiment ID: 20000534 Result: Down-regulated in Transcription
  misc_feature: MA Experiment 20000534 PARAMETER Experiment Name: Zm_Hybrid_Pollen_P Parameter: Age (day) Value: 8
  misc_feature: MA Experiment 20000534 PARAMETER Experiment Name: Zm_Hybrid_Pollen_P Parameter: Organism Value: Zea mays
  misc_feature: MA Experiment 20000534 PARAMETER Experiment Name: Zm_Hybrid_Pollen_P Parameter: Plant Line Value: 35A19
  misc_feature: MA Experiment 20000534 PARAMETER Experiment Name: Zm_Hybrid_Pollen_P Parameter: Tissue Value: Pollen vs. Aerial
gcactccgcaattccgcatcacgcaccccaccccaccgcccgcaaccgcaagctcagattccctcccaccccaccccaccgtcccgctcactccagcccagcccgcgtccccacagcccagcgacagcgagcaccggcggcatccagccatgtgcggcggcgccatcctgtcggacatcatcccgccgccgccgccgcggcgtgtcacggcgggccacctctggcccgagagcaagaagccgaggagggctgcagccggcaggaggagagcccccgtggagcaggagcaggaggaggatttcgaggccgacttcgaggagttcgaggtggagtccggcgagtcggagctcgagtccgaggacgagcccaagcccaagcccttcgccgcccccagcagcgcgctcgccagaggtggactaaacactggtgcagctggtgtcgatggccctgctgcaaattcagttaaaaggaagaggaagaaccagttcaggggtatccgccggcgcccgtggggcaaatgggctgctgagatcagagatcctcgcaagggcgtgcgcgtctggctcggtacattcaactctcccgaagaagctgccagagcttacgacgccgaggcacgcaggatccgcggcaagaaggctaaagtcaacttcccggatgaggttcctacggcggtttctcagaagcgccgtgctgctgggcttgcctctctgaaagcgcctaagatggacgttgaggaggagaagccgatcatcaagctcgcagtgaacaatatgaccaactcaaacgcatatcactaccctgccgtcgtcggccaccacaacatcatacccgagccattcatgcagactcagaacatgccattcgctcctctggtgaattatgctgccctcgtgaacctgtcttcacaccaaggcagcaactcgttcggttgctcggacttcagcctcgagaacgactccaggacccctgacataacttcggtgcctgcgcccgttgccaccttggccgccgttggagagtctgcgttcgtccagaacacggccggccatgctgtggcgcctcctgcgacggggaacactggtgttgatctcgctgagttggagccgtatatggatttcctgatggacggtggttcagacgactcgatcagcactctcttgagctgtgatggatcccaggacgtggtcagcaacatggacctttggagcttcgacgacatgcccatgtctgctggtttctactgaggctgaggcccagcgactggtgcttgactgcttgtgtacatagggggggacaaagggtaagagcctgcagtaacagagattggctctttctggtacttgcaatttctatcccttcaactctttcttccgcccccgtgtttcaggaataatgttctggagatgaagaatcgcttgcgtgggcgtgcctgcaggcacgcgtgtagtagctgcggtattagtatatatgcttagatgttcagtcactttctttaagtacaatttggcgctggacatgtaccttattttactatgtatccgtgacaacagctatgtgtctgctccttttattttcttgtctttgcttcaaaaaaatggctctgaacattgcgagtttgtactttgtagacaatatatatatatgtgtgtgtatgtgcttggtttgcttc

SEQ ID NO: 8276 - protein, 414 aa, Zea mays subsp. mays
  peptide (1)..(414): Ceres Seq. ID no. 12367460
  misc_feature (159)..(222): Pfam Name: AP2 domain Pfam Description: AP2 domain
  misc_feature (50)..(414): Homolog of NCBI NO: 6176534 NR Description: EREBP-like protein [Oryza sativa]
  misc_feature (50)..(414): Homolog of NCBI NO: 6689918 NR Description: transcription factor EREBP1 [Oryza sativa]
  misc_feature (50)..(414): Homolog of NCBI NO: 24940524 NR Description: ethylene response element binding protein
  misc_feature (50)..(414): Homolog of NCBI NO: 30525872 NR Description: ethylene-responsive element binding protein
  misc_feature (84)..(414): Homolog of NCBI NO: 30525870 NR Description: ethylene-responsive element binding protein
  misc_feature (50)..(412): Homolog of NCBI NO: 38343926 NR Description: ethylene transcription factor [Fagus sylvatica]
  misc_feature (50)..(412): Homolog of NCBI NO: 18496063 NR Description: ethylene responsive element binding protein
TPQFRITHPTPPPATASSDSLPPHPTVPLTPAQPASPQPSDSEHRRHPAMCGGAILSDIIPPPPPRRVTAGHLWPESKKPRRAAAGRRRAPVEQEQEEDFEADFEEFEVESGESELESEDEPKPKPFAAPSSALARGGLNTGAAGVDGPAANSVKRKRKNQFRGIRRRPWGKWAAEIRDPRKGVRVWLGTFNSPEEAARAYDAEARRIRGKKAKVNFPDEVPTAVSQKRRAAGLASLKAPKMDVEEEKPIIKLAVNNMTNSNAYHYPAVVGHHNIIPEPFMQTQNMPFAPLVNYAALVNLSSHQGSNSFGCSDFSLENDSRTPDITSVPAPVATLAAVGESAFVQNTAGHAVAPPATGNTGVDLAELEPYMDFLMDGGSDDSISTLLSCDGSQDVVSNMDLWSFDDMPMSAGFY

SEQ ID NO: 8277 - protein, 365 aa, Zea mays subsp. mays
  peptide (1)..(365): Ceres Seq. ID no. 12367461
  misc_feature (110)..(173): Pfam Name: AP2 domain Pfam Description: AP2 domain
  misc_feature (1)..(365): Homolog of NCBI NO: 6176534 NR Description: EREBP-like protein [Oryza sativa]
  misc_feature (1)..(365): Homolog of NCBI NO: 6689918 NR Description: transcription factor EREBP1 [Oryza sativa]
  misc_feature (1)..(365): Homolog of NCBI NO: 24940524 NR Description: ethylene response element binding protein
  misc_feature (1)..(365): Homolog of NCBI NO: 30525872 NR Description: ethylene-responsive element binding protein
  misc_feature (35)..(365): Homolog of NCBI NO: 30525870 NR Description: ethylene-responsive element binding protein
  misc_feature (1)..(363): Homolog of NCBI NO: 38343926 NR Description: ethylene transcription factor [Fagus sylvatica]
  misc_feature (1)..(363): Homolog of NCBI NO: 18496063 NR Description: ethylene responsive element binding protein
MCGGAILSDIIPPPPPRRVTAGHLWPESKKPRRAAAGRRRAPVEQEQEEDFEADFEEFEVESGESELESEDEPKPKPFAAPSSALARGGLNTGAAGVDGPAANSVKRKRKNQFRGIRRRPWGKWAAEIRDPRKGVRVWLGTFNSPEEAARAYDAEARRIRGKKAKVNFPDEVPTAVSQKRRAAGLASLKAPKMDVEEEKPIIKLAVNNMTNSNAYHYPAVVGHHNIIPEPFMQTQNMPFAPLVNYAALVNLSSHQGSNSFGCSDFSLENDSRTPDITSVPAPVATLAAVGESAFVQNTAGHAVAPPATGNTGVDLAELEPYMDFLMDGGSDDSISTLLSCDGSQDVVSNMDLWSFDDMPMSAGFY

SEQ ID NO: 8278 - DNA, 1572 bp, Zea mays subsp. mays
  misc_feature (1)..(1572): Ceres Seq. ID no. 12405446
  misc_feature: MA Experiment ID: 108559 Result: Up-regulated in Transcription
  misc_feature: MA Experiment 108559 PARAMETER Experiment Name: Zm_5mM_NO_P Parameter: Age (day) Value: 8
  misc_feature: MA Experiment 108559 PARAMETER Experiment Name: Zm_5mM_NO_P Parameter: Organism Value: Zea mays
  misc_feature: MA Experiment 108559 PARAMETER Experiment Name: Zm_5mM_NO_P Parameter: Plant Line Value: 35A19
  misc_feature: MA Experiment 108559 PARAMETER Experiment Name: Zm_5mM_NO_P Parameter: Timepoint (hr) Value: 12
  misc_feature: MA Experiment 108559 PARAMETER Experiment Name: Zm_5mM_NO_P Parameter: Tissue Value: Aerial
  misc_feature: MA Experiment 108559 PARAMETER Experiment Name: Zm_5mM_NO_P Parameter: Treatment Value: 5mM NO vs. No Treatment
attgggttccccgctctgctcctcagctcagccctcttgctcctgacctgccgtcctcctccttccctccccgtgagtcgccgtacggcggtacggggatcgccaccgcggcgtccagggatggcggacgggagcctctacgcctggtggtgttgtgccttgggctgggcgctggcgcttgtcgcagcggacggcttcctcgtggacatcacctatgtggaaagcgccgtggccaaaggagcagtgtgtttggatggtagtgcgccggcgtaccatctcgcccgcggctccggctccggtgagaagagctggctggtccatttcgaggggggaggctggtgcaacaatgtcaccacctgcctgcaacggaagcgcactcggttgggttcgtccaaggagatggcgacggcagattgccttctccggaatcctgagtgacacgccggatgacaacccagatttttacaattggaacaaggtcaaggttcggtactgtgatggttcatctttcactggagatgttgaagaagttgaccctgcaacaaagctacattatagaggtgcgaggatatggcaagctgtcatggacgacctgcttgccaaagggatggacaaagctgaaaatgctctaatttcaggctgttctgctggtggtttaacctccatactacactgtgacagatttcatgaccttctgccgccggctgcgagggttaagtgcctttctgatgctgggttcttcattaatgagaaagacgttgcaggagttgggtacattgctgcctttttcaacgacgtcgttacaacacatgggtcagcaaagaatttgccgccttcatgcacttcgacgttacctccaggaacgtgctttttcccccagaacgaggtgaaacagatacagacacctctgttcatcctcaacgcagcatatgattcatggcaggtaaggaacattttggtgccaggagtagctgaccctcatggaaaatggcatagctgtaagcatgatatagaccagtgctctgcatcgcagctacgggtattgcagggattcaggggtgattttctgaaggaagtggcagaactagggaactccgactcgagagggttgttcataaactcatgcttcgtgcactgccagtctgagatacaggagctatggttctcatctgactcccccgtgctcggaaacacaacagtagcaaacgctgttggcgactggttcttcgaccgcagctccttccagaagatagactgcccatacccttgtgactcgacctgtcacaatcggatctacgatgactcatcacaagcatagcaattacagtggcctcacttcgtactgccattcaccatgttattacatttgacgcttccagcattgctaacagtagggcaatgcgttgatagccattgattttttttttctttttacgaataagatcaggtgccggcggctttaactcggttgctaccggaaagtgagcgtgcatcttccgacggtacatggcatggtttatctggatggatgaatcgataatcataaattcttaaaaacacaataaatattct

SEQ ID NO: 8279 - protein, 367 aa, Zea mays subsp. mays
  peptide (1)..(367): Ceres Seq. ID no. 12405447
  misc_feature (66)..(346): Pfam Name: Pectinacetylesterase Pfam Description: Pectinacetylesterase
  misc_feature (66)..(366): Homolog of NCBI NO: 7488883 NR Description: pectin acetylesterase (EC 3.1.1.-) precursor - bean >gi|1431629|emb|CAA67728.1| pectinacetylesterase precursor
  misc_feature (67)..(361): Homolog of NCBI NO: 22328797 NR Description: pectinacetylesterase family; protein id:
  misc_feature (62)..(363): Homolog of NCBI NO: 38344147 NR Description: OSJNBa0041A02.14 [Oryza sativa (japonica
  misc_feature (65)..(356): Homolog of NCBI NO: 21593445 NR Description: pectin acetylesterase [Arabidopsis thaliana]
  misc_feature (65)..(356): Homolog of NCBI NO: 15242357 NR Description: pectinacetylesterase, putative; protein id: supported by cDNA: 39005., supported by cDNA: gi_16323122 thaliana] >gi|10176999|dbj|BAB10249.1| pectin acetylesterase
  misc_feature (34)..(356): Homolog of NCBI NO: 18415308 NR Description: pectinacetylesterase, putative; protein id: supported by cDNA: 34674., supported by cDNA: gi_15450901, by cDNA: gi_17978690 [Arabidopsis thaliana]
  misc_feature (65)..(362): Homolog of NCBI NO: 28392968 NR Description: putative pectinacetylesterase [Arabidopsis >gi|28827554|gb|AAO50621.1| putative pectinacetylesterase
  misc_feature (67)..(361): Homolog of NCBI NO: 15226462 NR Description: pectinacetylesterase, putative; protein id: supported by cDNA: gi_15450606 [Arabidopsis thaliana]
  misc_feature (65)..(361): Homolog of NCBI NO: 18397406 NR Description: pectinacetylesterase, putative; protein id: supported by cDNA: gi_15292826, supported by cDNA: gi_16226324, by cDNA: gi_20465792 [Arabidopsis thaliana]
  misc_feature (65)..(361): Homolog of NCBI NO: 25347293 NR Description: probable pectinacetylesterase precursor T8L23.6 - Arabidopsis thaliana >gi|12321351|gb|AAG50747.1|AC079733_15
MWKAPWPKEQCVWMVVRRRTISPAAPAPVRRAGWSISRGEAGATMSPPACNGSALGWVRPRRWRRQIAFSGILSDTPDDNPDFYNWNKVKVRYCDGSSFTGDVEEVDPATKLHYRGARIWQAVMDDLLAKGMDKAENALISGCSAGGLTSILHCDRFHDLLPPAARVKCLSDAGFFINEKDVAGVGYIAAFFNDVVTTHGSAKNLPPSCTSTLPPGTCFFPQNEVKQIQTPLFILNAAYDSWQVRNILVPGVADPHGKWHSCKHDIDQCSASQLRVLQGFRGDFLKEVAELGNSDSRGLFINSCFVHCQSEIQELWFSSDSPVLGNTTVANAVGDWFFDRSSFQKIDCPYPCDSTCHNRIYDDSSQA

SEQ ID NO: 8280 - protein, 354 aa, Zea mays subsp. mays
  peptide (1)..(354): Ceres Seq. ID no. 12405448
  misc_feature (53)..(333): Pfam Name: Pectinacetylesterase Pfam Description: Pectinacetylesterase
  misc_feature (53)..(353): Homolog of NCBI NO: 7488883 NR Description: pectin acetylesterase (EC 3.1.1.-) precursor - bean >gi|1431629|emb|CAA67728.1| pectinacetylesterase precursor
  misc_feature (54)..(348): Homolog of NCBI NO: 22328797 NR Description: pectinacetylesterase family; protein id:
  misc_feature (49)..(350): Homolog of NCBI NO: 38344147 NR Description: OSJNBa0041A02.14 [Oryza sativa (japonica
  misc_feature (52)..(343): Homolog of NCBI NO: 21593445 NR Description: pectin acetylesterase [Arabidopsis thaliana]
  misc_feature (52)..(343): Homolog of NCBI NO: 15242357 NR Description: pectinacetylesterase, putative; protein id: supported by cDNA: 39005., supported by cDNA: gi_16323122 thaliana] >gi|10176999|dbj|BAB10249.1| pectin acetylesterase
  misc_feature (21)..(343): Homolog of NCBI NO: 18415308 NR Description: pectinacetylesterase, putative; protein id: supported by cDNA: 34674., supported by cDNA: gi_15450901, by cDNA: gi_17978690 [Arabidopsis thaliana]
  misc_feature (52)..(349): Homolog of NCBI NO: 28392968 NR Description: putative pectinacetylesterase [Arabidopsis >gi|28827554|gb|AAO50621.1| putative pectinacetylesterase
  misc_feature (54)..(348): Homolog of NCBI NO: 15226462 NR Description: pectinacetylesterase, putative; protein id: supported by cDNA: gi_15450606 [Arabidopsis thaliana]
  misc_feature (52)..(348): Homolog of NCBI NO: 18397406 NR Description: pectinacetylesterase, putative; protein id: supported by cDNA: gi_15292826, supported by cDNA: gi_16226324, by cDNA: gi_20465792 [Arabidopsis thaliana]
  misc_feature (52)..(348): Homolog of NCBI NO: 25347293 NR Description: probable pectinacetylesterase precursor T8L23.6 - Arabidopsis thaliana >gi|12321351|gb|AAG50747.1|AC079733_15
MVVRRRTISPAAPAPVRRAGWSISRGEAGATMSPPACNGSALGWVRPRRWRRQIAFSGILSDTPDDNPDFYNWNKVKVRYCDGSSFTGDVEEVDPATKLHYRGARIWQAVMDDLLAKGMDKAENALISGCSAGGLTSILHCDRFHDLLPPAARVKCLSDAGFFINEKDVAGVGYIAAFFNDVVTTHGSAKNLPPSCTSTLPPGTCFFPQNEVKQIQTPLFILNAAYDSWQVRNILVPGVADPHGKWHSCKHDIDQCSASQLRVLQGFRGDFLKEVAELGNSDSRGLFINSCFVHCQSEIQELWFSSDSPVLGNTTVANAVGDWFFDRSSFQKIDCPYPCDSTCHNRIYDDSSQA

SEQ ID NO: 8281 - protein, 323 aa, Zea mays subsp. mays
  peptide (1)..(323): Ceres Seq. ID no. 12405449
  misc_feature (22)..(302): Pfam Name: Pectinacetylesterase Pfam Description: Pectinacetylesterase
  misc_feature (22)..(322): Homolog of NCBI NO: 7488883 NR Description: pectin acetylesterase (EC 3.1.1.-) precursor - bean >gi|1431629|emb|CAA67728.1| pectinacetylesterase precursor
  misc_feature (23)..(317): Homolog of NCBI NO: 22328797 NR Description: pectinacetylesterase family; protein id:
  misc_feature (18)..(319): Homolog of NCBI NO: 38344147 NR Description: OSJNBa0041A02.14 [Oryza sativa (japonica
  misc_feature (21)..(312): Homolog of NCBI NO: 21593445 NR Description: pectin acetylesterase [Arabidopsis thaliana]
  misc_feature (21)..(312): Homolog of NCBI NO: 15242357 NR Description: pectinacetylesterase, putative; protein id: supported by cDNA: 39005., supported by cDNA: gi_16323122 thaliana] >gi|10176999|dbj|BAB10249.1| pectin acetylesterase
  misc_feature (1)..(312): Homolog of NCBI NO: 18415308 NR Description: pectinacetylesterase, putative; protein id: supported by cDNA: 34674., supported by cDNA: gi_15450901, by cDNA: gi_17978690 [Arabidopsis thaliana]
  misc_feature (21)..(318): Homolog of NCBI NO: 28392968 NR Description: putative pectinacetylesterase [Arabidopsis >gi|28827554|gb|AAO50621.1| putative pectinacetylesterase
  misc_feature (23)..(317): Homolog of NCBI NO: 15226462 NR Description: pectinacetylesterase, putative; protein id: supported by cDNA: gi_15450606 [Arabidopsis thaliana]
  misc_feature (21)..(317): Homolog of NCBI NO: 18397406 NR Description: pectinacetylesterase, putative; protein id: supported by cDNA: gi_15292826, supported by cDNA: gi_16226324, by cDNA: gi_20465792 [Arabidopsis thaliana]
  misc_feature (21)..(317): Homolog of NCBI NO: 25347293 NR Description: probable pectinacetylesterase precursor T8L23.6 - Arabidopsis thaliana >gi|12321351|gb|AAG50747.1|AC079733_15
MSPPACNGSALGWVRPRRWRRQIAFSGILSDTPDDNPDFYNWNKVKVRYCDGSSFTGDVEEVDPATKLHYRGARIWQAVMDDLLAKGMDKAENALISGCSAGGLTSILHCDRFHDLLPPAARVKCLSDAGFFINEKDVAGVGYIAAFFNDVVTTHGSAKNLPPSCTSTLPPGTCFFPQNEVKQIQTPLFILNAAYDSWQVRNILVPGVADPHGKWHSCKHDIDQCSASQLRVLQGFRGDFLKEVAELGNSDSRGLFINSCFVHCQSEIQELWFSSDSPVLGNTTVANAVGDWFFDRSSFQKIDCPYPCDSTCHNRIYDDSSQA

SEQ ID NO: 8282 - DNA, 1298 bp, Zea mays subsp. mays
  misc_feature (1)..(1298): Ceres Seq. ID no. 12376925
  misc_feature: MA Experiment ID: 108529 Result: Up-regulated in Transcription
  misc_feature: MA Experiment 108529 PARAMETER Experiment Name: Zm_Imbibed_Seeds_P Parameter: Age (day) Value: 5 vs. 2
  misc_feature: MA Experiment 108529 PARAMETER Experiment Name: Zm_Imbibed_Seeds_P Parameter: Organism Value: Zea mays
  misc_feature: MA Experiment 108529 PARAMETER Experiment Name: Zm_Imbibed_Seeds_P Parameter: Plant Line Value: 35A19
  misc_feature: MA Experiment 108529 PARAMETER Experiment Name: Zm_Imbibed_Seeds_P Parameter: Tissue Value: Roots vs. Embryo
  misc_feature: MA Experiment ID: 108556 Result: Up-regulated in Transcription
  misc_feature: MA Experiment 108556 PARAMETER Experiment Name: Zm_Drought_P Parameter: Age (day) Value: 9
  misc_feature: MA Experiment 108556 PARAMETER Experiment Name: Zm_Drought_P Parameter: Organism Value: Zea mays
  misc_feature: MA Experiment 108556 PARAMETER Experiment Name: Zm_Drought_P Parameter: Plant Line Value: 35A19
  misc_feature: MA Experiment 108556 PARAMETER Experiment Name: Zm_Drought_P Parameter: Timepoint (hr) Value: 24
  misc_feature: MA Experiment 108556 PARAMETER Experiment Name: Zm_Drought_P Parameter: Tissue Value: Aerial
  misc_feature: MA Experiment 108556 PARAMETER Experiment Name: Zm_Drought_P Parameter: Treatment Value: Drought vs. No Drought
  misc_feature: MA Experiment ID: 20000492 Result: Down-regulated in Transcription
  misc_feature: MA Experiment 20000492 PARAMETER Experiment Name: Zm_Hybrid_Seed_Dev_P Parameter: DAP Value: 12
  misc_feature: MA Experiment 20000492 PARAMETER Experiment Name: Zm_Hybrid_Seed_Dev_P Parameter: Organism Value: Zea mays
  misc_feature: MA Experiment 20000492 PARAMETER Experiment Name: Zm_Hybrid_Seed_Dev_P Parameter: Plant Line Value: 35A19
  misc_feature: MA Experiment 20000492 PARAMETER Experiment Name: Zm_Hybrid_Seed_Dev_P Parameter: Tissue Value: Fert Kernel vs. Unfert Floret
  misc_feature: MA Experiment ID: 20000535 Result: Down-regulated in Transcription
  misc_feature: MA Experiment 20000535 PARAMETER Experiment Name: Zm_Hybrid_Seed_Dev_P Parameter: DAP Value: 30 vs. 12
  misc_feature: MA Experiment 20000535 PARAMETER Experiment Name: Zm_Hybrid_Seed_Dev_P Parameter: Organism Value: Zea mays
  misc_feature: MA Experiment 20000535 PARAMETER Experiment Name: Zm_Hybrid_Seed_Dev_P Parameter: Plant Line Value: 35A19
  misc_feature: MA Experiment 20000535 PARAMETER Experiment Name: Zm_Hybrid_Seed_Dev_P Parameter: Tissue Value: Embryo vs. Unfert Floret
gagggagacgacgacgacggcgatggcctggctgcggcggacggagacgctggtgctgctgctcgtggtgcttctggcctccgcttcatcccccgcggcggctgcggcggcgggagaggaggaggaaagagtgatcaggctgaagcgctgtgatggtggttattcttataaccatactctggctcatattcttgtcgaatacgcgtctgcggtgtacacatctgacttgacatcacttttctcatggacctgtccaaggtgcaaaggccacacaaagggatttgaggtgatagagatcatagtagatgtggagaactgcttacaggcgtttgttggagttgcacctgaccctcgatccataatcattgcttttagaggcactcaacagcacagtgtctcaaattggatcgaagatcttttctggaagcagcttgatgtgacatacccaggcatgccggatgcaatggtccatcatgggttttattctgcatattataatacaactctgcgatatgagatcctgaagtctattaaatgggcaagaaaaacatatggaaatctacccataaatgttgtgggacactccatgggaggggctttagcttcgttttgtgcccttgatctatctgttaaatttggatcgcaggaggttgaactcatgacctttggacagcctcggataggcaatcctgcatttgctgtatactttggtgaacaagtcccaagaacaatccgtgtgacccatcagaatgatattgtgccgcatttaccaccgtattattattacctaggtgaatggacataccaccacttcgctagagaggtttggcttcatgagagcatagatggaaatgtagttaccagaaacgagacggtatgtgatgattctggtgaagacccgacctgtagcaggtcggtctatgggatgagcgtagcagatcatcttgagtactatgatgtcacactacatgctgattcaagaggaacctgtcaattcgtgattggtgcagccaaccaagtatacaactacgttcgtgaagttgatggatccatcatcctgtcaagatacccgcaagaaccacaagctctagaatctatgtgactttgtatgccacggaatgcacccctgtacagtatttttcattttcattttgtgtacagctcatgaaatgctgggcgctcctggagctctccagaggataaggagaggctcacctttttaaatgtgtcccctttgctcaagtgagaatcgtgcatgtaagctccataagattgtccgcacaattcaatttgtgtat

SEQ ID NO: 8283 - protein, 366 aa, Zea mays subsp. mays
  peptide (1)..(366): Ceres Seq. ID no. 12376926
  misc_feature (43)..(355): Homolog of NCBI NO: 15238889 NR Description: triacylglycerol lipase-like protein; protein id:
  misc_feature (43)..(355): Homolog of NCBI NO: 18418946 NR Description: triacylglycerol lipase-like protein; protein id: supported by cDNA: gi_16604395 [Arabidopsis thaliana] AT5g18630/T1A4_10 [Arabidopsis thaliana]
  misc_feature (56)..(363): Homolog of NCBI NO: 21425569 NR Description: triacylglycerol Lipase [Triticum aestivum]
  misc_feature (56)..(359): Homolog of NCBI NO: 21425571 NR Description: triacylglycerol lipase [Triticum aestivum]
  misc_feature (18)..(364): Homolog of NCBI NO: 34395192 NR Description: putative triacylglycerol lipase [Oryza sativa
  misc_feature (43)..(304): Homolog of NCBI NO: 30686925 NR Description: lipase (class 3) family [Arabidopsis thaliana]
  misc_feature (55)..(364): Homolog of NCBI NO: 34899296 NR Description: putative triacylglycerol lipase [Oryza sativa
  misc_feature (96)..(356): Homolog of NCBI NO: 34907212 NR Description: P0492G09.26 [Oryza sativa (japonica
  misc_feature (54)..(318): Homolog of NCBI NO: 21166167 NR Description: triacylglycerol lipase-like protein lipase [Dictyostelium discoideum] >gi|28829565|gb|AAO52083.1|
  misc_feature (81)..(320): Homolog of NCBI NO: 230348 NR Description: Triacylglycerol Acylhydrolase (E.C.3.1.1.3)
RETTTTAMAWLRRTETLVLLLVVLLASASSPAAAAAAGEEEERVIRLKRCDGGYSYNHTLAHILVEYASAVYTSDLTSLFSWTCPRCKGHTKGFEVIEIIVDVENCLQAFVGVAPDPRSIIIAFRGTQQHSVSNWIEDLFWKQLDVTYPGMPDAMVHHGFYSAYYNTTLRYEILKSIKWARKTYGNLPINVVGHSMGGALASFCALDLSVKFGSQEVELMTFGQPRIGNPAFAVYFGEQVPRTIRVTHQNDIVPHLPPYYYYLGEWTYHHFAREVWLHESIDGNVVTRNETVCDDSGEDPTCSRSVYGMSVADHLEYYDVTLHADSRGTCQFVIGAANQVYNYVREVDGSIILSRYPQEPQALESM

SEQ ID NO: 8284 - protein, 359 aa, Zea mays subsp. mays
  peptide (1)..(359): Ceres Seq. ID no. 12376927
  misc_feature (36)..(348): Homolog of NCBI NO: 15238889 NR Description: triacylglycerol lipase-like protein; protein id:
  misc_feature (36)..(348): Homolog of NCBI NO: 18418946 NR Description: triacylglycerol lipase-like protein; protein id: supported by cDNA: gi_16604395 [Arabidopsis thaliana] AT5g18630/T1A4_10 [Arabidopsis thaliana]
  misc_feature (49)..(356): Homolog of NCBI NO: 21425569 NR Description: triacylglycerol Lipase [Triticum aestivum]
  misc_feature (49)..(352): Homolog of NCBI NO: 21425571 NR Description: triacylglycerol lipase [Triticum aestivum]
  misc_feature (11)..(357): Homolog of NCBI NO: 34395192 NR Description: putative triacylglycerol lipase [Oryza sativa
  misc_feature (36)..(297): Homolog of NCBI NO: 30686925 NR Description: lipase (class 3) family [Arabidopsis thaliana]
  misc_feature (48)..(357): Homolog of NCBI NO: 34899296 NR Description: putative triacylglycerol lipase [Oryza sativa
  misc_feature (89)..(349): Homolog of NCBI NO: 34907212 NR Description: P0492G09.26 [Oryza sativa (japonica
  misc_feature (47)..(311): Homolog of NCBI NO: 21166167 NR Description: triacylglycerol lipase-like protein lipase [Dictyostelium discoideum] >gi|28829565|gb|AAO52083.1|
  misc_feature (74)..(313): Homolog of NCBI NO: 230348 NR Description: Triacylglycerol Acylhydrolase (E.C.3.1.1.3)
MAWLRRTETLVLLLVVLLASASSPAAAAAAGEEEERVIRLKRCDGGYSYNHTLAHILVEYASAVYTSDLTSLFSWTCPRCKGHTKGFEVIEIIVDVENCLQAFVGVAPDPRSIIIAFRGTQQHSVSNWIEDLFWKQLDVTYPGMPDAMVHHGFYSAYYNTTLRYEILKSIKWARKTYGNLPINVVGHSMGGALASFCALDLSVKFGSQEVELMTFGQPRIGNPAFAVYFGEQVPRTIRVTHQNDIVPHLPPYYYYLGEWTYHHFAREVWLHESIDGNVVTRNETVCDDSGEDPTCSRSVYGMSVADHLEYYDVTLHADSRGTCQFVIGAANQVYNYVREVDGSIILSRYPQEPQALESM

SEQ ID NO: 8285 - protein, 216 aa, Zea mays subsp. mays
  peptide (1)..(216): Ceres Seq. ID no. 12376928
  misc_feature (1)..(206): Homolog of NCBI NO: 34907212 NR Description: P0492G09.26 [Oryza sativa (japonica
  misc_feature (1)..(168): Homolog of NCBI NO: 21166167 NR Description: triacylglycerol lipase-like protein lipase [Dictyostelium discoideum] >gi|28829565|gb|AAO52083.1|
  misc_feature (1)..(170): Homolog of NCBI NO: 230348 NR Description: Triacylglycerol Acylhydrolase (E.C.3.1.1.3)
  misc_feature (1)..(205): Homolog of NCBI NO: 15238889 NR Description: triacylglycerol lipase-like protein; protein id:
  misc_feature (1)..(205): Homolog of NCBI NO: 18418946 NR Description: triacylglycerol lipase-like protein; protein id: supported by cDNA: gi_16604395 [Arabidopsis thaliana] AT5g18630/T1A4_10 [Arabidopsis thaliana]
  misc_feature (1)..(213): Homolog of NCBI NO: 21425569 NR Description: triacylglycerol Lipase [Triticum aestivum]
  misc_feature (1)..(209): Homolog of NCBI NO: 21425571 NR Description: triacylglycerol lipase [Triticum aestivum]
  misc_feature (1)..(214): Homolog of NCBI NO: 34395192 NR Description: putative triacylglycerol lipase [Oryza sativa
  misc_feature (1)..(154): Homolog of NCBI NO: 30686925 NR Description: lipase (class 3) family [Arabidopsis thaliana]
  misc_feature (1)..(214): Homolog of NCBI NO: 34899296 NR Description: putative triacylglycerol lipase [Oryza sativa
MPDAMVHHGFYSAYYNTTLRYEILKSIKWARKTYGNLPINVVGHSMGGALASFCALDLSVKFGSQEVELMTFGQPRIGNPAFAVYFGEQVPRTIRVTHQNDIVPHLPPYYYYLGEWTYHHFAREVWLHESIDGNVVTRNETVCDDSGEDPTCSRSVYGMSVADHLEYYDVTLHADSRGTCQFVIGAANQVYNYVREVDGSIILSRYPQEPQALESM

SEQ ID NO: 8286 - DNA, 2013 bp, Zea mays subsp. mays
  misc_feature (1)..(2013): Ceres Seq. ID no. 12594603
  misc_feature: MA Experiment ID: 108543 Result: Up-regulated in Transcription
  misc_feature: MA Experiment ID: 108544 Result: Up-regulated in Transcription
agtgtgagagctcgattcgttgccgtccacttgtctcacggcctgtcgccatctccttcctggttttttcatccgaccatccccggctcctccgcgccgtcggcgacgactccatcgagtcactcggccgcagcaaccggcgaccatgtaccgagtcgcctccgggctcggcgccctcaagaggcatggggcaaatgctcaaatgatgaatgctgcaattaggtgtgccagcacaagtgttgcacagaggtcttccggtggcttgtggacctggttgactggtgcgcgttcaaatgaaatacctcctccagatttcacacttccgggagtgactattcctcctccgctgcctgaccatgtggaggctggcaaaacaagagtcacaacacttcccaatggtgttaaaatagcctctgagacatctgcgggatcatcttgttctgttggagtttatgttgattgtggttctgtatatgaagcacctgaaacaacaggtgccagtcaactgttgaagacaatggccttcacaaccactgccaacaggagtgagttgcgggttgtgcgtgaaattgaggcaataggtggcagtgccaaagcatctgctagccgtgagatgatgagctacacttacggagccctgaagacttacatgcctgaaatggttgaggtgcttattgattgtgtacgcaaccctgcttttcttgattgggaggtaaaggaacagattttgaggctacaggcagagcttgcaaaatcatcaagttatcctgaaaattttcttttggaggctcttcattctactggctattctggtgctttagcaaacccactaattgttccagaatattcagttagcagattgaatgcagatgtcctggagcaatttataactgagaactacactgcttcccgaattgttctagctgcatcaggtgttgatcatgatgaattggtatctattgccgaaccccttctgtctgacattcccagtgtatctggaacaacaaggccaaaatcaacctacattggtggagaatacagaagaagtgcagattcatcgaacacagacgttgcattggcattcgaggtcccaagtggttggctcaaagaaaaagattgcgtcactgtatcagttcttcaggcacttctgggtggtggtggcaagttttcttggggaaggcaaggaaaggggttacattcacgtctaaaccgcctcgtaaatgaatttgatcagatcaagtcaatctctgctttcaaggatgttcacagtaatactggcatctttggaatccatacatctactgatgcatcatttgttcctaaagctattgacctagcagccagagagctcacttcccttgcaactcctggacaagttgaccaaagccaactggaccgtgctaaagcctcagctaaatctgccatactggcaaatttggaatcacaggcatcgctaacagaggacatggggcgccaagttttggcatttggtgaaaggaaacctgccgagcaccttctcaaggctgtagatggtgttactatgaaagatataacgtctgttgctgaaaagatcatttcatccccattgacaatggcatctcatggaaacgttctgaatatgcctacttatgagtcagtcagtggcaagttccgctcaaaatgaggagtacatgacccttcccttcattttatcaccttgtttgctggacaagttttaccagtcccttgtcattcacgtctaggccatggttcttggtcagtttcagaagaaataaggaacctcatgcagttttgttcgtgaaacctgtgatcacttcacaattattcccttttctcattcttttgcggaacattcgtgtggttaatgctggtgatagaccagtaacgtgcttgtaaatttaactgaaccctggcccctcattcggtaccaaggccccccagagaatgtacaaaattgtcgtaaaactcttgacaaaaatgttgtcgcacatgaataatgattctacagaactg

SEQ ID NO: 8287 - protein, 505 aa, Zea mays subsp. mays
  peptide (1)..(505): Ceres Seq. ID no. 12594604
  misc_feature (238)..(423): Pfam Name: Peptidase M16 inactive domain Pfam Description: Peptidase M16 inactive domain
  misc_feature (1)..(505): Homolog of NCBI NO: 11993905 NR Description: mitochondrial processing peptidase alpha-chain
  misc_feature (1)..(488): Homolog of NCBI NO: 34906418 NR Description: putative mitochondrial processing peptidase
  misc_feature (26)..(504): Homolog of NCBI NO: 34909352 NR Description: putative mitochondrial processing peptidase alpha
  misc_feature (1)..(505): Homolog of NCBI NO: 2117355 NR Description: mitochondrial processing peptidase (EC 3.4.24.64)
  misc_feature (1)..(505): Homolog of NCBI NO: 266567 NR Description: Mitochondrial processing peptidase alpha subunit,
  misc_feature (1)..(503): Homolog of NCBI NO: 15218090 NR Description: mitochondrial processing peptidase alpha subunit, protein id: At1g51980.1, supported by cDNA: 6390., supported by gi_17529269, supported by cDNA: gi_20258956 [Arabidopsis
  misc_feature (1)..(503): Homolog of NCBI NO: 21594004 NR Description: mitochondrial processing peptidase alpha subunit,
  misc_feature (1)..(503): Homolog of NCBI NO: 18401141 NR Description: putative mitochondrial processing peptidase alpha protein id: At3g16480.1, supported by cDNA: gi_14334533 thaliana] >gi|2062155|gb|AAB63629.1| mitochondrial processing
  misc_feature (1)..(503): Homolog of NCBI NO: 14334534 NR Description: putative mitochondrial processing peptidase alpha
  misc_feature (1)..(505): Homolog of NCBI NO: 15076515 NR Description: mitochondrial processing peptidase alpha subunit
MYRVASGLGALKRHGANAQMMNAAIRCASTSVAQRSSGGLWTWLTGARSNEIPPPDFTLPGVTIPPPLPDHVEAGKTRVTTLPNGVKIASETSAGSSCSVGVYVDCGSVYEAPETTGASQLLKTMAFTTTANRSELRVVREIEAIGGSAKASASREMMSYTYGALKTYMPEMVEVLIDCVRNPAFLDWEVKEQILRLQAELAKSSSYPENFLLEALHSTGYSGALANPLIVPEYSVSRLNADVLEQFITENYTASRIVLAASGVDHDELVSIAEPLLSDIPSVSGTTRPKSTYIGGEYRRSADSSNTDVALAFEVPSGWLKEKDCVTVSVLQALLGGGGKFSWGRQGKGLHSRLNRLVNEFDQIKSISAFKDVHSNTGIFGIHTSTDASFVPKAIDLAARELTSLATPGQVDQSQLDRAKASAKSAILANLESQASLTEDMGRQVLAFGERKPAEHLLKAVDGVTMKDITSVAEKIISSPLTMASHGNVLNMPTYESVSGKFRSK

SEQ ID NO: 8288 - protein, 486 aa, Zea mays subsp. mays
  peptide (1)..(486): Ceres Seq. ID no. 12594605
  misc_feature (219)..(404): Pfam Name: Peptidase M16 inactive domain Pfam Description: Peptidase M16 inactive domain
  misc_feature (1)..(486): Homolog of NCBI NO: 11993905 NR Description: mitochondrial processing peptidase alpha-chain
  misc_feature (1)..(469): Homolog of NCBI NO: 34906418 NR Description: putative mitochondrial processing peptidase
  misc_feature (7)..(485): Homolog of NCBI NO: 34909352 NR Description: putative mitochondrial processing peptidase alpha
  misc_feature (1)..(486): Homolog of NCBI NO: 2117355 NR Description: mitochondrial processing peptidase (EC 3.4.24.64)
  misc_feature (1)..(486): Homolog of NCBI NO: 266567 NR Description: Mitochondrial processing peptidase alpha subunit,
  misc_feature (1)..(484): Homolog of NCBI NO: 15218090 NR Description: mitochondrial processing peptidase alpha subunit, protein id: At1g51980.1, supported by cDNA: 6390., supported by gi_17529269, supported by cDNA: gi_20258956 [Arabidopsis
  misc_feature (1)..(484): Homolog of NCBI NO: 21594004 NR Description: mitochondrial processing peptidase alpha subunit,
  misc_feature (1)..(484): Homolog of NCBI NO: 18401141 NR Description: putative mitochondrial processing peptidase alpha protein id: At3g16480.1, supported by cDNA: gi_14334533 thaliana] >gi|2062155|gb|AAB63629.1| mitochondrial processing
  misc_feature (1)..(484): Homolog of NCBI NO: 14334534 NR Description: putative mitochondrial processing peptidase alpha
  misc_feature (1)..(486): Homolog of NCBI NO: 15076515 NR Description: mitochondrial processing peptidase alpha subunit
MMNAAIRCASTSVAQRSSGGLWTWLTGARSNEIPPPDFTLPGVTIPPPLPDHVEAGKTRVTTLPNGVKIASETSAGSSCSVGVYVDCGSVYEAPETTGASQLLKTMAFTTTANRSELRVVREIEAIGGSAKASASREMMSYTYGALKTYMPEMVEVLIDCVRNPAFLDWEVKEQILRLQAELAKSSSYPENFLLEALHSTGYSGALANPLIVPEYSVSRLNADVLEQFITENYTASRIVLAASGVDHDELVSIAEPLLSDIPSVSGTTRPKSTYIGGEYRRSADSSNTDVALAFEVPSGWLKEKDCVTVSVLQALLGGGGKFSWGRQGKGLHSRLNRLVNEFDQIKSISAFKDVHSNTGIFGIHTSTDASFVPKAIDLAARELTSLATPGQVDQSQLDRAKASAKSAILANLESQASLTEDMGRQVLAFGERKPAEHLLKAVDGVTMKDITSVAEKIISSPLTMASHGNVLNMPTYESVSGKFRSK

SEQ ID NO: 8289 - protein, 485 aa, Zea mays subsp. mays
  peptide (1)..(485): Ceres Seq. ID no. 12594606
  misc_feature (218)..(403): Pfam Name: Peptidase M16 inactive domain Pfam Description: Peptidase M16 inactive domain
  misc_feature (1)..(485): Homolog of NCBI NO: 11993905 NR Description: mitochondrial processing peptidase alpha-chain
  misc_feature (1)..(468): Homolog of NCBI NO: 34906418 NR Description: putative mitochondrial processing peptidase
  misc_feature (6)..(484): Homolog of NCBI NO: 34909352 NR Description: putative mitochondrial processing peptidase alpha
  misc_feature (1)..(485): Homolog of NCBI NO: 2117355 NR Description: mitochondrial processing peptidase (EC 3.4.24.64)
  misc_feature (1)..(485): Homolog of NCBI NO: 266567 NR Description: Mitochondrial processing peptidase alpha subunit,
  misc_feature (1)..(483): Homolog of NCBI NO: 15218090 NR Description: mitochondrial processing peptidase alpha subunit, protein id: At1g51980.1, supported by cDNA: 6390., supported by gi_17529269, supported by cDNA: gi_20258956 [Arabidopsis
  misc_feature (1)..(483): Homolog of NCBI NO: 21594004 NR Description: mitochondrial processing peptidase alpha subunit,
  misc_feature (1)..(483): Homolog of NCBI NO: 18401141 NR Description: putative mitochondrial processing peptidase alpha protein id: At3g16480.1, supported by cDNA: gi_14334533 thaliana] >gi|2062155|gb|AAB63629.1| mitochondrial processing
  misc_feature (1)..(483): Homolog of NCBI NO: 14334534 NR Description: putative mitochondrial processing peptidase alpha
  misc_feature (1)..(485): Homolog of NCBI NO: 15076515 NR Description: mitochondrial processing peptidase alpha subunit
MNAAIRCASTSVAQRSSGGLWTWLTGARSNEIPPPDFTLPGVTIPPPLPDHVEAGKTRVTTLPNGVKIASETSAGSSCSVGVYVDCGSVYEAPETTGASQLLKTMAFTTTANRSELRVVREIEAIGGSAKASASREMMSYTYGALKTYMPEMVEVLIDCVRNPAFLDWEVKEQILRLQAELAKSSSYPENFLLEALHSTGYSGALANPLIVPEYSVSRLNADVLEQFITENYTASRIVLAASGVDHDELVSIAEPLLSDIPSVSGTTRPKSTYIGGEYRRSADSSNTDVALAFEVPSGWLKEKDCVTVSVLQALLGGGGKFSWGRQGKGLHSRLNRLVNEFDQIKSISAFKDVHSNTGIFGIHTSTDASFVPKAIDLAARELTSLATPGQVDQSQLDRAKASAKSAILANLESQASLTEDMGRQVLAFGERKPAEHLLKAVDGVTMKDITSVAEKIISSPLTMASHGNVLNMPTYESVSGKFRSK

SEQ ID NO: 8290 - DNA, 1421 bp, Zea mays subsp. mays
  misc_feature (1)..(1421): Ceres Seq. ID no. 12352595
  misc_feature: MA Experiment ID: 108522 Result: Down-regulated in Transcription
  misc_feature: MA Experiment 108522 PARAMETER Experiment Name: Zm_42deg_Heat_P Parameter: Age (day) Value: 8
  misc_feature: MA Experiment 108522 PARAMETER Experiment Name: Zm_42deg_Heat_P Parameter: Organism Value: Zea mays
  misc_feature: MA Experiment 108522 PARAMETER Experiment Name: Zm_42deg_Heat_P Parameter: Plant Line Value: 35A19
  misc_feature: MA Experiment 108522 PARAMETER Experiment Name: Zm_42deg_Heat_P Parameter: Temperature (deg C) Value: 42 vs. 22
  misc_feature: MA Experiment 108522 PARAMETER Experiment Name: Zm_42deg_Heat_P Parameter: Timepoint (hr) Value: 1
  misc_feature: MA Experiment 108522 PARAMETER Experiment Name: Zm_42deg_Heat_P Parameter: Tissue Value: Aerial
  misc_feature: MA Experiment ID: 108529 Result: Down-regulated in Transcription
  misc_feature: MA Experiment 108529 PARAMETER Experiment Name: Zm_Imbibed_Seeds_P Parameter: Age (day) Value: 5 vs. 2
  misc_feature: MA Experiment 108529 PARAMETER Experiment Name: Zm_Imbibed_Seeds_P Parameter: Organism Value: Zea mays
  misc_feature: MA Experiment 108529 PARAMETER Experiment Name: Zm_Imbibed_Seeds_P Parameter: Plant Line Value: 35A19
  misc_feature: MA Experiment 108529 PARAMETER Experiment Name: Zm_Imbibed_Seeds_P Parameter: Tissue Value: Roots vs. Embryo
  misc_feature: MA Experiment ID: 108535 Result: Down-regulated in Transcription
  misc_feature: MA Experiment 108535 PARAMETER Experiment Name: Zm_Meristem_P Parameter: Age (day) Value: 8
  misc_feature: MA Experiment 108535 PARAMETER Experiment Name: Zm_Meristem_P Parameter: Organism Value: Zea mays
  misc_feature: MA Experiment 108535 PARAMETER Experiment Name: Zm_Meristem_P Parameter: Plant Line Value: 35A19
  misc_feature: MA Experiment 108535 PARAMETER Experiment Name: Zm_Meristem_P Parameter: Tissue Value: Root Meristem vs. Above Root Meristem
  misc_feature: MA Experiment ID: 108544 Result: Down-regulated in Transcription
  misc_feature: MA Experiment ID: 20000478 Result: Down-regulated in Transcription
  misc_feature: MA Experiment 20000478 PARAMETER Experiment Name: Zm_5mM_SA_P Parameter: Age (day) Value: 11
  misc_feature: MA Experiment 20000478 PARAMETER Experiment Name: Zm_5mM_SA_P Parameter: Organism Value: Zea mays
  misc_feature: MA Experiment 20000478 PARAMETER Experiment Name: Zm_5mM_SA_P Parameter: Plant Line Value: 35A19
  misc_feature: MA Experiment 20000478 PARAMETER Experiment Name: Zm_5mM_SA_P Parameter: Timepoint (hr) Value: 72
  misc_feature: MA Experiment 20000478 PARAMETER Experiment Name: Zm_5mM_SA_P Parameter: Tissue Value: Aerial
  misc_feature: MA Experiment 20000478 PARAMETER Experiment Name: Zm_5mM_SA_P Parameter: Treatment Value: 5mM SA vs. No Treatment
  misc_feature: MA Experiment ID: 20000480 Result: Down-regulated in Transcription
  misc_feature: MA Experiment 20000480 PARAMETER Experiment Name: Zm_Drought_P Parameter: Age (day) Value: 11
  misc_feature: MA Experiment 20000480 PARAMETER Experiment Name: Zm_Drought_P Parameter: Organism Value: Zea mays
  misc_feature: MA Experiment 20000480 PARAMETER Experiment Name: Zm_Drought_P Parameter: Plant Line Value: 35A19
  misc_feature: MA Experiment 20000480 PARAMETER Experiment Name: Zm_Drought_P Parameter: Timepoint (hr) Value: 72
  misc_feature: MA Experiment 20000480 PARAMETER Experiment Name: Zm_Drought_P Parameter: Tissue Value: Aerial
  misc_feature: MA Experiment 20000480 PARAMETER Experiment Name: Zm_Drought_P Parameter: Treatment Value: Drought vs. No Drought
  misc_feature: MA Experiment ID: 20000488 Result: Down-regulated in Transcription
  misc_feature: MA Experiment 20000488 PARAMETER Experiment Name: Zm_50mM_NH4NO3_L_to_H_P Parameter: Organism Value: Zea mays
  misc_feature: MA Experiment 20000488 PARAMETER Experiment Name: Zm_50mM_NH4NO3_L_to_H_P Parameter: Timepoint (hr) Value: 8
  misc_feature: MA Experiment 20000488 PARAMETER Experiment Name: Zm_50mM_NH4NO3_L_to_H_P Parameter: Tissue Value: Leaves
  misc_feature: MA Experiment 20000488 PARAMETER Experiment Name: Zm_50mM_NH4NO3_L_to_H_P Parameter: Treatment Value: 50mM NH4NO3 vs. 100mM Mannitol
  misc_feature: MA Experiment ID: 20000492 Result: Down-regulated in Transcription
  misc_feature: MA Experiment 20000492 PARAMETER Experiment Name: Zm_Hybrid_Seed_Dev_P Parameter: DAP Value: 12
  misc_feature: MA Experiment 20000492 PARAMETER Experiment Name: Zm_Hybrid_Seed_Dev_P Parameter: Organism Value: Zea mays
  misc_feature: MA Experiment 20000492 PARAMETER Experiment Name: Zm_Hybrid_Seed_Dev_P Parameter: Plant Line Value: 35A19
  misc_feature: MA Experiment 20000492 PARAMETER Experiment Name: Zm_Hybrid_Seed_Dev_P Parameter: Tissue Value: Fert Kernel vs. Unfert Floret
ctcacatgcatatgcatgcattagcttttccccaccagcatgcactagctgactagcatctgtgtaatcggtgaccgctcttgacttgttggctcctcgctcccacggtagctaaagctagctaggtgggtggtagcaccaccatggcctcgcccaagcattctcatcgccatcatcgtgcggcggcgacgaagcatcgtcggccgctggcgctgcggcgtgcgatgctgcattcgtgcgtgtgcttcctggtgggtctcgtgaccggcctggccccttccgactggacggacgccgcctcgcgcgcggccgtgcacgcgaacggcgcggccacggcgcaggtgttccgcgcgctgcacgccatgaaccagacggcggcggcgggggcactgggccagctgctggcgctgcagcactaccagcagcagccagtggtggagaaggagaaggagaaggagaagcctctggatctggtggtggtggtgacgactacgacaacgtcgacggggctgtcggagcgcgagcggcggtcggcgggtctgacgcgcacggcgcacgcgctgcgtctggtgtcccctcccctggtgtggctggtggtggaggcggcccgggaggctggtcccacggcacggctgctgcggcgcacgggggtggtgtaccggcacctgacctacgcggagaacttcacatcggaggcctgggaggaggagcggcaccaccagaggaaccaggcgctagcgcacattgagcggcaccgcctgcgcggcgtcgtcctcttcgcggggctcgccgacgtgtacgacggccgcctcctggagcagctcaggcggcacatcaggacaaggagtgtgggcgcgtgggcagtggcgacagtatgggagcaggagaagagggtggccgtggaagggcccgtcgtcgtctgcaacaccaccaccagcaccagcgcagcatccacagcatgtgcatggttctccgcctccgactccacattattggcggcagcggcagcggcagcgcccccagtgacggtcgacgactccgtccacggctttgccttcgccagtgacctcctctgggacccttccaggtgggaccgcttccccacatccgagcccgaccagtcgcaggattcgatcaagttcgtgcaaaggttggtgatggcggagtacaacaaaacgagggccatcatccctgcagacgacgattactcctccaaccgttctcaaatcatggtgtggcgtgtcgacacaacgctgctctagctagccctcttgccacgctaagagcgatagataaagatgcatgcatgcttaaaataaacattccatgacttattacatagtaatgccatacacgtacgtatgtatatgtataaagggaaaagaatggcaagcagcagtctgcatcagtcgttgtcgtcg

SEQ ID NO: 8291 - protein, 372 aa, Zea mays subsp. mays
  peptide (1)..(372): Ceres Seq. ID no. 12352596
  misc_feature (137)..(257): Pfam Name: Glycosyltransferase family 43 Pfam Description: Glycosyltransferase family 43
  misc_feature (54)..(371): Homolog of NCBI NO: 34394028 NR Description: putative glycosyltransferase family [Oryza sativa
  misc_feature (19)..(57): Homolog of NCBI NO: 34394028 NR Description: putative glycosyltransferase family [Oryza sativa
  misc_feature (1)..(366): Homolog of NCBI NO: 32879543 NR Description: beta3-glucuronyltransferase [Zea mays]
  misc_feature (110)..(368): Homolog of NCBI NO: 32968187 NR Description: beta3-glucuronyltransferase [Triticum aestivum]
  misc_feature (97)..(368): Homolog of NCBI NO: 32968174 NR Description: beta3-glucuronyltransferase [Hordeum vulgare]
  misc_feature (14)..(318): Homolog of NCBI NO: 33771692 NR Description: glycuronosyltransferase-like protein [Gossypium
  misc_feature (110)..(318): Homolog of NCBI NO: 16973326 NR Description: hypothetical protein [Gossypium hirsutum]
  misc_feature (25)..(257): Homolog of NCBI NO: 15228084 NR Description: unknown protein; protein id: At2g37090.1
  misc_feature (103)..(264): Homolog of NCBI NO: 32968189 NR Description: beta3-glucuronyltransferase [Triticum aestivum]
  misc_feature (302)..(365): Homolog of NCBI NO: 32968189 NR Description: beta3-glucuronyltransferase [Triticum aestivum]
MASPKHSHRHHRAAATKHRRPLALRRAMLHSCVCFLVGLVTGLAPSDWTDAASRAAVHANGAATAQVFRALHAMNQTAAAGALGQLLALQHYQQQPVVEKEKEKEKPLDLVVVVTTTTTSTGLSERERRSAGLTRTAHALRLVSPPLVWLVVEAAREAGPTARLLRRTGVVYRHLTYAENFTSEAWEEERHHQRNQALAHIERHRLRGVVLFAGLADVYDGRLLEQLRRHIRTRSVGAWAVATVWEQEKRVAVEGPVVVCNTTTSTSAASTACAWFSASDSTLLAAAAAAAPPVTVDDSVHGFAFASDLLWDPSRWDRFPTSEPDQSQDSIKFVQRLVMAEYNKTRAIIPADDDYSSNRSQIMVWRVDTTLL

SEQ ID NO: 8292 - protein, 345 aa, Zea mays subsp. mays
  peptide (1)..(345): Ceres Seq. ID no. 12352597
  misc_feature (110)..(230): Pfam Name: Glycosyltransferase family 43 Pfam Description: Glycosyltransferase family 43
  misc_feature (27)..(344): Homolog of NCBI NO: 34394028 NR Description: putative glycosyltransferase family [Oryza sativa
  misc_feature (1)..(30): Homolog of NCBI NO: 34394028 NR Description: putative glycosyltransferase family [Oryza sativa
  misc_feature (1)..(339): Homolog of NCBI NO: 32879543 NR Description: beta3-glucuronyltransferase [Zea mays]
  misc_feature (83)..(341): Homolog of NCBI NO: 32968187 NR Description: beta3-glucuronyltransferase [Triticum aestivum]
  misc_feature (70)..(341): Homolog of NCBI NO: 32968174 NR Description: beta3-glucuronyltransferase [Hordeum vulgare]
  misc_feature (1)..(291): Homolog of NCBI NO: 33771692 NR Description: glycuronosyltransferase-like protein [Gossypium
  misc_feature (83)..(291): Homolog of NCBI NO: 16973326 NR Description: hypothetical protein [Gossypium hirsutum]
  misc_feature (1)..(230): Homolog of NCBI NO: 15228084 NR Description: unknown protein; protein id: At2g37090.1
  misc_feature (76)..(237): Homolog of NCBI NO: 32968189 NR Description: beta3-glucuronyltransferase [Triticum aestivum]
  misc_feature (275)..(338): Homolog of NCBI NO: 32968189 NR Description: beta3-glucuronyltransferase [Triticum aestivum]
MLHSCVCFLVGLVTGLAPSDWTDAASRAAVHANGAATAQVFRALHAMNQTAAAGALGQLLALQHYQQQPVVEKEKEKEKPLDLVVVVTTTTTSTGLSERERRSAGLTRTAHALRLVSPPLVWLVVEAAREAGPTARLLRRTGVVYRHLTYAENFTSEAWEEERHHQRNQALAHIERHRLRGVVLFAGLADVYDGRLLEQLRRHIRTRSVGAWAVATVWEQEKRVAVEGPVVVCNTTTSTSAASTACAWFSASDSTLLAAAAAAAPPVTVDDSVHGFAFASDLLWDPSRWDRFPTSEPDQSQDSIKFVQRLVMAEYNKTRAIIPADDDYSSNRSQIMVWRVDTTLL

SEQ ID NO: 8293 - protein, 299 aa, Zea mays subsp. mays
  peptide (1)..(299): Ceres Seq. ID no. 12352598
  misc_feature (64)..(184): Pfam Name: Glycosyltransferase family 43 Pfam Description: Glycosyltransferase family 43
  misc_feature (1)..(298): Homolog of NCBI NO: 34394028 NR Description: putative glycosyltransferase family [Oryza sativa
  misc_feature (1)..(293): Homolog of NCBI NO: 32879543 NR Description: beta3-glucuronyltransferase [Zea mays]
  misc_feature (37)..(295): Homolog of NCBI NO: 32968187 NR Description: beta3-glucuronyltransferase [Triticum aestivum]
  misc_feature (24)..(295): Homolog of NCBI NO: 32968174 NR Description: beta3-glucuronyltransferase [Hordeum vulgare]
  misc_feature (1)..(245): Homolog of NCBI NO: 33771692 NR Description: glycuronosyltransferase-like protein [Gossypium
  misc_feature (37)..(245): Homolog of NCBI NO: 16973326 NR Description: hypothetical protein [Gossypium hirsutum]
  misc_feature (1)..(184): Homolog of NCBI NO: 15228084 NR Description: unknown protein; protein id: At2g37090.1
  misc_feature (30)..(191): Homolog of NCBI NO: 32968189 NR Description: beta3-glucuronyltransferase [Triticum aestivum]
  misc_feature (229)..(292): Homolog of NCBI NO: 32968189 NR Description: beta3-glucuronyltransferase [Triticum aestivum]
  misc_feature (1)..(156): Homolog of NCBI NO: 34895984 NR Description: P0011G08.34 [Oryza sativa (japonica >gi|9757665|dbj|BAB08184.1| Similar to Arabidopsis thaliana II section 202 of 255 of the complete sequence; unknown protein
MNQTAAAGALGQLLALQHYQQQPVVEKEKEKEKPLDLVVVVTTTTTSTGLSERERRSAGLTRTAHALRLVSPPLVWLVVEAAREAGPTARLLRRTGVVYRHLTYAENFTSEAWEEERHHQRNQALAHIERHRLRGVVLFAGLADVYDGRLLEQLRRHIRTRSVGAWAVATVWEQEKRVAVEGPVVVCNTTTSTSAASTACAWFSASDSTLLAAAAAAAPPVTVDDSVHGFAFASDLLWDPSRWDRFPTSEPDQSQDSIKFVQRLVMAEYNKTRAIIPADDDYSSNRSQIMVWRVDTTLL

SEQ ID NO: 8294 - DNA, 1658 bp, Zea mays subsp. mays
  misc_feature (1)..(1658): Ceres Seq. ID no. 12362642
  misc_feature: MA Experiment ID: 108527 Result: Up-regulated in Transcription
  misc_feature: MA Experiment 108527 PARAMETER Experiment Name: Zm_5mM_NO_P Parameter: Age (day) Value: 8
  misc_feature: MA Experiment 108527 PARAMETER Experiment Name: Zm_5mM_NO_P Parameter: Organism Value: Zea mays
  misc_feature: MA Experiment 108527 PARAMETER Experiment Name: Zm_5mM_NO_P Parameter: Plant Line Value: 35A19
  misc_feature: MA Experiment 108527 PARAMETER Experiment Name: Zm_5mM_NO_P Parameter: Timepoint (hr) Value: 6
  misc_feature: MA Experiment 108527 PARAMETER Experiment Name: Zm_5mM_NO_P Parameter: Tissue Value: Aerial
  misc_feature: MA Experiment 108527 PARAMETER Experiment Name: Zm_5mM_NO_P Parameter: Treatment Value: 5mM NO vs. No Treatment
  misc_feature: MA Experiment ID: 108535 Result: Down-regulated in Transcription
  misc_feature: MA Experiment 108535 PARAMETER Experiment Name: Zm_Meristem_P Parameter: Age (day) Value: 8
  misc_feature: MA Experiment 108535 PARAMETER Experiment Name: Zm_Meristem_P Parameter: Organism Value: Zea mays
  misc_feature: MA Experiment 108535 PARAMETER Experiment Name: Zm_Meristem_P Parameter: Plant Line Value: 35A19
  misc_feature: MA Experiment 108535 PARAMETER Experiment Name: Zm_Meristem_P Parameter: Tissue Value: Root Meristem vs. Above Root Meristem
  misc_feature: MA Experiment ID: 108543 Result: Down-regulated in Transcription
  misc_feature: MA Experiment ID: 108556 Result: Up-regulated in Transcription
  misc_feature: MA Experiment 108556 PARAMETER Experiment Name: Zm_Drought_P Parameter: Age (day) Value: 9
  misc_feature: MA Experiment 108556 PARAMETER Experiment Name: Zm_Drought_P Parameter: Organism Value: Zea mays
  misc_feature: MA Experiment 108556 PARAMETER Experiment Name: Zm_Drought_P Parameter: Plant Line Value: 35A19
  misc_feature: MA Experiment 108556 PARAMETER Experiment Name: Zm_Drought_P Parameter: Timepoint (hr) Value: 24
  misc_feature: MA Experiment 108556 PARAMETER Experiment Name: Zm_Drought_P Parameter: Tissue Value: Aerial
  misc_feature: MA Experiment 108556 PARAMETER Experiment Name: Zm_Drought_P Parameter: Treatment Value: Drought vs. No Drought
  misc_feature: MA Experiment ID: 108689 Result: Up-regulated in Transcription
  misc_feature: MA Experiment 108689 PARAMETER Experiment Name: Zm_Drought_Roots_P Parameter: Age (day) Value: 9
  misc_feature: MA Experiment 108689 PARAMETER Experiment Name: Zm_Drought_Roots_P Parameter: Organism Value: Zea mays
  misc_feature: MA Experiment 108689 PARAMETER Experiment Name: Zm_Drought_Roots_P Parameter: Plant Line Value: 35A19
  misc_feature: MA Experiment 108689 PARAMETER Experiment Name: Zm_Drought_Roots_P Parameter: Timepoint (hr) Value: 24
  misc_feature: MA Experiment 108689 PARAMETER Experiment Name: Zm_Drought_Roots_P Parameter: Tissue Value: Roots
  misc_feature: MA Experiment 108689 PARAMETER Experiment Name: Zm_Drought_Roots_P Parameter: Treatment Value: Drought vs. No Drought
  misc_feature: MA Experiment ID: 20000477 Result: Up-regulated in Transcription
  misc_feature: MA Experiment 20000477 PARAMETER Experiment Name: Zm_5mM_SA_P Parameter: Age (day) Value: 10
  misc_feature: MA Experiment 20000477 PARAMETER Experiment Name: Zm_5mM_SA_P Parameter: Organism Value: Zea mays
  misc_feature: MA Experiment 20000477 PARAMETER Experiment Name: Zm_5mM_SA_P Parameter: Plant Line Value: 35A19
  misc_feature: MA Experiment 20000477 PARAMETER Experiment Name: Zm_5mM_SA_P Parameter: Timepoint (hr) Value: 48
  misc_feature: MA Experiment 20000477 PARAMETER Experiment Name: Zm_5mM_SA_P Parameter: Tissue Value: Aerial
  misc_feature: MA Experiment 20000477 PARAMETER Experiment Name: Zm_5mM_SA_P Parameter: Treatment Value: 5mM SA vs. No Treatment
  misc_feature: MA Experiment ID: 20000478 Result: Up-regulated in Transcription
  misc_feature: MA Experiment 20000478 PARAMETER Experiment Name: Zm_5mM_SA_P Parameter: Age (day) Value: 11
  misc_feature: MA Experiment 20000478 PARAMETER Experiment Name: Zm_5mM_SA_P Parameter: Organism Value: Zea mays
  misc_feature: MA Experiment 20000478 PARAMETER Experiment Name: Zm_5mM_SA_P Parameter: Plant Line Value: 35A19
  misc_feature: MA Experiment 20000478 PARAMETER Experiment Name: Zm_5mM_SA_P Parameter: Timepoint (hr) Value: 72
  misc_feature: MA Experiment 20000478 PARAMETER Experiment Name: Zm_5mM_SA_P Parameter: Tissue Value: Aerial
  misc_feature: MA Experiment 20000478 PARAMETER Experiment Name: Zm_5mM_SA_P Parameter: Treatment Value: 5mM SA vs. No Treatment
  misc_feature: MA Experiment ID: 20000479 Result: Up-regulated in Transcription
  misc_feature: MA Experiment 20000479 PARAMETER Experiment Name: Zm_Drought_P Parameter: Age (day) Value: 10
  misc_feature: MA Experiment 20000479 PARAMETER Experiment Name: Zm_Drought_P Parameter: Organism Value: Zea mays
  misc_feature: MA Experiment 20000479 PARAMETER Experiment Name: Zm_Drought_P Parameter: Plant Line Value: 35A19
  misc_feature: MA Experiment 20000479 PARAMETER Experiment Name: Zm_Drought_P Parameter: Timepoint (hr) Value: 48
  misc_feature: MA Experiment 20000479 PARAMETER Experiment Name: Zm_Drought_P Parameter: Tissue Value: Aerial
  misc_feature: MA Experiment 20000479 PARAMETER Experiment Name: Zm_Drought_P Parameter: Treatment Value: Drought vs. No Drought
  misc_feature: MA Experiment ID: 20000480 Result: Up-regulated in Transcription
  misc_feature: MA Experiment 20000480 PARAMETER Experiment Name: Zm_Drought_P Parameter: Age (day) Value: 11
  misc_feature: MA Experiment 20000480 PARAMETER Experiment Name: Zm_Drought_P Parameter: Organism Value: Zea mays
  misc_feature: MA Experiment 20000480 PARAMETER Experiment Name: Zm_Drought_P Parameter: Plant Line Value: 35A19
  misc_feature: MA Experiment 20000480 PARAMETER Experiment Name: Zm_Drought_P Parameter: Timepoint (hr) Value: 72
  misc_feature: MA Experiment 20000480 PARAMETER Experiment Name: Zm_Drought_P Parameter: Tissue Value: Aerial
  misc_feature: MA Experiment 20000480 PARAMETER Experiment Name: Zm_Drought_P Parameter: Treatment Value: Drought vs. No Drought
  misc_feature: MA Experiment ID: 20000630 Result: Up-regulated in Transcription
  misc_feature: MA Experiment 20000630 PARAMETER Experiment Name: Zm_Herbicide-Treatments_P Parameter: Timepoint (hr) Value: 4
  misc_feature: MA Experiment 20000630 PARAMETER Experiment Name: Zm_Herbicide-Treatments_P Parameter: Tissue Value: Aerial
  misc_feature: MA Experiment 20000630 PARAMETER Experiment Name: Zm_Herbicide-Treatments_P Parameter: Treatment Value: Roundup vs. No Treatment
ccctttccctttctggccgcattccctcgtcctccggcagccgtcgccagcttccgatggtccggaaggagacggccatgaggctgcccccgcagcaccagggcctggaggtcaagatccccagcttcttccgctgccccatctcgctggacgtcatgcgctcgcccgttagcctctgcaccggcgtcacctacgaccgcgcctccatccagcagtggctcgactccggcaacaccacgtgcccggccaccatgctcccgctcccctccaccgacctcgtccccaacctcactctccgcagcctcatcgcccactgggccgcctccgccgcctcctgttcccccaccgccgccggcggcgccggagtcgccgactcctcttcggcacgtacttcttctcccgcgagcctcgtccgccaggtggcttcgtccggcgtggacccctcgccggccctccgcgagctggcagcctatctctccgacgacgacgtcgacgacttcgaaaagaacgcgcttgtgggcgccggccgcgccgccgagaccgtcgcgtcagttcttcggagaagagccgaggaaaccggcgtcgaaggcgtggaggcggccacgagagtgctagccttgatcttggcctcggacggcatcgacgactcgaacaagaagcgggtggccactggcctcgccgcggacgcggcggcctcgaccgcgtcgctggcgcgcgtgatgcgcggcgggagcgacctggaggcgaggatcgacgcggccaagctggcggagctgttgctcgccaatgcggccggcgaggcgaaggcggcggcgaccaaatcgtccgagttgctggccgagctggtacgcctcgtgggcaccgtcgacgagacgggcgccctggacaggaacgccgtggacgccggcctctcctgcctggccgccatctgcgggtcgtgccgtgccgcgcgtggcgagatggtgcgccttggcgcggtcccggccgctgtgcgcgctctgcgcgcctcgacggagtccggcgcgtccgcgaaggcgctccgggtcctcgagtccgccgtgggctgcgccgagggccgtgccgcgctgtgcgccaacgcggaggacgccatccctgcggtggtgggcaagatgatgaaggctgggcgcgacggcgcggaggccgccgtggccgtgctctgggcggtctgccaccggtaccaggaccgccgggcggcggacgcggctgcggcggccgagggcgggctgacgaggctgctcctcctgatgcagagcgggtgctcgccggcggcgagacagatggcgctggagctgctgaagatatacagggtgaacgccaagagctgtctcgccggctacgactccaagaccacccacatcatgccgttctgaggaaccgaagcggacgagagtggtttgccgcgatcctgggtggctgttttgacatgatgaaatggattcaattcagtgaatcaattaaatcgcatggaacaggggaatgtgttcttgttcctgtgatgtttattgatttccactcccccctcctcttttctttggatgtaagtcggtagagaaacaaacaagaattagttcacgaggtgagatgaagaataatctgtacagacatgatcagaacaggcatagtggacaatttaaccg

SEQ ID NO: 8295 - protein, 462 aa, Zea mays subsp. mays
  peptide (1)..(462): Ceres Seq. ID no. 12362643
  misc_feature (39)..(108): Pfam Name: U-box domain Pfam Description: U-box domain
  misc_feature (5)..(462): Homolog of NCBI NO: 38605834 NR Description: OSJNBb0108J11.6 [Oryza sativa (japonica
  misc_feature (37)..(462): Homolog of NCBI NO: 15237755 NR Description: putative protein; protein id: At5g64660.1 thaliana] >gi|10178069|dbj|BAB11433.1|
  misc_feature (197)..(462): Homolog of NCBI NO: 15242515 NR Description: putative protein; protein id: At5g09800.1
  misc_feature (39)..(108): Homolog of NCBI NO: 15242515 NR Description: putative protein; protein id: At5g09800.1
  misc_feature (177)..(462): Homolog of NCBI NO: 13539578 NR Description: photoperiod responsive protein [Solanum tuberosum
  misc_feature (40)..(441): Homolog of NCBI NO: 38346713 NR Description: OSJNBa0086O06.11 [Oryza sativa (japonica
  misc_feature (35)..(440): Homolog of NCBI NO: 37530696 NR Description: hypothetical protein [Oryza sativa (japonica group)] >gi|22711531|gb|AAN04506.1| Hypothetical protein [Oryza
  misc_feature (31)..(268): Homolog of NCBI NO: 13539578 NR Description: photoperiod responsive protein [Solanum tuberosum
  misc_feature (225)..(447): Homolog of NCBI NO: 20330772 NR Description: Unknown protein [Oryza sativa (japonica
  misc_feature (34)..(105): Homolog of NCBI NO: 20330772 NR Description: Unknown protein [Oryza sativa (japonica
LSLSGRIPSSSGSRRQLPMVRKETAMRLPPQHQGLEVKIPSFFRCPISLDVMRSPVSLCTGVTYDRASIQQWLDSGNTTCPATMLPLPSTDLVPNLTLRSLIAHWAASAASCSPTAAGGAGVADSSSARTSSPASLVRQVASSGVDPSPALRELAAYLSDDDVDDFEKNALVGAGRAAETVASVLRRRAEETGVEGVEAATRVLALILASDGIDDSNKKRVATGLAADAAASTASLARVMRGGSDLEARIDAAKLAELLLANAAGEAKAAATKSSELLAELVRLVGTVDETGALDRNAVDAGLSCLAAICGSCRAARGEMVRLGAVPAAVRALRASTESGASAKALRVLESAVGCAEGRAALCANAEDAIPAVVGKMMKAGRDGAEAAVAVLWAVCHRYQDRRAADAAAAAEGGLTRLLLLMQSGCSPAARQMALELLKIYRVNAKSCLAGYDSKTTHIMPF

SEQ ID NO: 8296 - protein, 444 aa, Zea mays subsp. mays
  peptide (1)..(444): Ceres Seq. ID no. 12362644
  misc_feature (21)..(90): Pfam Name: U-box domain Pfam Description: U-box domain
  misc_feature (1)..(444): Homolog of NCBI NO: 38605834 NR Description: OSJNBb0108J11.6 [Oryza sativa (japonica
  misc_feature (19)..(444): Homolog of NCBI NO: 15237755 NR Description: putative protein; protein id: At5g64660.1 thaliana] >gi|10178069|dbj|BAB11433.1|
  misc_feature (179)..(444): Homolog of NCBI NO: 15242515 NR Description: putative protein; protein id: At5g09800.1
  misc_feature (21)..(90): Homolog of NCBI NO: 15242515 NR Description: putative protein; protein id: At5g09800.1
  misc_feature (159)..(444): Homolog of NCBI NO: 13539578 NR Description: photoperiod responsive protein [Solanum tuberosum
  misc_feature (22)..(423): Homolog of NCBI NO: 38346713 NR Description: OSJNBa0086O06.11 [Oryza sativa (japonica
  misc_feature (17)..(422): Homolog of NCBI NO: 37530696 NR Description: hypothetical protein [Oryza sativa (japonica group)] >gi|22711531|gb|AAN04506.1| Hypothetical protein [Oryza
  misc_feature (13)..(250): Homolog of NCBI NO: 13539578 NR Description: photoperiod responsive protein [Solanum tuberosum
  misc_feature (207)..(429): Homolog of NCBI NO: 20330772 NR Description: Unknown protein [Oryza sativa (japonica
  misc_feature (16)..(87): Homolog of NCBI NO: 20330772 NR Description: Unknown protein [Oryza sativa (japonica
MVRKETAMRLPPQHQGLEVKIPSFFRCPISLDVMRSPVSLCTGVTYDRASIQQWLDSGNTTCPATMLPLPSTDLVPNLTLRSLIAHWAASAASCSPTAAGGAGVADSSSARTSSPASLVRQVASSGVDPSPALRELAAYLSDDDVDDFEKNALVGAGRAAETVASVLRRRAEETGVEGVEAATRVLALILASDGIDDSNKKRVATGLAADAAASTASLARVMRGGSDLEARIDAAKLAELLLANAAGEAKAAATKSSELLAELVRLVGTVDETGALDRNAVDAGLSCLAAICGSCRAARGEMVRLGAVPAAVRALRASTESGASAKALRVLESAVGCAEGRAALCANAEDAIPAVVGKMMKAGRDGAEAAVAVLWAVCHRYQDRRAADAAAAAEGGLTRLLLLMQSGCSPAARQMALELLKIYRVNAKSCLAGYDSKTTHIMPF

SEQ ID NO: 8297 - protein, 437 aa, Zea mays subsp. mays
  peptide (1)..(437): Ceres Seq. ID no. 12362645
  misc_feature (14)..(83): Pfam Name: U-box domain Pfam Description: U-box domain
  misc_feature (1)..(437): Homolog of NCBI NO: 38605834 NR Description: OSJNBb0108J11.6 [Oryza sativa (japonica
  misc_feature (12)..(437): Homolog of NCBI NO: 15237755 NR Description: putative protein; protein id: At5g64660.1 thaliana] >gi|10178069|dbj|BAB11433.1|
  misc_feature (172)..(437): Homolog of NCBI NO: 15242515 NR Description: putative protein; protein id: At5g09800.1
  misc_feature (14)..(83): Homolog of NCBI NO: 15242515 NR Description: putative protein; protein id: At5g09800.1
  misc_feature (152)..(437): Homolog of NCBI NO: 13539578 NR Description: photoperiod responsive protein [Solanum tuberosum
  misc_feature (15)..(416): Homolog of NCBI NO: 38346713 NR Description: OSJNBa0086O06.11 [Oryza sativa (japonica
  misc_feature (10)..(415): Homolog of NCBI NO: 37530696 NR Description: hypothetical protein [Oryza sativa (japonica group)] >gi|22711531|gb|AAN04506.1| Hypothetical protein [Oryza
  misc_feature (6)..(243): Homolog of NCBI NO: 13539578 NR Description: photoperiod responsive protein [Solanum tuberosum
  misc_feature (200)..(422): Homolog of NCBI NO: 20330772 NR Description: Unknown protein [Oryza sativa (japonica
  misc_feature (9)..(80): Homolog of NCBI NO: 20330772 NR Description: Unknown protein [Oryza sativa (japonica
MRLPPQHQGLEVKIPSFFRCPISLDVMRSPVSLCTGVTYDRASIQQWLDSGNTTCPATMLPLPSTDLVPNLTLRSLIAHWAASAASCSPTAAGGAGVADSSSARTSSPASLVRQVASSGVDPSPALRELAAYLSDDDVDDFEKNALVGAGRAAETVASVLRRRAEETGVEGVEAATRVLALILASDGIDDSNKKRVATGLAADAAASTASLARVMRGGSDLEARIDAAKLAELLLANAAGEAKAAATKSSELLAELVRLVGTVDETGALDRNAVDAGLSCLAAICGSCRAARGEMVRLGAVPAAVRALRASTESGASAKALRVLESAVGCAEGRAALCANAEDAIPAVVGKMMKAGRDGAEAAVAVLWAVCHRYQDRRAADAAAAAEGGLTRLLLLMQSGCSPAARQMALELLKIYRVNAKSCLAGYDSKTTHIMPF

SEQ ID NO: 8298 - DNA, 1440 bp, Zea mays subsp. mays
  misc_feature (1)..(1440): Ceres Seq. ID no. 12408549
  misc_feature: MA Experiment ID: 108504 Result: Up-regulated in Transcription
  misc_feature: MA Experiment 108504 PARAMETER Experiment Name: Zm_Drought_P Parameter: Age (day) Value: 8
  misc_feature: MA Experiment 108504 PARAMETER Experiment Name: Zm_Drought_P Parameter: Organism Value: Zea mays
  misc_feature: MA Experiment 108504 PARAMETER Experiment Name: Zm_Drought_P Parameter: Plant Line Value: 35A19
  misc_feature: MA Experiment 108504 PARAMETER Experiment Name: Zm_Drought_P Parameter: Timepoint (hr) Value: 12
  misc_feature: MA Experiment 108504 PARAMETER Experiment Name: Zm_Drought_P Parameter: Tissue Value: Aerial
  misc_feature: MA Experiment 108504 PARAMETER Experiment Name: Zm_Drought_P Parameter: Treatment Value: Drought vs. No Drought
  misc_feature: MA Experiment ID: 108515 Result: Up-regulated in Transcription
  misc_feature: MA Experiment 108515 PARAMETER Experiment Name: Zm_2mM_SA_P Parameter: Age (day) Value: 8
  misc_feature: MA Experiment 108515 PARAMETER Experiment Name: Zm_2mM_SA_P Parameter: Organism Value: Zea mays
  misc_feature: MA Experiment 108515 PARAMETER Experiment Name: Zm_2mM_SA_P Parameter: Plant Line Value: 35A19
  misc_feature: MA Experiment 108515 PARAMETER Experiment Name: Zm_2mM_SA_P Parameter: Timepoint (hr) Value: 12
  misc_feature: MA Experiment 108515 PARAMETER Experiment Name: Zm_2mM_SA_P Parameter: Tissue Value: Aerial
  misc_feature: MA Experiment 108515 PARAMETER Experiment Name: Zm_2mM_SA_P Parameter: Treatment Value: 2mM SA vs. No Treatment
  misc_feature: MA Experiment ID: 108522 Result: Up-regulated in Transcription
  misc_feature: MA Experiment 108522 PARAMETER Experiment Name: Zm_42deg_Heat_P Parameter: Age (day) Value: 8
  misc_feature: MA Experiment 108522 PARAMETER Experiment Name: Zm_42deg_Heat_P Parameter: Organism Value: Zea mays
  misc_feature: MA Experiment 108522 PARAMETER Experiment Name: Zm_42deg_Heat_P Parameter: Plant Line Value: 35A19
  misc_feature: MA Experiment 108522 PARAMETER Experiment Name: Zm_42deg_Heat_P Parameter: Temperature (deg C) Value: 42 vs. 22
  misc_feature: MA Experiment 108522 PARAMETER Experiment Name: Zm_42deg_Heat_P Parameter: Timepoint (hr) Value: 1
  misc_feature: MA Experiment 108522 PARAMETER Experiment Name: Zm_42deg_Heat_P Parameter: Tissue Value: Aerial
  misc_feature: MA Experiment ID: 108523 Result: Up-regulated in Transcription
  misc_feature: MA Experiment 108523 PARAMETER Experiment Name: Zm_42deg_Heat_P Parameter: Age (day) Value: 8
  misc_feature: MA Experiment 108523 PARAMETER Experiment Name: Zm_42deg_Heat_P Parameter: Organism Value: Zea mays
  misc_feature: MA Experiment 108523 PARAMETER Experiment Name: Zm_42deg_Heat_P Parameter: Plant Line Value: 35A19
  misc_feature: MA Experiment 108523 PARAMETER Experiment Name: Zm_42deg_Heat_P Parameter: Temperature (deg C) Value: 42 vs. 22
  misc_feature: MA Experiment 108523 PARAMETER Experiment Name: Zm_42deg_Heat_P Parameter: Timepoint (hr) Value: 6
  misc_feature: MA Experiment 108523 PARAMETER Experiment Name: Zm_42deg_Heat_P Parameter: Tissue Value: Aerial
  misc_feature: MA Experiment ID: 108527 Result: Up-regulated in Transcription
  misc_feature: MA Experiment 108527 PARAMETER Experiment Name: Zm_5mM_NO_P Parameter: Age (day) Value: 8
  misc_feature: MA Experiment 108527 PARAMETER Experiment Name: Zm_5mM_NO_P Parameter: Organism Value: Zea mays
  misc_feature: MA Experiment 108527 PARAMETER Experiment Name: Zm_5mM_NO_P Parameter: Plant Line Value: 35A19
  misc_feature: MA Experiment 108527 PARAMETER Experiment Name: Zm_5mM_NO_P Parameter: Timepoint (hr) Value: 6
  misc_feature: MA Experiment 108527 PARAMETER Experiment Name: Zm_5mM_NO_P Parameter: Tissue Value: Aerial
  misc_feature: MA Experiment 108527 PARAMETER Experiment Name: Zm_5mM_NO_P Parameter: Treatment Value: 5mM NO vs. No Treatment
  misc_feature: MA Experiment ID: 108534 Result: Up-regulated in Transcription
  misc_feature: MA Experiment 108534 PARAMETER Experiment Name: Zm_4deg_Cold_P Parameter: Age (hr) Value: 8
  misc_feature: MA Experiment 108534 PARAMETER Experiment Name: Zm_4deg_Cold_P Parameter: Organism Value: Zea mays
  misc_feature: MA Experiment 108534 PARAMETER Experiment Name: Zm_4deg_Cold_P Parameter: Plant Line Value: 35A19
  misc_feature: MA Experiment 108534 PARAMETER Experiment Name: Zm_4deg_Cold_P Parameter: Temperature (deg C) Value: 4 vs. 22
  misc_feature: MA Experiment 108534 PARAMETER Experiment Name: Zm_4deg_Cold_P Parameter: Timepoint (hr) Value: 6
  misc_feature: MA Experiment 108534 PARAMETER Experiment Name: Zm_4deg_Cold_P Parameter: Tissue Value: Aerial
  misc_feature: MA Experiment ID: 108535 Result: Down-regulated in Transcription
  misc_feature: MA Experiment 108535 PARAMETER Experiment Name: Zm_Meristem_P Parameter: Age (day) Value: 8
  misc_feature: MA Experiment 108535 PARAMETER Experiment Name: Zm_Meristem_P Parameter: Organism Value: Zea mays
  misc_feature: MA Experiment 108535 PARAMETER Experiment Name: Zm_Meristem_P Parameter: Plant Line Value: 35A19
  misc_feature: MA Experiment 108535 PARAMETER Experiment Name: Zm_Meristem_P Parameter: Tissue Value: Root Meristem vs. Above Root Meristem
  misc_feature: MA Experiment ID: 108540 Result: Up-regulated in Transcription
  misc_feature: MA Experiment 108540 PARAMETER Experiment Name: Zm_20percent_PEG_P Parameter: Age (day) Value: 8
  misc_feature: MA Experiment 108540 PARAMETER Experiment Name: Zm_20percent_PEG_P Parameter: Organism Value: Zea mays
  misc_feature: MA Experiment 108540 PARAMETER Experiment Name: Zm_20percent_PEG_P Parameter: Plant Line Value: 35A19
  misc_feature: MA Experiment 108540 PARAMETER Experiment Name: Zm_20percent_PEG_P Parameter: Timepoint (hr) Value: 6
  misc_feature: MA Experiment 108540 PARAMETER Experiment Name: Zm_20percent_PEG_P Parameter: Tissue Value: Aerial
  misc_feature: MA Experiment 108540 PARAMETER Experiment Name: Zm_20percent_PEG_P Parameter: Treatment Value: 20percent PEG vs. No Treatment
  misc_feature: MA Experiment ID: 108543 Result: Up-regulated in Transcription
  misc_feature: MA Experiment ID: 108545 Result: Down-regulated in Transcription
  misc_feature: MA Experiment 108545 PARAMETER Experiment Name: Zm_Imbibed_Seeds_P Parameter: Age (day) Value: 3 vs. 2
  misc_feature: MA Experiment 108545 PARAMETER Experiment Name: Zm_Imbibed_Seeds_P Parameter: Organism Value: Zea mays
  misc_feature: MA Experiment 108545 PARAMETER Experiment Name: Zm_Imbibed_Seeds_P Parameter: Plant Line Value: 35A19
  misc_feature: MA Experiment 108545 PARAMETER Experiment Name: Zm_Imbibed_Seeds_P Parameter: Tissue Value: Aerial vs. Embryo
  misc_feature: MA Experiment ID: 108547 Result: Down-regulated in Transcription
  misc_feature: MA Experiment 108547 PARAMETER Experiment Name: Zm_Imbibed_Seeds_P Parameter: Age (day) Value: 4 vs. 2
  misc_feature: MA Experiment 108547 PARAMETER Experiment Name: Zm_Imbibed_Seeds_P Parameter: Organism Value: Zea mays
  misc_feature: MA Experiment 108547 PARAMETER Experiment Name: Zm_Imbibed_Seeds_P Parameter: Plant Line Value: 35A19
  misc_feature: MA Experiment 108547 PARAMETER Experiment Name: Zm_Imbibed_Seeds_P Parameter: Tissue Value: Aerial vs. Embryo
  misc_feature: MA Experiment ID: 20000477 Result: Up-regulated in Transcription
  misc_feature: MA Experiment 20000477 PARAMETER Experiment Name: Zm_5mM_SA_P Parameter: Age (day) Value: 10
  misc_feature: MA Experiment 20000477 PARAMETER Experiment Name: Zm_5mM_SA_P Parameter: Organism Value: Zea mays
  misc_feature: MA Experiment 20000477 PARAMETER Experiment Name: Zm_5mM_SA_P Parameter: Plant Line Value: 35A19
  misc_feature: MA Experiment 20000477 PARAMETER Experiment Name: Zm_5mM_SA_P Parameter: Timepoint (hr) Value: 48
  misc_feature: MA Experiment 20000477 PARAMETER Experiment Name: Zm_5mM_SA_P Parameter: Tissue Value: Aerial
  misc_feature: MA Experiment 20000477 PARAMETER Experiment Name: Zm_5mM_SA_P Parameter: Treatment Value: 5mM SA vs. No Treatment
  misc_feature: MA Experiment ID: 20000533 Result: Up-regulated in Transcription
  misc_feature: MA Experiment 20000533 PARAMETER Experiment Name: Zm_0.001percent_MeJA_P Parameter: Age (day) Value: 11
  misc_feature: MA Experiment 20000533 PARAMETER Experiment Name: Zm_0.001percent_MeJA_P Parameter: Organism Value: Zea mays
  misc_feature: MA Experiment 20000533 PARAMETER Experiment Name: Zm_0.001percent_MeJA_P Parameter: Plant Line Value: 35A19
  misc_feature: MA Experiment 20000533 PARAMETER Experiment Name: Zm_0.001percent_MeJA_P Parameter: Timepoint (hr) Value: 72
  misc_feature: MA Experiment 20000533 PARAMETER Experiment Name: Zm_0.001percent_MeJA_P Parameter: Tissue Value: Aerial
  misc_feature: MA Experiment 20000533 PARAMETER Experiment Name: Zm_0.001percent_MeJA_P Parameter: Treatment Value: 0.001percent MeJA vs. No Treatment
  misc_feature: MA Experiment ID: 20000626 Result: Up-regulated in Transcription
  misc_feature: MA Experiment 20000626 PARAMETER Experiment Name: Zm_Herbicide-Treatments_P Parameter: Timepoint (hr) Value: 12
  misc_feature: MA Experiment 20000626 PARAMETER Experiment Name: Zm_Herbicide-Treatments_P Parameter: Tissue Value: Aerial
  misc_feature: MA Experiment 20000626 PARAMETER Experiment Name: Zm_Herbicide-Treatments_P Parameter: Treatment Value: Roundup vs. No Treatment
gacgcgcacccgcaccagcctctagtcggccagtcgggacgaagcctctcgaacgagcgaggccacgaggtgcccgccgcgcccagccggcctcgccgaccgggcccgccggcccctatataggcaggcgccacttcctcctcgcaaccaccagacgccagtccaccaccgcttcccgtgcagcgccctccctctacgttcccccatttcctgtgttggcggcgatggcgcggcacttcgtgctcaacaccggcgccaagatcccctccgtggggctcggcacctggcagtctgaccccggcgtcgttggcaacgctgtctacgccgccgtcaaggcgggttaccgacatatcgattgtgccagagtttacggcaacgaaaaggagattggtttggcgctgaagaagctatttgaagagggtgtagtgaagcgagaagatctgtttatcacctctaagctatggaatgatcatcatgctcctgaagatgtgcctgaggcactaaatgacagcctgaatgatttgcagcttgagtacctggatctttatcttatccattggccatttagagtcaacaagggaacaaataccagccctgaaaattttgttacacctgacttccctgctacttggggggcaatggaaaagttatatgatgctggcaaagctcgcgctattggtgtgagtaacttctcctcaaagaaattgggtgacttgcttgctgtagctcgtgtacctccagctgttgatcaggtggaatgtcatcctggttggcagcaaactaagctccatagcttttgtcagtcaactggtgttcatctaactgcttactcaccactaggttcacctggtacaacttggatgaatggtaatgtccttaaagaaccaataatcatctcaatagctgagaaactcgggaaaacttctgcacaagtggctctgcgctggaacattcagatgggtcacagtgttcttccaaagagcacgaatgaagaaaggataaagcaaaaccttgatgtttatgattggtcaattccagatgacttgcttgcaaagttctctgagattaagcaggctaggctacttagaggcaacttcattgttaatccagagagcgtttacaagacccatgaggagctctgggatggtgaactttaagaaggacgccgttgtccctcctgactcctgagcagggagcaagcagcgttccattagggctcgtcagatcatttcacctccaaagttgctcttttgaaatgaaggttcagtgctcggaagctctggtgccatcctgtatcacgaactattgagaaatttgtcggtgattttactttgtgctacgggatgtgctgctgcagtctgtcctagtgtcagttgatttttctggtaaaactgtgaccaaataagttaattcgccaggcatcattactattggaatttc

SEQ ID NO: 8299 - protein, 384 aa, Zea mays subsp. mays
  peptide (1)..(384): Ceres Seq. ID no. 12408550
  misc_feature (75)..(384): Homolog of NCBI NO: 34908280 NR Description: putative aldose reductase [Oryza sativa (japonica group)] >gi|15408884|dbj|BAB64275.1| putative aldose reductase
  misc_feature (75)..(384): Homolog of NCBI NO: 34908276 NR Description: putative aldose reductase [Oryza sativa (japonica group)] >gi|15408882|dbj|BAB64273.1| putative aldose reductase
  misc_feature (72)..(384): Homolog of NCBI NO: 30687261 NR Description: aldo/keto reductase family [Arabidopsis thaliana]
  misc_feature (79)..(384): Homolog of NCBI NO: 30687247 NR Description: aldo/keto reductase family [Arabidopsis thaliana]
  misc_feature (72)..(358): Homolog of NCBI NO: 25283479 NR Description: probable alcohol dehydrogenase [imported] -
  misc_feature (357)..(384): Homolog of NCBI NO: 25283479 NR Description: probable alcohol dehydrogenase [imported] -
  misc_feature (83)..(384): Homolog of NCBI NO: 28393400 NR Description: putative aldo/keto reductase [Arabidopsis
  misc_feature (72)..(382): Homolog of NCBI NO: 13160397 NR Description: aldose reductase [Digitalis purpurea]
  misc_feature (72)..(382): Homolog of NCBI NO: 13160399 NR Description: aldose reductase [Digitalis purpurea]
  misc_feature (79)..(359): Homolog of NCBI NO: 7431114 NR Description: aldehyde dehydrogenase homolog At2g37770 - thaliana >gi|3236259|gb|AAC23647.1| putative alcohol
RAPAPASSRPVGTKPLERARPRGARRAQPASPTGPAGPYIGRRHFLLATTRRQSTTASRAAPSLYVPPFPVLAAMARHFVLNTGAKIPSVGLGTWQSDPGVVGNAVYAAVKAGYRHIDCARVYGNEKEIGLALKKLFEEGVVKREDLFITSKLWNDHHAPEDVPEALNDSLNDLQLEYLDLYLIHWPFRVNKGTNTSPENFVTPDFPATWGAMEKLYDAGKARAIGVSNFSSKKLGDLLAVARVPPAVDQVECHPGWQQTKLHSFCQSTGVHLTAYSPLGSPGTTWMNGNVLKEPIIISIAEKLGKTSAQVALRWNIQMGHSVLPKSTNEERIKQNLDVYDWSIPDDLLAKFSEIKQARLLRGNFIVNPESVYKTHEELWDGEL

SEQ ID NO: 8300 - protein, 310 aa, Zea mays subsp. mays
  peptide (1)..(310): Ceres Seq. ID no. 12408551
  misc_feature (1)..(310): Homolog of NCBI NO: 34908280 NR Description: putative aldose reductase [Oryza sativa (japonica group)] >gi|15408884|dbj|BAB64275.1| putative aldose reductase
  misc_feature (1)..(310): Homolog of NCBI NO: 34908276 NR Description: putative aldose reductase [Oryza sativa (japonica group)] >gi|15408882|dbj|BAB64273.1| putative aldose reductase
  misc_feature (1)..(310): Homolog of NCBI NO: 30687261 NR Description: aldo/keto reductase family [Arabidopsis thaliana]
  misc_feature (5)..(310): Homolog of NCBI NO: 30687247 NR Description: aldo/keto reductase family [Arabidopsis thaliana]
  misc_feature (1)..(284): Homolog of NCBI NO: 25283479 NR Description: probable alcohol dehydrogenase [imported] -
  misc_feature (283)..(310): Homolog of NCBI NO: 25283479 NR Description: probable alcohol dehydrogenase [imported] -
  misc_feature (9)..(310): Homolog of NCBI NO: 28393400 NR Description: putative aldo/keto reductase [Arabidopsis
  misc_feature (1)..(308): Homolog of NCBI NO: 13160397 NR Description: aldose reductase [Digitalis purpurea]
  misc_feature (1)..(308): Homolog of NCBI NO: 13160399 NR Description: aldose reductase [Digitalis purpurea]
  misc_feature (5)..(285): Homolog of NCBI NO: 7431114 NR Description: aldehyde dehydrogenase homolog At2g37770 - thaliana >gi|3236259|gb|AAC23647.1| putative alcohol
MARHFVLNTGAKIPSVGLGTWQSDPGVVGNAVYAAVKAGYRHIDCARVYGNEKEIGLALKKLFEEGVVKREDLFITSKLWNDHHAPEDVPEALNDSLNDLQLEYLDLYLIHWPFRVNKGTNTSPENFVTPDFPATWGAMEKLYDAGKARAIGVSNFSSKKLGDLLAVARVPPAVDQVECHPGWQQTKLHSFCQSTGVHLTAYSPLGSPGTTWMNGNVLKEPIIISIAEKLGKTSAQVALRWNIQMGHSVLPKSTNEERIKQNLDVYDWSIPDDLLAKFSEIKQARLLRGNFIVNPESVYKTHEELWDGEL

SEQ ID NO: 8301 - DNA, 1527 bp, Zea mays subsp. mays
  misc_feature (1)..(1527): Ceres Seq. ID no. 12352599
  misc_feature: MA Experiment ID: 108535 Result: Down-regulated in Transcription
  misc_feature: MA Experiment 108535 PARAMETER Experiment Name: Zm_Meristem_P Parameter: Age (day) Value: 8
  misc_feature: MA Experiment 108535 PARAMETER Experiment Name: Zm_Meristem_P Parameter: Organism Value: Zea mays
  misc_feature: MA Experiment 108535 PARAMETER Experiment Name: Zm_Meristem_P Parameter: Plant Line Value: 35A19
  misc_feature: MA Experiment 108535 PARAMETER Experiment Name: Zm_Meristem_P Parameter: Tissue Value: Root Meristem vs. Above Root Meristem
  misc_feature: MA Experiment ID: 108536 Result: Up-regulated in Transcription
  misc_feature: MA Experiment 108536 PARAMETER Experiment Name: Zm_Meristem_P Parameter: Age (day) Value: 8
  misc_feature: MA Experiment 108536 PARAMETER Experiment Name: Zm_Meristem_P Parameter: Organism Value: Zea mays
  misc_feature: MA Experiment 108536 PARAMETER Experiment Name: Zm_Meristem_P Parameter: Plant Line Value: 35A19
  misc_feature: MA Experiment 108536 PARAMETER Experiment Name: Zm_Meristem_P Parameter: Tissue Value: Shoot Meristem vs. Above Shoot Meristem
  misc_feature: MA Experiment ID: 108543 Result: Up-regulated in Transcription
  misc_feature: MA Experiment ID: 108544 Result: Down-regulated in Transcription
  misc_feature: MA Experiment ID: 108687 Result: Up-regulated in Transcription
  misc_feature: MA Experiment 108687 PARAMETER Experiment Name: Zm_Embryos-Flowers__P Parameter: Tissue Value: Embryo vs. Aerial+
  misc_feature: MA Experiment ID: 20000478 Result: Down-regulated in Transcription
  misc_feature: MA Experiment 20000478 PARAMETER Experiment Name: Zm_5mM_SA_P Parameter: Age (day) Value: 11
  misc_feature: MA Experiment 20000478 PARAMETER Experiment Name: Zm_5mM_SA_P Parameter: Organism Value: Zea mays
  misc_feature: MA Experiment 20000478 PARAMETER Experiment Name: Zm_5mM_SA_P Parameter: Plant Line Value: 35A19
  misc_feature: MA Experiment 20000478 PARAMETER Experiment Name: Zm_5mM_SA_P Parameter: Timepoint (hr) Value: 72
  misc_feature: MA Experiment 20000478 PARAMETER Experiment Name: Zm_5mM_SA_P Parameter: Tissue Value: Aerial
  misc_feature: MA Experiment 20000478 PARAMETER Experiment Name: Zm_5mM_SA_P Parameter: Treatment Value: 5mM SA vs. No Treatment
  misc_feature: MA Experiment ID: 20000488 Result: Down-regulated in Transcription
  misc_feature: MA Experiment 20000488 PARAMETER Experiment Name: Zm_50mM_NH4NO3_L_to_H_P Parameter: Organism Value: Zea mays
  misc_feature: MA Experiment 20000488 PARAMETER Experiment Name: Zm_50mM_NH4NO3_L_to_H_P Parameter: Timepoint (hr) Value: 8
  misc_feature: MA Experiment 20000488 PARAMETER Experiment Name: Zm_50mM_NH4NO3_L_to_H_P Parameter: Tissue Value: Leaves
  misc_feature: MA Experiment 20000488 PARAMETER Experiment Name: Zm_50mM_NH4NO3_L_to_H_P Parameter: Treatment Value: 50mM NH4NO3 vs. 100mM Mannitol
  misc_feature: MA Experiment ID: 20000535 Result: Down-regulated in Transcription
  misc_feature: MA Experiment 20000535 PARAMETER Experiment Name: Zm_Hybrid_Seed_Dev_P Parameter: DAP Value: 30 vs. 12
  misc_feature: MA Experiment 20000535 PARAMETER Experiment Name: Zm_Hybrid_Seed_Dev_P Parameter: Organism Value: Zea mays
  misc_feature: MA Experiment 20000535 PARAMETER Experiment Name: Zm_Hybrid_Seed_Dev_P Parameter: Plant Line Value: 35A19
  misc_feature: MA Experiment 20000535 PARAMETER Experiment Name: Zm_Hybrid_Seed_Dev_P Parameter: Tissue Value: Embryo vs. Unfert Floret
actgcttcccgtagtcctttgtcgcgagctgctgtgctgtgtcctgtgtgcccgcaccatcgcctgaggcctgagggtgcgtgctgcaggtatttattggacgcttcccggatcaaagcaatgtcgagtggcgacagtcggcggtgggcgcgcatgcagtgggtggcgacgcgaccgagtgcggtggtggtacggcgagcgagcgagcgacacgagctgagtgagtgccctgcaagcccaagctcgtgacagagataggacttcagctcgactcgcgcggtcgccttgcctgctgcacacgagccgtcgccaactcgatcctcaccggtgacccctaccgcagctcatatcatcctgttcttgctcttcatcttactgttaatttcctgccaatttaatcccaccggccatcgttctcctgaaccaaagccatggcgcaagctgcttccggctccagcaagatcgacaccaaagctcccacctcagccgacgaggccgctcaacccaagagctacggcgacctggtatccactctcccggctagaggcgggtgggtatcgctcgtgcagtaccagaactactggctgaaccccggcaggctccagaacatcatncccgtgaaagagctctacaagcctcgcgccgacgacatcgtcctcgccacctacctgaaatgcgggaccacgtggctgaaggcgctggccttcgccatcacgacccgcggccgccaccaccaggccttcgccgccgccgaccaccccctgctcaccgtgcacccgcaggaggccgtgccgcacctggaggtgcacacgccagggcagggcctggcagacatcgagaggctgccgtcgccgaggctgctcgggacgcacctgcccctctccctgctcccgccggccgtggccacctccggctgccgcgtcgtgtacctgtgccggcagcccaaggacgtgttcgtctcgctctggcacttcgtgaagggcatgcgcgggggcaggtcccccgtggagctggacgccgcgctggccatgttctgcgagggggtctcgcctttcgggcccgtctgggagcactacctcgagtactggaaggagagcctggcgaggcctgagcgggtccttttcctcaggtacgaggagatggtggcggacccggtgcgtgccgtgaggacgctcgccggcttcttcgccgtcccgttcaccgacgaggaagaggggcgaggggtcccggaggagattgtgaggctgtgcagcttcgagatgctgagcggcttggaaagcaatcggaccggagatcttgattgcggagacaacacggtgatcggaaaatctaccttcttcaggaagggcaaggttggggactgggagaaccacttgacaaaagagatgggcaagaaggtcgacgccgttttcgaagacaagctccagggatctggtctcgtgttttgaattttgattactatccatgcatggcttttgtttgtgtgatgctgtttgtccagaataactaatcgtttgcgcatgttgc

SEQ ID NO: 8302 - protein, 338 aa, Zea mays subsp. mays
  peptide (1)..(338): Ceres Seq. ID no. 12352600
  misc_feature (73)..(335): Pfam Name: Sulfotransferase domain Pfam Description: Sulfotransferase domain
  misc_feature (8)..(336): Homolog of NCBI NO: 38344441 NR Description: OSJNBa0038O10.13 [Oryza sativa (japonica
  misc_feature (4)..(336): Homolog of NCBI NO: 40253317 NR Description: putative flavonol 3-sulfotransferase [Oryza
  misc_feature (30)..(336): Homolog of NCBI NO: 34905060 NR Description: putative flavonol 4'-sulfotransferase [Oryza
  misc_feature (233)..(338): Homolog of NCBI NO: 34905062 NR Description: P0686C03.14 [Oryza sativa (japonica
  misc_feature (1)..(337): Homolog of NCBI NO: 21593660 NR Description: putative flavonol sulfotransferase [Arabidopsis
  misc_feature (14)..(336): Homolog of NCBI NO: 38346451 NR Description: OSJNBa0018J19.12 [Oryza sativa (japonica
  misc_feature (1)..(337): Homolog of NCBI NO: 15221130 NR Description: putative flavonol sulfotransferase; protein id: supported by cDNA: 41006. [Arabidopsis thaliana]
  misc_feature (15)..(182): Homolog of NCBI NO: 34905062 NR Description: P0686C03.14 [Oryza sativa (japonica
  misc_feature (5)..(337): Homolog of NCBI NO: 15221820 NR Description: flavonol 4'-sulfotransferase, putative; protein At1g18590.1 [Arabidopsis thaliana] >gi|25288803|pir||E86319
  misc_feature (26)..(337): Homolog of NCBI NO: 21593087 NR Description: putative flavonol sulfotransferase [Arabidopsis
  misc_feature (61)..(61): Xaa is any aa, unknown or other
MAQAASGSSKIDTKAPTSADEAAQPKSYGDLVSTLPARGGWVSLVQYQNYWLNPGRLQNIXPVKELYKPRADDIVLATYLKCGTTWLKALAFAITTRGRHHQAFAAADHPLLTVHPQEAVPHLEVHTPGQGLADIERLPSPRLLGTHLPLSLLPPAVATSGCRVVYLCRQPKDVFVSLWHFVKGMRGGRSPVELDAALAMFCEGVSPFGPVWEHYLEYWKESLARPERVLFLRYEEMVADPVRAVRTLAGFFAVPFTDEEEGRGVPEEIVRLCSFEMLSGLESNRTGDLDCGDNTVIGKSTFFRKGKVGDWENHLTKEMGKKVDAVFEDKLQGSGLVF

SEQ ID NO: 8303 - DNA, 1436 bp, Zea mays subsp. mays
  misc_feature (1)..(1436): Ceres Seq. ID no. 12352544
  misc_feature: MA Experiment ID: 108522 Result: Up-regulated in Transcription
  misc_feature: MA Experiment 108522 PARAMETER Experiment Name: Zm_42deg_Heat_P Parameter: Age (day) Value: 8
  misc_feature: MA Experiment 108522 PARAMETER Experiment Name: Zm_42deg_Heat_P Parameter: Organism Value: Zea mays
  misc_feature: MA Experiment 108522 PARAMETER Experiment Name: Zm_42deg_Heat_P Parameter: Plant Line Value: 35A19
  misc_feature: MA Experiment 108522 PARAMETER Experiment Name: Zm_42deg_Heat_P Parameter: Temperature (deg C) Value: 42 vs. 22
  misc_feature: MA Experiment 108522 PARAMETER Experiment Name: Zm_42deg_Heat_P Parameter: Timepoint (hr) Value: 1
  misc_feature: MA Experiment 108522 PARAMETER Experiment Name: Zm_42deg_Heat_P Parameter: Tissue Value: Aerial
  misc_feature: MA Experiment ID: 108523 Result: Up-regulated in Transcription
  misc_feature: MA Experiment 108523 PARAMETER Experiment Name: Zm_42deg_Heat_P Parameter: Age (day) Value: 8
  misc_feature: MA Experiment 108523 PARAMETER Experiment Name: Zm_42deg_Heat_P Parameter: Organism Value: Zea mays
  misc_feature: MA Experiment 108523 PARAMETER Experiment Name: Zm_42deg_Heat_P Parameter: Plant Line Value: 35A19
  misc_feature: MA Experiment 108523 PARAMETER Experiment Name: Zm_42deg_Heat_P Parameter: Temperature (deg C) Value: 42 vs. 22
  misc_feature: MA Experiment 108523 PARAMETER Experiment Name: Zm_42deg_Heat_P Parameter: Timepoint (hr) Value: 6
  misc_feature: MA Experiment 108523 PARAMETER Experiment Name: Zm_42deg_Heat_P Parameter: Tissue Value: Aerial
  misc_feature: MA Experiment ID: 108543 Result: Down-regulated in Transcription
  misc_feature: MA Experiment ID: 108689 Result: Up-regulated in Transcription
  misc_feature: MA Experiment 108689 PARAMETER Experiment Name: Zm_Drought_Roots_P Parameter: Age (day) Value: 9
  misc_feature: MA Experiment 108689 PARAMETER Experiment Name: Zm_Drought_Roots_P Parameter: Organism Value: Zea mays
  misc_feature: MA Experiment 108689 PARAMETER Experiment Name: Zm_Drought_Roots_P Parameter: Plant Line Value: 35A19
  misc_feature: MA Experiment 108689 PARAMETER Experiment Name: Zm_Drought_Roots_P Parameter: Timepoint (hr) Value: 24
  misc_feature: MA Experiment 108689 PARAMETER Experiment Name: Zm_Drought_Roots_P Parameter: Tissue Value: Roots
  misc_feature: MA Experiment 108689 PARAMETER Experiment Name: Zm_Drought_Roots_P Parameter: Treatment Value: Drought vs. No Drought
gaaacaaattgcgcattttcttctcctgcggtccttccttcgcttccccgttcttccagaatcctgtcgagacctgaatccaccctcacccagcggtccccatggcctccggcgaaggtgtagttgaccaaccgcctctcttctgttgatcctcgcatcggccaactcccccatctccgcaagctctcattccgccagaacctcctcgacgatgacgccgtcgcgccactcacgtcctgggaggctattgccgggttgaaggagttcgtccttagagataacaaacttacaaggattcctgatgctggcatattcaaggatcttctggtgttcgatgtatctttcaatgagatatcttctttgactggtctgtccaaggtttccatcaaattgaaggaactttatgtttcaaaaaatgaagttgcaaagatggaagagcttgaacatttccatgcgctggaaattcttgaacttggtagcaacagattacgggtaatggaaaatcttgaaaccttgacaaatctacaagaactgtggttgggaagaaatcgaattcgagctgtcaacttgtgtggtttgaagctaattaagaaaataagtttgcaaagcaacagactgacttcaatgcatgggtttcaggaatgtgctgcattagaggagttatacctcagccataatggaatccaaaagatggaaggcctctctactttgcataacctccgcattttggatgtttcagctaacaagctaacgactatagaaaatatcgaaaccttaaccaggctggaggacctgtggttgaatgacaaccaaataccatctctagagggtatagagacagctttggctggttcgcgggagaagttgacgacaatctatctcgaacgaaatccctgtgcaaaaactccagattactcgtcgacgttgaggaaaatatttccaaatctcgaacaaattgattcagatatcatagcatgataactagctaatccttgcccagatactaaggcaaagaaggctttggggttccccggagaagtcattaacagcaatcaacttgtgaggcgaacaatagacagtaatttgatccttaaagtcttcattgccaactctgctcgtgttgtggaagacattggttcggagtttgtagccttgagccgttacgggcttaatatagtgattggtaaccaaataattagaggtgtacgaggattgtcacaggatccatatccgtgttactagttttaagatgtttcatttcagttctctagattagtgttgatttttttttctctccaaatgaggctaggaacagccagcagttcatttctgtaagttgaatgcagacatctctgtgttgcatatcaacttgcaaggatgtgtcagcctgttgagaacccgaaattatcttttatttgaattttatttattactcc

SEQ ID NO: 8304 - protein, 182 aa, Zea mays subsp. mays
  peptide (1)..(182): Ceres Seq. ID no. 12352545
  misc_feature (1)..(182): Homolog of NCBI NO: 21536755 NR Description: unknown [Arabidopsis thaliana]
  misc_feature (1)..(182): Homolog of NCBI NO: 15241153 NR Description: putative protein; protein id: At5g19680.1, by cDNA: 110392. [Arabidopsis thaliana]
  misc_feature (1)..(181): Homolog of NCBI NO: 4506013 NR Description: protein phosphatase 1, regulatory subunit 7;
  misc_feature (1)..(181): Homolog of NCBI NO: 4633066 NR Description: protein phosphatase-1 regulatory subunit 7 alpha2
  misc_feature (1)..(181): Homolog of NCBI NO: 12963569 NR Description: protein phosphatase-1 regulatory subunit 7; RIKEN
  misc_feature (1)..(181): Homolog of NCBI NO: 34877683 NR Description: similar to protein phosphatase 1, regulatory
  misc_feature (1)..(180): Homolog of NCBI NO: 31233812 NR Description: ENSANGP00000015763 [Anopheles gambiae]
  misc_feature (1)..(180): Homolog of NCBI NO: 21358617 NR Description: CG5851-PA [Drosophila melanogaster]
  misc_feature (1)..(180): Homolog of NCBI NO: 6684160 NR Description: putative mitotic protein phosphatase 1 regulator
  misc_feature (1)..(181): Homolog of NCBI NO: 40747368 NR Description: hypothetical protein AN0425.2 [Aspergillus
MEELEHFHALEILELGSNRLRVMENLETLTNLQELWLGRNRIRAVNLCGLKLIKKISLQSNRLTSMHGFQECAALEELYLSHNGIQKMEGLSTLHNLRILDVSANKLTTIENIETLTRLEDLWLNDNQIPSLEGIETALAGSREKLTTIYLERNPCAKTPDYSSTLRKIFPNLEQIDSDIIA

SEQ ID NO: 8305 - protein, 160 aa, Zea mays subsp. mays
  peptide (1)..(160): Ceres Seq. ID no. 12352546
  misc_feature (1)..(160): Homolog of NCBI NO: 21536755 NR Description: unknown [Arabidopsis thaliana]
  misc_feature (1)..(160): Homolog of NCBI NO: 15241153 NR Description: putative protein; protein id: At5g19680.1, by cDNA: 110392. [Arabidopsis thaliana]
  misc_feature (1)..(159): Homolog of NCBI NO: 4506013 NR Description: protein phosphatase 1, regulatory subunit 7;
  misc_feature (1)..(159): Homolog of NCBI NO: 4633066 NR Description: protein phosphatase-1 regulatory subunit 7 alpha2
  misc_feature (1)..(159): Homolog of NCBI NO: 12963569 NR Description: protein phosphatase-1 regulatory subunit 7; RIKEN
  misc_feature (1)..(159): Homolog of NCBI NO: 34877683 NR Description: similar to protein phosphatase 1, regulatory
  misc_feature (1)..(158): Homolog of NCBI NO: 31233812 NR Description: ENSANGP00000015763 [Anopheles gambiae]
  misc_feature (1)..(158): Homolog of NCBI NO: 21358617 NR Description: CG5851-PA [Drosophila melanogaster]
  misc_feature (1)..(158): Homolog of NCBI NO: 6684160 NR Description: putative mitotic protein phosphatase 1 regulator
  misc_feature (1)..(159): Homolog of NCBI NO: 40747368 NR Description: hypothetical protein AN0425.2 [Aspergillus
MENLETLTNLQELWLGRNRIRAVNLCGLKLIKKISLQSNRLTSMHGFQECAALEELYLSHNGIQKMEGLSTLHNLRILDVSANKLTTIENIETLTRLEDLWLNDNQIPSLEGIETALAGSREKLTTIYLERNPCAKTPDYSSTLRKIFPNLEQIDSDIIA

SEQ ID NO: 8306 - protein, 117 aa, Zea mays subsp. mays
  peptide (1)..(117): Ceres Seq. ID no. 12352547
  misc_feature (1)..(117): Homolog of NCBI NO: 21536755 NR Description: unknown [Arabidopsis thaliana]
  misc_feature (1)..(117): Homolog of NCBI NO: 15241153 NR Description: putative protein; protein id: At5g19680.1, by cDNA: 110392. [Arabidopsis thaliana]
  misc_feature (1)..(116): Homolog of NCBI NO: 4506013 NR Description: protein phosphatase 1, regulatory subunit 7;
  misc_feature (1)..(116): Homolog of NCBI NO: 4633066 NR Description: protein phosphatase-1 regulatory subunit 7 alpha2
  misc_feature (1)..(116): Homolog of NCBI NO: 12963569 NR Description: protein phosphatase-1 regulatory subunit 7; RIKEN
  misc_feature (1)..(116): Homolog of NCBI NO: 34877683 NR Description: similar to protein phosphatase 1, regulatory
  misc_feature (1)..(115): Homolog of NCBI NO: 31233812 NR Description: ENSANGP00000015763 [Anopheles gambiae]
  misc_feature (1)..(115): Homolog of NCBI NO: 21358617 NR Description: CG5851-PA [Drosophila melanogaster]
  misc_feature (1)..(115): Homolog of NCBI NO: 6684160 NR Description: putative mitotic protein phosphatase 1 regulator
  misc_feature (1)..(116): Homolog of NCBI NO: 40747368 NR Description: hypothetical protein AN0425.2 [Aspergillus
MHGFQECAALEELYLSHNGIQKMEGLSTLHNLRILDVSANKLTTIENIETLTRLEDLWLNDNQIPSLEGIETALAGSREKLTTIYLERNPCAKTPDYSSTLRKIFPNLEQIDSDIIA

SEQ ID NO: 8307 - DNA, 1701 bp, Zea mays subsp. mays
  misc_feature (1)..(1701): Ceres Seq. ID no. 12356548
  misc_feature: MA Experiment ID: 108522 Result: Up-regulated in Transcription
  misc_feature: MA Experiment 108522 PARAMETER Experiment Name: Zm_42deg_Heat_P Parameter: Age (day) Value: 8
  misc_feature: MA Experiment 108522 PARAMETER Experiment Name: Zm_42deg_Heat_P Parameter: Organism Value: Zea mays
  misc_feature: MA Experiment 108522 PARAMETER Experiment Name: Zm_42deg_Heat_P Parameter: Plant Line Value: 35A19
  misc_feature: MA Experiment 108522 PARAMETER Experiment Name: Zm_42deg_Heat_P Parameter: Temperature (deg C) Value: 42 vs. 22
  misc_feature: MA Experiment 108522 PARAMETER Experiment Name: Zm_42deg_Heat_P Parameter: Timepoint (hr) Value: 1
  misc_feature: MA Experiment 108522 PARAMETER Experiment Name: Zm_42deg_Heat_P Parameter: Tissue Value: Aerial
  misc_feature: MA Experiment ID: 108528 Result: Down-regulated in Transcription
  misc_feature: MA Experiment 108528 PARAMETER Experiment Name: Zm_Imbibed_Seeds_P Parameter: Age (day) Value: 5 vs. 2
  misc_feature: MA Experiment 108528 PARAMETER Experiment Name: Zm_Imbibed_Seeds_P Parameter: Organism Value: Zea mays
  misc_feature: MA Experiment 108528 PARAMETER Experiment Name: Zm_Imbibed_Seeds_P Parameter: Plant Line Value: 35A19
  misc_feature: MA Experiment 108528 PARAMETER Experiment Name: Zm_Imbibed_Seeds_P Parameter: Tissue Value: Aerial vs. Embryo
  misc_feature: MA Experiment ID: 108529 Result: Up-regulated in Transcription
  misc_feature: MA Experiment 108529 PARAMETER Experiment Name: Zm_Imbibed_Seeds_P Parameter: Age (day) Value: 5 vs. 2
  misc_feature: MA Experiment 108529 PARAMETER Experiment Name: Zm_Imbibed_Seeds_P Parameter: Organism Value: Zea mays
  misc_feature: MA Experiment 108529 PARAMETER Experiment Name: Zm_Imbibed_Seeds_P Parameter: Plant Line Value: 35A19
  misc_feature: MA Experiment 108529 PARAMETER Experiment Name: Zm_Imbibed_Seeds_P Parameter: Tissue Value: Roots vs. Embryo
  misc_feature: MA Experiment ID: 108530 Result: Down-regulated in Transcription
  misc_feature: MA Experiment 108530 PARAMETER Experiment Name: Zm_Imbibed_Seeds_P Parameter: Age (day) Value: 6 vs. 2
  misc_feature: MA Experiment 108530 PARAMETER Experiment Name: Zm_Imbibed_Seeds_P Parameter: Organism Value: Zea mays
  misc_feature: MA Experiment 108530 PARAMETER Experiment Name: Zm_Imbibed_Seeds_P Parameter: Plant Line Value: 35A19
  misc_feature: MA Experiment 108530 PARAMETER Experiment Name: Zm_Imbibed_Seeds_P Parameter: Tissue Value: Aerial vs. Embryo
  misc_feature: MA Experiment ID: 108534 Result: Up-regulated in Transcription
  misc_feature: MA Experiment 108534 PARAMETER Experiment Name: Zm_4deg_Cold_P Parameter: Age (hr) Value: 8
  misc_feature: MA Experiment 108534 PARAMETER Experiment Name: Zm_4deg_Cold_P Parameter: Organism Value: Zea mays
  misc_feature: MA Experiment 108534 PARAMETER Experiment Name: Zm_4deg_Cold_P Parameter: Plant Line Value: 35A19
  misc_feature: MA Experiment 108534 PARAMETER Experiment Name: Zm_4deg_Cold_P Parameter: Temperature (deg C) Value: 4 vs. 22
  misc_feature: MA Experiment 108534 PARAMETER Experiment Name: Zm_4deg_Cold_P Parameter: Timepoint (hr) Value: 6
  misc_feature: MA Experiment 108534 PARAMETER Experiment Name: Zm_4deg_Cold_P Parameter: Tissue Value: Aerial
  misc_feature: MA Experiment ID: 108535 Result: Down-regulated in Transcription
  misc_feature: MA Experiment 108535 PARAMETER Experiment Name: Zm_Meristem_P Parameter: Age (day) Value: 8
  misc_feature: MA Experiment 108535 PARAMETER Experiment Name: Zm_Meristem_P Parameter: Organism Value: Zea mays
  misc_feature: MA Experiment 108535 PARAMETER Experiment Name: Zm_Meristem_P Parameter: Plant Line Value: 35A19
  misc_feature: MA Experiment 108535 PARAMETER Experiment Name: Zm_Meristem_P Parameter: Tissue Value: Root Meristem vs. Above Root Meristem
  misc_feature: MA Experiment ID: 108545 Result: Down-regulated in Transcription
  misc_feature: MA Experiment 108545 PARAMETER Experiment Name: Zm_Imbibed_Seeds_P Parameter: Age (day) Value: 3 vs. 2
  misc_feature: MA Experiment 108545 PARAMETER Experiment Name: Zm_Imbibed_Seeds_P Parameter: Organism Value: Zea mays
  misc_feature: MA Experiment 108545 PARAMETER Experiment Name: Zm_Imbibed_Seeds_P Parameter: Plant Line Value: 35A19
  misc_feature: MA Experiment 108545 PARAMETER Experiment Name: Zm_Imbibed_Seeds_P Parameter: Tissue Value: Aerial vs. Embryo
  misc_feature: MA Experiment ID: 108546 Result: Up-regulated in Transcription
  misc_feature: MA Experiment 108546 PARAMETER Experiment Name: Zm_Imbibed_Seeds_P Parameter: Age (day) Value: 3 vs. 2
  misc_feature: MA Experiment 108546 PARAMETER Experiment Name: Zm_Imbibed_Seeds_P Parameter: Organism Value: Zea mays
  misc_feature: MA Experiment 108546 PARAMETER Experiment Name: Zm_Imbibed_Seeds_P Parameter: Plant Line Value: 35A19
  misc_feature: MA Experiment 108546 PARAMETER Experiment Name: Zm_Imbibed_Seeds_P Parameter: Tissue Value: Roots vs. Embryo
  misc_feature: MA Experiment ID: 108547 Result: Down-regulated in Transcription
  misc_feature: MA Experiment 108547 PARAMETER Experiment Name: Zm_Imbibed_Seeds_P Parameter: Age (day) Value: 4 vs. 2
  misc_feature: MA Experiment 108547 PARAMETER Experiment Name: Zm_Imbibed_Seeds_P Parameter: Organism Value: Zea mays
  misc_feature: MA Experiment 108547 PARAMETER Experiment Name: Zm_Imbibed_Seeds_P Parameter: Plant Line Value: 35A19
  misc_feature: MA Experiment 108547 PARAMETER Experiment Name: Zm_Imbibed_Seeds_P Parameter: Tissue Value: Aerial vs. Embryo
  misc_feature: MA Experiment ID: 20000478 Result: Up-regulated in Transcription
  misc_feature: MA Experiment 20000478 PARAMETER Experiment Name: Zm_5mM_SA_P Parameter: Age (day) Value: 11
  misc_feature: MA Experiment 20000478 PARAMETER Experiment Name: Zm_5mM_SA_P Parameter: Organism Value: Zea mays
  misc_feature: MA Experiment 20000478 PARAMETER Experiment Name: Zm_5mM_SA_P Parameter: Plant Line Value: 35A19
  misc_feature: MA Experiment 20000478 PARAMETER Experiment Name: Zm_5mM_SA_P Parameter: Timepoint (hr) Value: 72
  misc_feature: MA Experiment 20000478 PARAMETER Experiment Name: Zm_5mM_SA_P Parameter: Tissue Value: Aerial
  misc_feature: MA Experiment 20000478 PARAMETER Experiment Name: Zm_5mM_SA_P Parameter: Treatment Value: 5mM SA vs. No Treatment
  misc_feature: MA Experiment ID: 20000479 Result: Up-regulated in Transcription
  misc_feature: MA Experiment 20000479 PARAMETER Experiment Name: Zm_Drought_P Parameter: Age (day) Value: 10
  misc_feature: MA Experiment 20000479 PARAMETER Experiment Name: Zm_Drought_P Parameter: Organism Value: Zea mays
  misc_feature: MA Experiment 20000479 PARAMETER Experiment Name: Zm_Drought_P Parameter: Plant Line Value: 35A19
  misc_feature: MA Experiment 20000479 PARAMETER Experiment Name: Zm_Drought_P Parameter: Timepoint (hr) Value: 48
  misc_feature: MA Experiment 20000479 PARAMETER Experiment Name: Zm_Drought_P Parameter: Tissue Value: Aerial
  misc_feature: MA Experiment 20000479 PARAMETER Experiment Name: Zm_Drought_P Parameter: Treatment Value: Drought vs. No Drought
  misc_feature: MA Experiment ID: 20000487 Result: Up-regulated in Transcription
  misc_feature: MA Experiment 20000487 PARAMETER Experiment Name: Zm_50mM_NH4NO3_L_to_H_P Parameter: Organism Value: Zea mays
  misc_feature: MA Experiment 20000487 PARAMETER Experiment Name: Zm_50mM_NH4NO3_L_to_H_P Parameter: Timepoint (hr) Value: 4
  misc_feature: MA Experiment 20000487 PARAMETER Experiment Name: Zm_50mM_NH4NO3_L_to_H_P Parameter: Tissue Value: Leaves
  misc_feature: MA Experiment 20000487 PARAMETER Experiment Name: Zm_50mM_NH4NO3_L_to_H_P Parameter: Treatment Value: 50mM NH4NO3 vs. 100mM Mannitol
  misc_feature: MA Experiment ID: 20001610 Result: Up-regulated in Transcription
  misc_feature: MA Experiment 20001610 PARAMETER Experiment Name: Zm_50ppm_KNO3_L-to-H_P Parameter: Age (day) Value: 19
  misc_feature: MA Experiment 20001610 PARAMETER Experiment Name: Zm_50ppm_KNO3_L-to-H_P Parameter: Organism Value: Zea mays
  misc_feature: MA Experiment 20001610 PARAMETER Experiment Name: Zm_50ppm_KNO3_L-to-H_P Parameter: Plant Line Value: 35A19
  misc_feature: MA Experiment 20001610 PARAMETER Experiment Name: Zm_50ppm_KNO3_L-to-H_P Parameter: Timepoint (hr) Value: 2
  misc_feature: MA Experiment 20001610 PARAMETER Experiment Name: Zm_50ppm_KNO3_L-to-H_P Parameter: Tissue Value: Roots
  misc_feature: MA Experiment 20001610 PARAMETER Experiment Name: Zm_50ppm_KNO3_L-to-H_P Parameter: Treatment Value: 50ppm KNO3 vs. 50ppm KCl
ttcagctcgaggccttgtcttgagttctctagctcgtccacaggcctggccagctagctagctagcactgacactgaccgagaccctgcagctagcagctgatcgatccatccatggccatgggctgctgctacggtgatttcttcgacaaggccaagccttacctcgccatgatctccctgcagttcggctatgccggcatgaacgtcatcaccaaggtctccctcaaccacggcatgagccactacgtgctcgtcgtctaccgccacgcctttgccaccgtctctattgcaccgtttgctctcatccttgagaggaaggtgaggcccaacatgacgtggtccgtcttcctccagatcttcgtgttggcactgctcgggcctgtgatagaccagaacttctactacgccggcctcaagttcaccgggccgaccttcgcgtgcgccatgagcaacatccttcctgccatgaccttcgtcatggccgtgattttcaggatggagaaggtggacctgaagaagatgcggtgccagggcgaaggtggccgggacgctggtgaccgtggccggcgcgatgatgatgacgctgtacaagggcccgctgatgaagatggcgtggaccagcagcggccacgcgcacggcggcggcggcggcgccgaggcggccgtcatcgaccccagcggcagggagtggttcctgggctcgctcttcgtcatcgtcgccaccctcgcctgggcctcgctcttcatcctccaggcgcacaccctgaagcagtacgcggcgccgctctccctcaccaccctcatctgcttcgtcggcaccctacaggccatcgtcgtcaccttcgccatggagcaccgcccctccgtctggaccatcggcttcgacatgaacctcctcgccgccgcatacgccggcattgtcacgtcgagcatagcgtactacgtgcaaggcctggtgatccagaagaccgggcccgtgttcgcgtcggcgttcagcccgctgatgatgatcatcgtggccgtcatgggctccttcatcctcgccgagaagatattcctcggcggcgtcctcggcgccgtcctcatcgtcatcgggctctactcggtgctctggggcaagcacaaggagacgcaggacaaggaggacgatgagactacagagctgcccgtcgtggcaataatggcatccaaaaccaatggagtcgtctacgacgacgacgatgacgtcgtcttcgtcaaggagatcgccgccgccggcgctggcgctgttggaggagatgactcggagtgcaggaaggcgactggggtggtgaagtcatcctcccgtggacacggagctgctggtgcagtttgatggaacatgcatggaagaggcggtgtccaactgctaacttcctttccttgcattgccatgtgtgtcccctagtatctactgacgttgcatgcatcacagggtcgggtgattgagagaggcagctgcgatgcagagtggaaggactggaataattttgttctgtgcccttttgaattttgctacctttttgtacctaagatgtatctactagtatatttaacttgtattttcttatgctttaatttctgtggagaaaaaagtgatgttccgggacttaagcgaaggacatatatatatgtatgtatcacatcggcttttgccatgtaatatattattgcttttctt

SEQ ID NO: 8308 - protein, 346 aa, Zea mays subsp. mays
  peptide (1)..(346): Ceres Seq. ID no. 12356549
  misc_feature (25)..(142): Pfam Name: Integral membrane protein DUF6 Pfam Description: Integral membrane protein DUF6
  misc_feature (1)..(142): Homolog of NCBI NO: 34908998 NR Description: nodulin-like protein [Oryza sativa (japonica
  misc_feature (10)..(142): Homolog of NCBI NO: 15240683 NR Description: MtN21 nodulin protein-like; protein id:
  misc_feature (10)..(142): Homolog of NCBI NO: 2598575 NR Description: MtN21 [Medicago truncatula]
  misc_feature (12)..(139): Homolog of NCBI NO: 30688451 NR Description: nodulin MtN21 family protein [Arabidopsis
  misc_feature (12)..(139): Homolog of NCBI NO: 7487973 NR Description: probable integral membrane protein nodulin
  misc_feature (12)..(142): Homolog of NCBI NO: 15228980 NR Description: nodulin-like protein; protein id: At3g56620.1,
  misc_feature (12)..(142): Homolog of NCBI NO: 21592817 NR Description: nodulin-like protein [Arabidopsis thaliana]
  misc_feature (15)..(138): Homolog of NCBI NO: 15219123 NR Description: nodulin-like protein; protein id: At1g21890.1,
  misc_feature (15)..(138): Homolog of NCBI NO: 17529004 NR Description: putative nodulin protein [Arabidopsis thaliana]
  misc_feature (15)..(138): Homolog of NCBI NO: 6552743 NR Description: T26F17.11 [Arabidopsis thaliana]
MAMGCCYGDFFDKAKPYLAMISLQFGYAGMNVITKVSLNHGMSHYVLVVYRHAFATVSIAPFALILERKVRPNMTWSVFLQIFVLALLGPVIDQNFYYAGLKFTGPTFACAMSNILPAMTFVMAVIFRMEKVDLKKMRCQGEGGRDAGDRGRRDDDDAVQGPADEDGVDQQRPRARRRRRRRGGRHRPQRQGVVPGLALRHRRHPRLGLALHPPGAHPEAVRGAALPHHPHLLRRHPTGHRRHLRHGAPPLRLDHRLRHEPPRRRIRRHCHVEHSVLRARPGDPEDRARVRVGVQPADDDHRGRHGLLHPRREDIPRRRPRRRPHRHRALLGALGQAQGDAGQGGR

SEQ ID NO: 8309 - protein, 344 aa, Zea mays subsp. mays
  peptide (1)..(344): Ceres Seq. ID no. 12356550
  misc_feature (23)..(140): Pfam Name: Integral membrane protein DUF6 Pfam Description: Integral membrane protein DUF6
  misc_feature (1)..(140): Homolog of NCBI NO: 34908998 NR Description: nodulin-like protein [Oryza sativa (japonica
  misc_feature (8)..(140): Homolog of NCBI NO: 15240683 NR Description: MtN21 nodulin protein-like; protein id:
  misc_feature (8)..(140): Homolog of NCBI NO: 2598575 NR Description: MtN21 [Medicago truncatula]
  misc_feature (10)..(137): Homolog of NCBI NO: 30688451 NR Description: nodulin MtN21 family protein [Arabidopsis
  misc_feature (10)..(137): Homolog of NCBI NO: 7487973 NR Description: probable integral membrane protein nodulin
  misc_feature (10)..(140): Homolog of NCBI NO: 15228980 NR Description: nodulin-like protein; protein id: At3g56620.1,
  misc_feature (10)..(140): Homolog of NCBI NO: 21592817 NR Description: nodulin-like protein [Arabidopsis thaliana]
  misc_feature (13)..(136): Homolog of NCBI NO: 15219123 NR Description: nodulin-like protein; protein id: At1g21890.1,
  misc_feature (13)..(136): Homolog of NCBI NO: 17529004 NR Description: putative nodulin protein [Arabidopsis thaliana]
  misc_feature (13)..(136): Homolog of NCBI NO: 6552743 NR Description: T26F17.11 [Arabidopsis thaliana]
MGCCYGDFFDKAKPYLAMISLQFGYAGMNVITKVSLNHGMSHYVLVVYRHAFATVSIAPFALILERKVRPNMTWSVFLQIFVLALLGPVIDQNFYYAGLKFTGPTFACAMSNILPAMTFVMAVIFRMEKVDLKKMRCQGEGGRDAGDRGRRDDDDAVQGPADEDGVDQQRPRARRRRRRRGGRHRPQRQGVVPGLALRHRRHPRLGLALHPPGAHPEAVRGAALPHHPHLLRRHPTGHRRHLRHGAPPLRLDHRLRHEPPRRRIRRHCHVEHSVLRARPGDPEDRARVRVGVQPADDDHRGRHGLLHPRREDIPRRRPRRRPHRHRALLGALGQAQGDAGQGGR

SEQ ID NO: 8310 - protein, 327 aa, Zea mays subsp. mays
  peptide (1)..(327): Ceres Seq. ID no. 12356551
  misc_feature (6)..(123): Pfam Name: Integral membrane protein DUF6 Pfam Description: Integral membrane protein DUF6
  misc_feature (1)..(123): Homolog of NCBI NO: 34908998 NR Description: nodulin-like protein [Oryza sativa (japonica
  misc_feature (1)..(123): Homolog of NCBI NO: 15240683 NR Description: MtN21 nodulin protein-like; protein id:
  misc_feature (1)..(123): Homolog of NCBI NO: 2598575 NR Description: MtN21 [Medicago truncatula]
  misc_feature (1)..(120): Homolog of NCBI NO: 30688451 NR Description: nodulin MtN21 family protein [Arabidopsis
  misc_feature (1)..(120): Homolog of NCBI NO: 7487973 NR Description: probable integral membrane protein nodulin
  misc_feature (1)..(123): Homolog of NCBI NO: 15228980 NR Description: nodulin-like protein; protein id: At3g56620.1,
  misc_feature (1)..(123): Homolog of NCBI NO: 21592817 NR Description: nodulin-like protein [Arabidopsis thaliana]
  misc_feature (1)..(119): Homolog of NCBI NO: 15219123 NR Description: nodulin-like protein; protein id: At1g21890.1,
  misc_feature (1)..(119): Homolog of NCBI NO: 17529004 NR Description: putative nodulin protein [Arabidopsis thaliana]
  misc_feature (1)..(119): Homolog of NCBI NO: 6552743 NR Description: T26F17.11 [Arabidopsis thaliana]
MISLQFGYAGMNVITKVSLNHGMSHYVLVVYRHAFATVSIAPFALILERKVRPNMTWSVFLQIFVLALLGPVIDQNFYYAGLKFTGPTFACAMSNILPAMTFVMAVIFRMEKVDLKKMRCQGEGGRDAGDRGRRDDDDAVQGPADEDGVDQQRPRARRRRRRRGGRHRPQRQGVVPGLALRHRRHPRLGLALHPPGAHPEAVRGAALPHHPHLLRRHPTGHRRHLRHGAPPLRLDHRLRHEPPRRRIRRHCHVEHSVLRARPGDPEDRARVRVGVQPADDDHRGRHGLLHPRREDIPRRRPRRRPHRHRALLGALGQAQGDAGQGGR

SEQ ID NO: 8311 - DNA, 1422 bp, Zea mays subsp. mays
  misc_feature (1)..(1422): Ceres Seq. ID no. 12406840
  misc_feature: MA Experiment ID: 108544 Result: Up-regulated in Transcription
  misc_feature: MA Experiment ID: 20000534 Result: Down-regulated in Transcription
  misc_feature: MA Experiment 20000534 PARAMETER Experiment Name: Zm_Hybrid_Pollen_P Parameter: Age (day) Value: 8
  misc_feature: MA Experiment 20000534 PARAMETER Experiment Name: Zm_Hybrid_Pollen_P Parameter: Organism Value: Zea mays
  misc_feature: MA Experiment 20000534 PARAMETER Experiment Name: Zm_Hybrid_Pollen_P Parameter: Plant Line Value: 35A19
  misc_feature: MA Experiment 20000534 PARAMETER Experiment Name: Zm_Hybrid_Pollen_P Parameter: Tissue Value: Pollen vs. Aerial
tcagataccaccagaccagaccagatccgtcccgcgaatctaaggtcaaaccaaccgcgatccgcgaatccgcggagaggaggggaggggaggggaagggcgcgggggcatggagttcctgcagggccagaggctggagaccacgctggccgtcgcggccgccgtcgttgccgtcgcagccggctccgcctacctcttcctccgcagtaggaagcccaggggatgcctagaccccgagaacttcaaggagttcaaacttgttgagaagaggcagctgagtcataatgttgccaagttcaagtttgcgctcccaacacctacttctgtattgggtcttccaatcggacagcatataagctgcagaggacaggatgcttctggcgaggaagtgatcaagccttatactccaactactctggactctgatgttggatcttttgagcttgttataaagatgtatccccaaggaagaatgtctcatcatttccgtgagatgaaagttggtgattatatgtctgtgaagggacctaagggccgtttcaagtacctacctggacaagtgagagcattaggaatggtagctggaggatcaggcattactccaatgttccaagtcacaagggcaattcttgagaacccaaaggacaacacgaaagtacacttaatctatgcaaatgtcacgtatgaggatattcttctgaaggaagaacttgacggcatggccaaaaactatcctgatcgtttcaagatctactatgtcttgaatcagcctcctgaagtctgggacggtagcgtcgggttcgtgtcgaaggaaatgatccagactcattgcccagcgcctgccgccgacattcaggtattgcgatgtggacctcctcccatgaacaaagccatggccgcgcacctggacgaccttggctacacgaaggagatgcagttccagttctaagcgttacattctctctaccagtaccagaataaacgggggtggaacaagtttcgtcgcctctttgagcagacgaagcctgaccatatcgccatataggctccaaacagacgcggtttgccactgacagtcacagagcgtcgtacttaaggggtgtttggtttatagggactaaactttagtctctccactttattccattttagttcataaattattaaatagggaaacttaaatagagttttagtttctatatttagtaatttagggactaaaatggaataaaatagaggactaaaaattagtccctagaaaccaaacacccctttactctacctggatgaaagcagcagtacagtacccacctaatttgtatcggtgtcgggacattgtaccatgccgttcttttgtatcggtttgtcactcactcactccgcgagccagcagcccagcacacgatccatcgtgtcattttg

SEQ ID NO: 8312 - protein, 279 aa, Zea mays subsp. mays
  peptide (1)..(279): Ceres Seq. ID no. 12406841
  misc_feature (151)..(265): Pfam Name: Oxidoreductase NAD-binding domain Pfam Description: Oxidoreductase NAD-binding domain
  misc_feature (1)..(279): Homolog of NCBI NO: 17221690 NR Description: cytochrome b5 reductase isoform II [Zea mays]
  misc_feature (1)..(279): Homolog of NCBI NO: 4336205 NR Description: cytochrome b5 reductase [Zea mays]
  misc_feature (2)..(279): Homolog of NCBI NO: 15238025 NR Description: NADH-cytochrome b5 reductase; protein id: supported by cDNA: 17432., supported by cDNA: gi_4240115
  misc_feature (116)..(279): Homolog of NCBI NO: 16648905 NR Description: NADH-cytochrome b5 reductase [Arabidopsis
  misc_feature (15)..(273): Homolog of NCBI NO: 6070342 NR Description: NADH-cytochrome b5 reductase [Mortierella alpina]
  misc_feature (20)..(273): Homolog of NCBI NO: 40739560 NR Description: hypothetical protein AN6366.2 [Aspergillus
  misc_feature (120)..(279): Homolog of NCBI NO: 21312524 NR Description: RIKEN cDNA 1500005G05 [Mus musculus] unnamed protein product [Mus musculus]
  misc_feature (19)..(146): Homolog of NCBI NO: 21312524 NR Description: RIKEN cDNA 1500005G05 [Mus musculus] unnamed protein product [Mus musculus]
  misc_feature (120)..(279): Homolog of NCBI NO: 27712062 NR Description: similar to RIKEN cDNA 1500005G05 [Mus musculus]
  misc_feature (22)..(146): Homolog of NCBI NO: 27712062 NR Description: similar to RIKEN cDNA 1500005G05 [Mus musculus]
MEFLQGQRLETTLAVAAAVVAVAAGSAYLFLRSRKPRGCLDPENFKEFKLVEKRQLSHNVAKFKFALPTPTSVLGLPIGQHISCRGQDASGEEVIKPYTPTTLDSDVGSFELVIKMYPQGRMSHHFREMKVGDYMSVKGPKGRFKYLPGQVRALGMVAGGSGITPMFQVTRAILENPKDNTKVHLIYANVTYEDILLKEELDGMAKNYPDRFKIYYVLNQPPEVWDGSVGFVSKEMIQTHCPAPAADIQVLRCGPPPMNKAMAAHLDDLGYTKEMQFQF

SEQ ID NO: 8313 - protein, 164 aa, Zea mays subsp. mays
  peptide (1)..(164): Ceres Seq. ID no. 12406842
  misc_feature (36)..(150): Pfam Name: Oxidoreductase NAD-binding domain Pfam Description: Oxidoreductase NAD-binding domain
  misc_feature (1)..(164): Homolog of NCBI NO: 17221690 NR Description: cytochrome b5 reductase isoform II [Zea mays]
  misc_feature (1)..(164): Homolog of NCBI NO: 4336205 NR Description: cytochrome b5 reductase [Zea mays]
  misc_feature (1)..(164): Homolog of NCBI NO: 15238025 NR Description: NADH-cytochrome b5 reductase; protein id: supported by cDNA: 17432., supported by cDNA: gi_4240115
  misc_feature (1)..(164): Homolog of NCBI NO: 16648905 NR Description: NADH-cytochrome b5 reductase [Arabidopsis
  misc_feature (1)..(158): Homolog of NCBI NO: 6070342 NR Description: NADH-cytochrome b5 reductase [Mortierella alpina]
  misc_feature (1)..(158): Homolog of NCBI NO: 40739560 NR Description: hypothetical protein AN6366.2 [Aspergillus
  misc_feature (5)..(164): Homolog of NCBI NO: 21312524 NR Description: RIKEN cDNA 1500005G05 [Mus musculus] unnamed protein product [Mus musculus]
  misc_feature (1)..(31): Homolog of NCBI NO: 21312524 NR Description: RIKEN cDNA 1500005G05 [Mus musculus] unnamed protein product [Mus musculus]
  misc_feature (5)..(164): Homolog of NCBI NO: 27712062 NR Description: similar to RIKEN cDNA 1500005G05 [Mus musculus]
  misc_feature (1)..(31): Homolog of NCBI NO: 27712062 NR Description: similar to RIKEN cDNA 1500005G05 [Mus musculus]
MYPQGRMSHHFREMKVGDYMSVKGPKGRFKYLPGQVRALGMVAGGSGITPMFQVTRAILENPKDNTKVHLIYANVTYEDILLKEELDGMAKNYPDRFKIYYVLNQPPEVWDGSVGFVSKEMIQTHCPAPAADIQVLRCGPPPMNKAMAAHLDDLGYTKEMQFQF

SEQ ID NO: 8314 - protein, 158 aa, Zea mays subsp. mays
  peptide (1)..(158): Ceres Seq. ID no. 12406843
  misc_feature (30)..(144): Pfam Name: Oxidoreductase NAD-binding domain Pfam Description: Oxidoreductase NAD-binding domain
  misc_feature (1)..(158): Homolog of NCBI NO: 17221690 NR Description: cytochrome b5 reductase isoform II [Zea mays]
  misc_feature (1)..(158): Homolog of NCBI NO: 4336205 NR Description: cytochrome b5 reductase [Zea mays]
  misc_feature (1)..(158): Homolog of NCBI NO: 15238025 NR Description: NADH-cytochrome b5 reductase; protein id: supported by cDNA: 17432., supported by cDNA: gi_4240115
  misc_feature (1)..(158): Homolog of NCBI NO: 16648905 NR Description: NADH-cytochrome b5 reductase [Arabidopsis
  misc_feature (1)..(152): Homolog of NCBI NO: 6070342 NR Description: NADH-cytochrome b5 reductase [Mortierella alpina]
  misc_feature (1)..(152): Homolog of NCBI NO: 40739560 NR Description: hypothetical protein AN6366.2 [Aspergillus
  misc_feature (1)..(158): Homolog of NCBI NO: 21312524 NR Description: RIKEN cDNA 1500005G05 [Mus musculus] unnamed protein product [Mus musculus]
  misc_feature (1)..(25): Homolog of NCBI NO: 21312524 NR Description: RIKEN cDNA 1500005G05 [Mus musculus] unnamed protein product [Mus musculus]
  misc_feature (1)..(158): Homolog of NCBI NO: 27712062 NR Description: similar to RIKEN cDNA 1500005G05 [Mus musculus]
  misc_feature (1)..(25): Homolog of NCBI NO: 27712062 NR Description: similar to RIKEN cDNA 1500005G05 [Mus musculus]
MSHHFREMKVGDYMSVKGPKGRFKYLPGQVRALGMVAGGSGITPMFQVTRAILENPKDNTKVHLIYANVTYEDILLKEELDGMAKNYPDRFKIYYVLNQPPEVWDGSVGFVSKEMIQTHCPAPAADIQVLRCGPPPMNKAMAAHLDDLGYTKEMQFQF

SEQ ID NO: 8315 - DNA, 1391 bp, Zea mays subsp. mays
  misc_feature (1)..(1391): Ceres Seq. ID no. 12405442
  misc_feature: MA Experiment ID: 20000480 Result: Down-regulated in Transcription
  misc_feature: MA Experiment 20000480 PARAMETER Experiment Name: Zm_Drought_P Parameter: Age (day) Value: 11
  misc_feature: MA Experiment 20000480 PARAMETER Experiment Name: Zm_Drought_P Parameter: Organism Value: Zea mays
  misc_feature: MA Experiment 20000480 PARAMETER Experiment Name: Zm_Drought_P Parameter: Plant Line Value: 35A19
  misc_feature: MA Experiment 20000480 PARAMETER Experiment Name: Zm_Drought_P Parameter: Timepoint (hr) Value: 72
  misc_feature: MA Experiment 20000480 PARAMETER Experiment Name: Zm_Drought_P Parameter: Tissue Value: Aerial
  misc_feature: MA Experiment 20000480 PARAMETER Experiment Name: Zm_Drought_P Parameter: Treatment Value: Drought vs. No Drought
attgctaccactgccacttctcccgatcgattcgtcgctgaggaatacctggtcaccacctgcgggctcaccccagcgcaagcgggcagggcgtccaaggggctcacccacctcaagtctccggttaagcccgacgccgtcgtcgcctttctcgtgggcgtcggtctcgccaaagacgacatcaccgccggtatcgccaggtacccgcggctcctctgctccaaggtggacaaaaccctaacccctcgcttcgctcagctcatgagccttgggctatccccttcccaaatctcccgcctcattaccatcgtccccaacatcttcgtcgctcccaaaaagatctcccacctccagttctatctctccttcatgggttgcttcgatcgggttcactccgccatcaggatcaatccaatgctcctcagtcggaaccttgaggatgtggtcaagcctaacatagcattcctactgcagtgcggtctaactgtttctaatgttctagagttcccattgctgataggcatgaggcccgagagtgtcagggaaagggtggcatgcgctgagaagcttggtgtgccgcgcaatacagggatgttcaagagtgccctgtgggccgtctattgcgttggtcccaactccattggtgcaaaattggatgtcatcaaggcgactcttggatgctctgaggcggagctgacccttgtggtgcgcaagtcacctccaattctgaggatgtcagaaggcaagctgagtcgcgcattgaagttcctgaaggtggatgttgggttgaagcttcagtacatcttgcttaggccagcaatacttgcctttagcatgcagaggcggctgatgcccagacattatttcatcaagattctgaaggcgaaggggcttgtgaaggaaaatgttgacttttataatgctctttgtttaactgaaaagagatttgcccagaagtttattgatccttacaaccagagtattgcagggcttgcagatgcttatgctgctgcttgtgctgggaaaatgcctcatgaagattaggcgcattagcagcagcatgctagggatcatggtgaagcaaaggcagagatagtcggttcaggtcttctctgcatgtacttgaacagcccctcgccaaactattgtgcagttccttgatgcataccaatgcttgcaacagatgctgcctttgtgtgttgaaatgaaattagttcttccttaagaccggtgttgtgacctatcatttcaggtaagccattggctattttcagatgggtataatgatatgttactctgttctttctgtgtttcaggtctaaatattgtctgtacttgaagtcttgaattaattatgtattgaacttgtcacacagttaattatttgattt

SEQ ID NO: 8316 - protein, 347 aa, Zea mays subsp. mays
  peptide (1)..(347): Ceres Seq. ID no. 12405443
  misc_feature (48)..(318): Pfam Name: mTERF Pfam Description: mTERF
  misc_feature (2)..(321): Homolog of NCBI NO: 39545750 NR Description: OSJNBb0034I13.16 [Oryza sativa (japonica
  misc_feature (16)..(335): Homolog of NCBI NO: 18415647 NR Description: expressed protein; protein id: At5g07900.1, by cDNA: 22350., supported by cDNA: gi_13878064, supported by gi_17104654 [Arabidopsis thaliana] >gi|11281400|pir||T45615
  misc_feature (37)..(339): Homolog of NCBI NO: 15238313 NR Description: putative protein; protein id: At5g64950.1, by cDNA: 142672. [Arabidopsis thaliana] emb|CAB62602.1~gene_id:MXK3.18~similar to unknown protein
  misc_feature (37)..(339): Homolog of NCBI NO: 21553423 NR Description: unknown [Arabidopsis thaliana]
  misc_feature (2)..(344): Homolog of NCBI NO: 34394750 NR Description: unknown protein [Oryza sativa (japonica
  misc_feature (16)..(337): Homolog of NCBI NO: 15218140 NR Description: hypothetical protein; protein id: At1g21150.1
  misc_feature (16)..(337): Homolog of NCBI NO: 25511650 NR Description: T22I11.2 protein - Arabidopsis thaliana
  misc_feature (16)..(281): Homolog of NCBI NO: 15220660 NR Description: hypothetical protein; protein id: At1g61960.1
  misc_feature (16)..(281): Homolog of NCBI NO: 26450011 NR Description: unknown protein [Arabidopsis thaliana]
  misc_feature (16)..(283): Homolog of NCBI NO: 15232683 NR Description: putative protein; protein id: At3g46950.1, by cDNA: gi_15028090 [Arabidopsis thaliana]
IATTATSPDRFVAEEYLVTTCGLTPAQAGRASKGLTHLKSPVKPDAVVAFLVGVGLAKDDITAGIARYPRLLCSKVDKTLTPRFAQLMSLGLSPSQISRLITIVPNIFVAPKKISHLQFYLSFMGCFDRVHSAIRINPMLLSRNLEDVVKPNIAFLLQCGLTVSNVLEFPLLIGMRPESVRERVACAEKLGVPRNTGMFKSALWAVYCVGPNSIGAKLDVIKATLGCSEAELTLVVRKSPPILRMSEGKLSRALKFLKVDVGLKLQYILLRPAILAFSMQRRLMPRHYFIKILKAKGLVKENVDFYNALCLTEKRFAQKFIDPYNQSIAGLADAYAAACAGKMPHED

SEQ ID NO: 8317 - protein, 260 aa, Zea mays subsp. mays
  peptide (1)..(260): Ceres Seq. ID no. 12405444
  misc_feature (1)..(231): Pfam Name: mTERF Pfam Description: mTERF
  misc_feature (1)..(234): Homolog of NCBI NO: 39545750 NR Description: OSJNBb0034I13.16 [Oryza sativa (japonica
  misc_feature (1)..(248): Homolog of NCBI NO: 18415647 NR Description: expressed protein; protein id: At5g07900.1, by cDNA: 22350., supported by cDNA: gi_13878064, supported by gi_17104654 [Arabidopsis thaliana] >gi|11281400|pir||T45615
  misc_feature (1)..(252): Homolog of NCBI NO: 15238313 NR Description: putative protein; protein id: At5g64950.1, by cDNA: 142672. [Arabidopsis thaliana] emb|CAB62602.1~gene_id:MXK3.18~similar to unknown protein
  misc_feature (1)..(252): Homolog of NCBI NO: 21553423 NR Description: unknown [Arabidopsis thaliana]
  misc_feature (1)..(257): Homolog of NCBI NO: 34394750 NR Description: unknown protein [Oryza sativa (japonica
  misc_feature (1)..(250): Homolog of NCBI NO: 15218140 NR Description: hypothetical protein; protein id: At1g21150.1
  misc_feature (1)..(250): Homolog of NCBI NO: 25511650 NR Description: T22I11.2 protein - Arabidopsis thaliana
  misc_feature (1)..(194): Homolog of NCBI NO: 15220660 NR Description: hypothetical protein; protein id: At1g61960.1
  misc_feature (1)..(194): Homolog of NCBI NO: 26450011 NR Description: unknown protein [Arabidopsis thaliana]
  misc_feature (1)..(196): Homolog of NCBI NO: 15232683 NR Description: putative protein; protein id: At3g46950.1, by cDNA: gi_15028090 [Arabidopsis thaliana]
MSLGLSPSQISRLITIVPNIFVAPKKISHLQFYLSFMGCFDRVHSAIRINPMLLSRNLEDVVKPNIAFLLQCGLTVSNVLEFPLLIGMRPESVRERVACAEKLGVPRNTGMFKSALWAVYCVGPNSIGAKLDVIKATLGCSEAELTLVVRKSPPILRMSEGKLSRALKFLKVDVGLKLQYILLRPAILAFSMQRRLMPRHYFIKILKAKGLVKENVDFYNALCLTEKRFAQKFIDPYNQSIAGLADAYAAACAGKMPHED

SEQ ID NO: 8318 - protein, 224 aa, Zea mays subsp. mays
  peptide (1)..(224): Ceres Seq. ID no. 12405445
  misc_feature (1)..(195): Pfam Name: mTERF Pfam Description: mTERF
  misc_feature (1)..(216): Homolog of NCBI NO: 15238313 NR Description: putative protein; protein id: At5g64950.1, by cDNA: 142672. [Arabidopsis thaliana] emb|CAB62602.1~gene_id:MXK3.18~similar to unknown protein
  misc_feature (1)..(216): Homolog of NCBI NO: 21553423 NR Description: unknown [Arabidopsis thaliana]
  misc_feature (1)..(221): Homolog of NCBI NO: 34394750 NR Description: unknown protein [Oryza sativa (japonica
  misc_feature (1)..(214): Homolog of NCBI NO: 15218140 NR Description: hypothetical protein; protein id: At1g21150.1
  misc_feature (1)..(198): Homolog of NCBI NO: 39545750 NR Description: OSJNBb0034I13.16 [Oryza sativa (japonica
  misc_feature (1)..(212): Homolog of NCBI NO: 18415647 NR Description: expressed protein; protein id: At5g07900.1, by cDNA: 22350., supported by cDNA: gi_13878064, supported by gi_17104654 [Arabidopsis thaliana] >gi|11281400|pir||T45615
  misc_feature (1)..(214): Homolog of NCBI NO: 25511650 NR Description: T22I11.2 protein - Arabidopsis thaliana
  misc_feature (1)..(158): Homolog of NCBI NO: 15220660 NR Description: hypothetical protein; protein id: At1g61960.1
  misc_feature (1)..(158): Homolog of NCBI NO: 26450011 NR Description: unknown protein [Arabidopsis thaliana]
  misc_feature (1)..(160): Homolog of NCBI NO: 15232683 NR Description: putative protein; protein id: At3g46950.1, by cDNA: gi_15028090 [Arabidopsis thaliana]
MGCFDRVHSAIRINPMLLSRNLEDVVKPNIAFLLQCGLTVSNVLEFPLLIGMRPESVRERVACAEKLGVPRNTGMFKSALWAVYCVGPNSIGAKLDVIKATLGCSEAELTLVVRKSPPILRMSEGKLSRALKFLKVDVGLKLQYILLRPAILAFSMQRRLMPRHYFIKILKAKGLVKENVDFYNALCLTEKRFAQKFIDPYNQSIAGLADAYAAACAGKMPHED

SEQ ID NO: 8319 - DNA, 1606 bp, Zea mays subsp. mays
  misc_feature (1)..(1606): Ceres Seq. ID no. 12406836
  misc_feature: MA Experiment ID: 108534 Result: Down-regulated in Transcription
  misc_feature: MA Experiment 108534 PARAMETER Experiment Name: Zm_4deg_Cold_P Parameter: Age (hr) Value: 8
  misc_feature: MA Experiment 108534 PARAMETER Experiment Name: Zm_4deg_Cold_P Parameter: Organism Value: Zea mays
  misc_feature: MA Experiment 108534 PARAMETER Experiment Name: Zm_4deg_Cold_P Parameter: Plant Line Value: 35A19
  misc_feature: MA Experiment 108534 PARAMETER Experiment Name: Zm_4deg_Cold_P Parameter: Temperature (deg C) Value: 4 vs. 22
  misc_feature: MA Experiment 108534 PARAMETER Experiment Name: Zm_4deg_Cold_P Parameter: Timepoint (hr) Value: 6
  misc_feature: MA Experiment 108534 PARAMETER Experiment Name: Zm_4deg_Cold_P Parameter: Tissue Value: Aerial
  misc_feature: MA Experiment ID: 108687 Result: Up-regulated in Transcription
  misc_feature: MA Experiment 108687 PARAMETER Experiment Name: Zm_Embryos-Flowers__P Parameter: Tissue Value: Embryo vs. Aerial+
  misc_feature: MA Experiment ID: 108689 Result: Up-regulated in Transcription
  misc_feature: MA Experiment 108689 PARAMETER Experiment Name: Zm_Drought_Roots_P Parameter: Age (day) Value: 9
  misc_feature: MA Experiment 108689 PARAMETER Experiment Name: Zm_Drought_Roots_P Parameter: Organism Value: Zea mays
  misc_feature: MA Experiment 108689 PARAMETER Experiment Name: Zm_Drought_Roots_P Parameter: Plant Line Value: 35A19
  misc_feature: MA Experiment 108689 PARAMETER Experiment Name: Zm_Drought_Roots_P Parameter: Timepoint (hr) Value: 24
  misc_feature: MA Experiment 108689 PARAMETER Experiment Name: Zm_Drought_Roots_P Parameter: Tissue Value: Roots
  misc_feature: MA Experiment 108689 PARAMETER Experiment Name: Zm_Drought_Roots_P Parameter: Treatment Value: Drought vs. No Drought
atccagctagctgctcacgcccgccacgcctctctttgtctctttcacccagtgacagcgcacagctcccaacctgctcgaagctcggctcagccgatccagtgcgccatggccggccgcgaggcaggcgactgcggcggagaggagccggcccgcgagatccccgacgacatcacgggcgagatcctgctccgcctgccgtcgcgctcggcgctggcgcgcgccgcggtggcgagctgcgccttccacgcgctcgtcgcctccccgcgcttcctccgccgccaccgctcgctgcatagggatcccggatcgctcctcggggtcttcaccttccctctcgtccccgacggcggcagaggtggaggcgacggctcggggcttccaccccaccgagcccccgcacccggcggcgtccaccgccagcgccgtcgccgctgcggccgacttctcgtttgggttcctcccagcggacccctccgccacggctgggtctgaggctgccgagtggatggtccgggactaccgcgacggccgcttcctcctcgaccgcgtgccttcgggaaccgggagcaccgtcttcaccgagctcgccgtctgcgacccgctgtcccgacgctacgtcctgctcccgcccattccggaggacctcgccgacaccgtccacagcgtgctcaccgtcttcggcggccgccgcgcgtgcgagcccttcctcgcgcccgccgagacctgcggcgcggacgacgtcgacgcggacccacctctcaccgtgttctggacggcccgctccccgaggaagatggtggccttcgccttctcgtcgcgcgacggacgatggcgtgcgctcgagtcgccgaactgcttcatctggcgcaggcaccgctccccgttcagctgccccatggcccccatcagcaccgtctggaaccgccgccactacgcgcacggctgcttctactgggtggactgcctcaccagccgctggctcgtgctcgacgggcgcaccatggagctctccctcgcgatgatcccgtcgccggccggctactgggaggagcacgtcgcagtcgtggaggccccggacgggaagcttggcgtattcgcgcacggtttccaccaccccgacggcaaagccaatctacactactatacgatcgtgcacgacaaggaagccgccggcgacacgaagcggtggcagctggagaagacgatccagctgccgtggccgtcagaccaccggtctttctgcctccggggcacggccaacgggtgcctcaacgttggcctcatcattgaagtcggcgagaagaagtcggtattcatgggaagccaccgcatcagggacgccgagctattcaagatcgacgtcaagagtttccagctccaaaagatctgccgagcacggtgcgccggcagtgctgccggcgagtgctgctggccatacttcggcttcccgccgtcgctgtccttgcccactgtgtgagaagcttgatgttactgagacaaaatgaattatgttacagcttcagagccgtccgtctgtatgtaacatgtataagcaacacttgtactcgtccagtttgtttacaaatgcaacgcatacatacat

SEQ ID NO: 8320 - protein, 323 aa, Zea mays subsp. mays
  peptide (1)..(323): Ceres Seq. ID no. 12406837
  misc_feature (1)..(323): Homolog of NCBI NO: 32480316 NR Description: OSJNBa0042D13.1 [Oryza sativa (japonica
  misc_feature (1)..(292): Homolog of NCBI NO: 34393351 NR Description: hypothetical protein [Oryza sativa (japonica
  misc_feature (1)..(237): Homolog of NCBI NO: 34393354 NR Description: hypothetical protein [Oryza sativa (japonica
  misc_feature (1)..(198): Homolog of NCBI NO: 34393352 NR Description: hypothetical protein [Oryza sativa (japonica
  misc_feature (1)..(203): Homolog of NCBI NO: 37530886 NR Description: hypothetical protein [Oryza sativa (japonica group)] >gi|15528857|gb|AAL01182.1| Hypothetical protein [Oryza >gi|31430068|gb|AAP52032.1| hypothetical protein [Oryza sativa
  misc_feature (1)..(117): Homolog of NCBI NO: 37530888 NR Description: hypothetical protein [Oryza sativa (japonica group)] >gi|18640637|gb|AAL76116.1| Hypothetical protein [Oryza >gi|18642696|gb|AAL76188.1| Hypothetical protein [Oryza sativa]
MVRDYRDGRFLLDRVPSGTGSTVFTELAVCDPLSRRYVLLPPIPEDLADTVHSVLTVFGGRRACEPFLAPAETCGADDVDADPPLTVFWTARSPRKMVAFAFSSRDGRWRALESPNCFIWRRHRSPFSCPMAPISTVWNRRHYAHGCFYWVDCLTSRWLVLDGRTMELSLAMIPSPAGYWEEHVAVVEAPDGKLGVFAHGFHHPDGKANLHYYTIVHDKEAAGDTKRWQLEKTIQLPWPSDHRSFCLRGTANGCLNVGLIIEVGEKKSVFMGSHRIRDAELFKIDVKSFQLQKICRARCAGSAAGECCWPYFGFPPSLSLPTV

SEQ ID NO: 8321 - protein, 227 aa, Zea mays subsp. mays
  peptide (1)..(227): Ceres Seq. ID no. 12406838
  misc_feature (1)..(227): Homolog of NCBI NO: 32480316 NR Description: OSJNBa0042D13.1 [Oryza sativa (japonica
  misc_feature (1)..(196): Homolog of NCBI NO: 34393351 NR Description: hypothetical protein [Oryza sativa (japonica
  misc_feature (1)..(141): Homolog of NCBI NO: 34393354 NR Description: hypothetical protein [Oryza sativa (japonica
  misc_feature (1)..(102): Homolog of NCBI NO: 34393352 NR Description: hypothetical protein [Oryza sativa (japonica
  misc_feature (1)..(107): Homolog of NCBI NO: 37530886 NR Description: hypothetical protein [Oryza sativa (japonica group)] >gi|15528857|gb|AAL01182.1| Hypothetical protein [Oryza >gi|31430068|gb|AAP52032.1| hypothetical protein [Oryza sativa
  misc_feature (1)..(21): Homolog of NCBI NO: 37530888 NR Description: hypothetical protein [Oryza sativa (japonica group)] >gi|18640637|gb|AAL76116.1| Hypothetical protein [Oryza >gi|18642696|gb|AAL76188.1| Hypothetical protein [Oryza sativa]
MVAFAFSSRDGRWRALESPNCFIWRRHRSPFSCPMAPISTVWNRRHYAHGCFYWVDCLTSRWLVLDGRTMELSLAMIPSPAGYWEEHVAVVEAPDGKLGVFAHGFHHPDGKANLHYYTIVHDKEAAGDTKRWQLEKTIQLPWPSDHRSFCLRGTANGCLNVGLIIEVGEKKSVFMGSHRIRDAELFKIDVKSFQLQKICRARCAGSAAGECCWPYFGFPPSLSLPTV

SEQ ID NO: 8322 - protein, 193 aa, Zea mays subsp. mays
  peptide (1)..(193): Ceres Seq. ID no. 12406839
  misc_feature (1)..(193): Homolog of NCBI NO: 32480316 NR Description: OSJNBa0042D13.1 [Oryza sativa (japonica
  misc_feature (1)..(162): Homolog of NCBI NO: 34393351 NR Description: hypothetical protein [Oryza sativa (japonica
  misc_feature (1)..(107): Homolog of NCBI NO: 34393354 NR Description: hypothetical protein [Oryza sativa (japonica
  misc_feature (1)..(68): Homolog of NCBI NO: 34393352 NR Description: hypothetical protein [Oryza sativa (japonica
  misc_feature (1)..(73): Homolog of NCBI NO: 37530886 NR Description: hypothetical protein [Oryza sativa (japonica group)] >gi|15528857|gb|AAL01182.1| Hypothetical protein [Oryza >gi|31430068|gb|AAP52032.1| hypothetical protein [Oryza sativa
MAPISTVWNRRHYAHGCFYWVDCLTSRWLVLDGRTMELSLAMIPSPAGYWEEHVAVVEAPDGKLGVFAHGFHHPDGKANLHYYTIVHDKEAAGDTKRWQLEKTIQLPWPSDHRSFCLRGTANGCLNVGLIIEVGEKKSVFMGSHRIRDAELFKIDVKSFQLQKICRARCAGSAAGECCWPYFGFPPSLSLPTV

SEQ ID NO: 8323 - DNA, 1475 bp, Zea mays subsp. mays
  misc_feature (1)..(1475): Ceres Seq. ID no. 12425146
  misc_feature: MA Experiment ID: 108504 Result: Down-regulated in Transcription
  misc_feature: MA Experiment 108504 PARAMETER Experiment Name: Zm_Drought_P Parameter: Age (day) Value: 8
  misc_feature: MA Experiment 108504 PARAMETER Experiment Name: Zm_Drought_P Parameter: Organism Value: Zea mays
  misc_feature: MA Experiment 108504 PARAMETER Experiment Name: Zm_Drought_P Parameter: Plant Line Value: 35A19
  misc_feature: MA Experiment 108504 PARAMETER Experiment Name: Zm_Drought_P Parameter: Timepoint (hr) Value: 12
  misc_feature: MA Experiment 108504 PARAMETER Experiment Name: Zm_Drought_P Parameter: Tissue Value: Aerial
  misc_feature: MA Experiment 108504 PARAMETER Experiment Name: Zm_Drought_P Parameter: Treatment Value: Drought vs. No Drought
  misc_feature: MA Experiment ID: 108535 Result: Up-regulated in Transcription
  misc_feature: MA Experiment 108535 PARAMETER Experiment Name: Zm_Meristem_P Parameter: Age (day) Value: 8
  misc_feature: MA Experiment 108535 PARAMETER Experiment Name: Zm_Meristem_P Parameter: Organism Value: Zea mays
  misc_feature: MA Experiment 108535 PARAMETER Experiment Name: Zm_Meristem_P Parameter: Plant Line Value: 35A19
  misc_feature: MA Experiment 108535 PARAMETER Experiment Name: Zm_Meristem_P Parameter: Tissue Value: Root Meristem vs. Above Root Meristem
  misc_feature: MA Experiment ID: 108543 Result: Up-regulated in Transcription
  misc_feature: MA Experiment ID: 108544 Result: Down-regulated in Transcription
  misc_feature: MA Experiment ID: 108546 Result: Down-regulated in Transcription
  misc_feature: MA Experiment 108546 PARAMETER Experiment Name: Zm_Imbibed_Seeds_P Parameter: Age (day) Value: 3 vs. 2
  misc_feature: MA Experiment 108546 PARAMETER Experiment Name: Zm_Imbibed_Seeds_P Parameter: Organism Value: Zea mays
  misc_feature: MA Experiment 108546 PARAMETER Experiment Name: Zm_Imbibed_Seeds_P Parameter: Plant Line Value: 35A19
  misc_feature: MA Experiment 108546 PARAMETER Experiment Name: Zm_Imbibed_Seeds_P Parameter: Tissue Value: Roots vs. Embryo
  misc_feature: MA Experiment ID: 108556 Result: Down-regulated in Transcription
  misc_feature: MA Experiment 108556 PARAMETER Experiment Name: Zm_Drought_P Parameter: Age (day) Value: 9
  misc_feature: MA Experiment 108556 PARAMETER Experiment Name: Zm_Drought_P Parameter: Organism Value: Zea mays
  misc_feature: MA Experiment 108556 PARAMETER Experiment Name: Zm_Drought_P Parameter: Plant Line Value: 35A19
  misc_feature: MA Experiment 108556 PARAMETER Experiment Name: Zm_Drought_P Parameter: Timepoint (hr) Value: 24
  misc_feature: MA Experiment 108556 PARAMETER Experiment Name: Zm_Drought_P Parameter: Tissue Value: Aerial
  misc_feature: MA Experiment 108556 PARAMETER Experiment Name: Zm_Drought_P Parameter: Treatment Value: Drought vs. No Drought
  misc_feature: MA Experiment ID: 108559 Result: Down-regulated in Transcription
  misc_feature: MA Experiment 108559 PARAMETER Experiment Name: Zm_5mM_NO_P Parameter: Age (day) Value: 8
  misc_feature: MA Experiment 108559 PARAMETER Experiment Name: Zm_5mM_NO_P Parameter: Organism Value: Zea mays
  misc_feature: MA Experiment 108559 PARAMETER Experiment Name: Zm_5mM_NO_P Parameter: Plant Line Value: 35A19
  misc_feature: MA Experiment 108559 PARAMETER Experiment Name: Zm_5mM_NO_P Parameter: Timepoint (hr) Value: 12
  misc_feature: MA Experiment 108559 PARAMETER Experiment Name: Zm_5mM_NO_P Parameter: Tissue Value: Aerial
  misc_feature: MA Experiment 108559 PARAMETER Experiment Name: Zm_5mM_NO_P Parameter: Treatment Value: 5mM NO vs. No Treatment
  misc_feature: MA Experiment ID: 108597 Result: Down-regulated in Transcription
  misc_feature: MA Experiment 108597 PARAMETER Experiment Name: Zm_100uM_ABA_P Parameter: Age (day) Value: 9
  misc_feature: MA Experiment 108597 PARAMETER Experiment Name: Zm_100uM_ABA_P Parameter: Organism Value: Zea mays
  misc_feature: MA Experiment 108597 PARAMETER Experiment Name: Zm_100uM_ABA_P Parameter: Plant Line Value: 35A19
  misc_feature: MA Experiment 108597 PARAMETER Experiment Name: Zm_100uM_ABA_P Parameter: Timepoint (hr) Value: 24
  misc_feature: MA Experiment 108597 PARAMETER Experiment Name: Zm_100uM_ABA_P Parameter: Tissue Value: Aerial
  misc_feature: MA Experiment 108597 PARAMETER Experiment Name: Zm_100uM_ABA_P Parameter: Treatment Value: 100uM ABA vs. No Treatment
  misc_feature: MA Experiment ID: 108689 Result: Down-regulated in Transcription
  misc_feature: MA Experiment 108689 PARAMETER Experiment Name: Zm_Drought_Roots_P Parameter: Age (day) Value: 9
  misc_feature: MA Experiment 108689 PARAMETER Experiment Name: Zm_Drought_Roots_P Parameter: Organism Value: Zea mays
  misc_feature: MA Experiment 108689 PARAMETER Experiment Name: Zm_Drought_Roots_P Parameter: Plant Line Value: 35A19
  misc_feature: MA Experiment 108689 PARAMETER Experiment Name: Zm_Drought_Roots_P Parameter: Timepoint (hr) Value: 24
  misc_feature: MA Experiment 108689 PARAMETER Experiment Name: Zm_Drought_Roots_P Parameter: Tissue Value: Roots
  misc_feature: MA Experiment 108689 PARAMETER Experiment Name: Zm_Drought_Roots_P Parameter: Treatment Value: Drought vs. No Drought
  misc_feature: MA Experiment ID: 20000487 Result: Down-regulated in Transcription
  misc_feature: MA Experiment 20000487 PARAMETER Experiment Name: Zm_50mM_NH4NO3_L_to_H_P Parameter: Organism Value: Zea mays
  misc_feature: MA Experiment 20000487 PARAMETER Experiment Name: Zm_50mM_NH4NO3_L_to_H_P Parameter: Timepoint (hr) Value: 4
  misc_feature: MA Experiment 20000487 PARAMETER Experiment Name: Zm_50mM_NH4NO3_L_to_H_P Parameter: Tissue Value: Leaves
  misc_feature: MA Experiment 20000487 PARAMETER Experiment Name: Zm_50mM_NH4NO3_L_to_H_P Parameter: Treatment Value: 50mM NH4NO3 vs. 100mM Mannitol
  misc_feature: MA Experiment ID: 20000532 Result: Down-regulated in Transcription
  misc_feature: MA Experiment 20000532 PARAMETER Experiment Name: Zm_0.001percent_MeJA_P Parameter: Age (day) Value: 10
  misc_feature: MA Experiment 20000532 PARAMETER Experiment Name: Zm_0.001percent_MeJA_P Parameter: Organism Value: Zea mays
  misc_feature: MA Experiment 20000532 PARAMETER Experiment Name: Zm_0.001percent_MeJA_P Parameter: Plant Line Value: 35A19
  misc_feature: MA Experiment 20000532 PARAMETER Experiment Name: Zm_0.001percent_MeJA_P Parameter: Timepoint (hr) Value: 48
  misc_feature: MA Experiment 20000532 PARAMETER Experiment Name: Zm_0.001percent_MeJA_P Parameter: Tissue Value: Aerial
  misc_feature: MA Experiment 20000532 PARAMETER Experiment Name: Zm_0.001percent_MeJA_P Parameter: Treatment Value: 0.001percent MeJA vs. No Treatment
  misc_feature: MA Experiment ID: 20000533 Result: Down-regulated in Transcription
  misc_feature: MA Experiment 20000533 PARAMETER Experiment Name: Zm_0.001percent_MeJA_P Parameter: Age (day) Value: 11
  misc_feature: MA Experiment 20000533 PARAMETER Experiment Name: Zm_0.001percent_MeJA_P Parameter: Organism Value: Zea mays
  misc_feature: MA Experiment 20000533 PARAMETER Experiment Name: Zm_0.001percent_MeJA_P Parameter: Plant Line Value: 35A19
  misc_feature: MA Experiment 20000533 PARAMETER Experiment Name: Zm_0.001percent_MeJA_P Parameter: Timepoint (hr) Value: 72
  misc_feature: MA Experiment 20000533 PARAMETER Experiment Name: Zm_0.001percent_MeJA_P Parameter: Tissue Value: Aerial
  misc_feature: MA Experiment 20000533 PARAMETER Experiment Name: Zm_0.001percent_MeJA_P Parameter: Treatment Value: 0.001percent MeJA vs. No Treatment
  misc_feature: MA Experiment ID: 20000632 Result: Down-regulated in Transcription
  misc_feature: MA Experiment 20000632 PARAMETER Experiment Name: Zm_Herbicide-Treatments_P Parameter: Timepoint (hr) Value: 4
  misc_feature: MA Experiment 20000632 PARAMETER Experiment Name: Zm_Herbicide-Treatments_P Parameter: Tissue Value: Aerial
  misc_feature: MA Experiment 20000632 PARAMETER Experiment Name: Zm_Herbicide-Treatments_P Parameter: Treatment Value: Glean vs. No Treatment
  misc_feature: MA Experiment ID: 20000633 Result: Down-regulated in Transcription
  misc_feature: MA Experiment 20000633 PARAMETER Experiment Name: Zm_Herbicide-Treatments_P Parameter: Timepoint (hr) Value: 4
  misc_feature: MA Experiment 20000633 PARAMETER Experiment Name: Zm_Herbicide-Treatments_P Parameter: Tissue Value: Aerial
  misc_feature: MA Experiment 20000633 PARAMETER Experiment Name: Zm_Herbicide-Treatments_P Parameter: Treatment Value: Trimec vs. No Treatment
  misc_feature: MA Experiment ID: 20001614 Result: Up-regulated in Transcription
  misc_feature: MA Experiment 20001614 PARAMETER Experiment Name: Zm_50ppm_KNO3_L-to-H_P Parameter: Age (day) Value: 21
  misc_feature: MA Experiment 20001614 PARAMETER Experiment Name: Zm_50ppm_KNO3_L-to-H_P Parameter: Organism Value: Zea mays
  misc_feature: MA Experiment 20001614 PARAMETER Experiment Name: Zm_50ppm_KNO3_L-to-H_P Parameter: Plant Line Value: 35A19
  misc_feature: MA Experiment 20001614 PARAMETER Experiment Name: Zm_50ppm_KNO3_L-to-H_P Parameter: Timepoint (hr) Value: 48
  misc_feature: MA Experiment 20001614 PARAMETER Experiment Name: Zm_50ppm_KNO3_L-to-H_P Parameter: Tissue Value: Roots
  misc_feature: MA Experiment 20001614 PARAMETER Experiment Name: Zm_50ppm_KNO3_L-to-H_P Parameter: Treatment Value: 50ppm KNO3 vs. 50ppm KCl
acactgccccactctcctctacctccgcgccaatgcgcctccccaacatttaaacggccaaaccagcccaaaccccaaccccaaacccacagcagtaacaggggcacactagctaagctaaacctcgccacggcacagcaatggcgccgctccccgcttccctcctgccctgcctctggctcttcctctgcctcctcgccgcgccgtgccccacagcgcgggcggcgcggttcgcgtgcaacgccacggcgccgcgagcgtccacgtgccaggcgctcgtctcctacgcgccgcccaacgggacggncacgcccacgctggccgccgtgcgcgcgctcttccagctccgctcccaccgcgcgctgctggccgccaacggcctcccgctctccacgccgcccacggcgcccgcgcccgtgccgctgctgggtccgcctgccctgcctctgctcggggggcgccggggccacgttccagcggcccacgtaccgggtccgcgccggggacacgctcgacgccgtcgcgcggggcgtcttcgcgggcctcgtcacctaccaggacatcgccgccgccaacaacgtctccgaccccaacagggtcgccgtcggccagcagctctggatccccgtgccctgcagctgcgaccccgtgggcggccaacccgtcgtgcacttcacctacgtcgtgccggccgggggctccgtgtccggcatcgcggaggagttcggcaccacggaggagacgattctcacgctgaacaagatgcccgacgccaagtcccttctcgccggccaggttcttgacgtgccacttcgagcttgtagttctgccattagcagcacagccattgaccgcaaccttctcgtgccaaatggaagctacatcctcaccgccaacaactgcgtcaagtgtggctgcagctctagcacctggcagttggactgccagccaacacagggactgagctcgtcgttctgccctgcggccaagtgcggagacatgttcctcggcaacacatcctcctccacctcatcctgcgagagcacagcatgctcctacgccgggtacaccaacagcacatcgttcgccatcctcgccaatgtgaccaccagcaacgtgtgtaacgctgggatgactccgacggcgcagccggctcactcttcggcgtttcggttggagccggtgtggctgagatggacggagctggttgccttgtctctcttcacgctgtctttcttcgtctaggctatctgcggcaaaggctgaacgttgttgccatgcgtctgtcgttagaatctggccctctgattcctagtttgatgttgtgagtaatatctgcagtgtttgcgcgacttcgatctgtaactggttggatttgtaagggcaaactctagggtaacactgatctgtgttagacggtaaatcaggaaacatttgtacttcgtcaaacttttgcaaagataatttcttctgtt

SEQ ID NO: 8324 - protein, 414 aa, Zea mays subsp. mays
  peptide (1)..(414): Ceres Seq. ID no. 12425147
  misc_feature (163)..(209): Pfam Name: LysM domain Pfam Description: LysM domain
  misc_feature (144)..(380): Homolog of NCBI NO: 28207683 NR Description: Erwinia induced protein 1 [Solanum tuberosum]
  misc_feature (144)..(387): Homolog of NCBI NO: 22758281 NR Description: Unknown protein [Oryza sativa (japonica
  misc_feature (133)..(388): Homolog of NCBI NO: 18398317 NR Description: expressed protein; protein id: At2g17120.1, by cDNA: 6280., supported by cDNA: gi_15810364, supported by
  misc_feature (133)..(362): Homolog of NCBI NO: 21593990 NR Description: unknown [Arabidopsis thaliana]
  misc_feature (139)..(365): Homolog of NCBI NO: 18395044 NR Description: expressed protein; protein id: At1g21880.1, by cDNA: gi_15982869 [Arabidopsis thaliana]
  misc_feature (139)..(366): Homolog of NCBI NO: 30699276 NR Description: expressed protein [Arabidopsis thaliana]
  misc_feature (139)..(360): Homolog of NCBI NO: 30687570 NR Description: expressed protein [Arabidopsis thaliana]
  misc_feature (139)..(366): Homolog of NCBI NO: 25406518 NR Description: unknown protein T5M16.22 [imported] - Arabidopsis
  misc_feature (5)..(138): Homolog of NCBI NO: 23274133 NR Description: Similar to serine/arginine repetitive matrix 1
  misc_feature (8)..(136): Homolog of NCBI NO: 5821151 NR Description: RNA binding protein [Homo sapiens]
  misc_feature (103)..(103): Xaa is any aa, unknown or other
TLPHSPLPPRQCASPTFKRPNQPKPQPQTHSSNRGTLAKLNLATAQQWRRSPLPSCPASGSSSASSPRRAPQRGRRGSRATPRRRERPRARRSSPTRRPTGRXRPRWPPCARSSSSAPTARCWPPTASRSPRRPRRPRPCRCWVRLPCLCSGGAGATFQRPTYRVRAGDTLDAVARGVFAGLVTYQDIAAANNVSDPNRVAVGQQLWIPVPCSCDPVGGQPVVHFTYVVPAGGSVSGIAEEFGTTEETILTLNKMPDAKSLLAGQVLDVPLRACSSAISSTAIDRNLLVPNGSYILTANNCVKCGCSSSTWQLDCQPTQGLSSSFCPAAKCGDMFLGNTSSSTSSCESTACSYAGYTNSTSFAILANVTTSNVCNAGMTPTAQPAHSSAFRLEPVWLRWTELVALSLFTLSFFV

SEQ ID NO: 8325 - protein, 220 aa, Zea mays subsp. mays
  peptide (1)..(220): Ceres Seq. ID no. 12425148
  misc_feature (56)..(56): Xaa is any aa, unknown or other
MAPLPASLLPCLWLFLCLLAAPCPTARAARFACNATAPRASTCQALVSYAPPNGTXTPTLAAVRALFQLRSHRALLAANGLPLSTPPTAPAPVPLLGPPALPLLGGRRGHVPAAHVPGPRRGHARRRRAGRLRGPRHLPGHRRRQQRLRPQQGRRRPAALDPRALQLRPRGRPTRRALHLRRAGRGLRVRHRGGVRHHGGDDSHAEQDARRQVPSRRPGS

SEQ ID NO: 8326 - DNA, 1562 bp, Zea mays subsp. mays; identical to SEQ ID NO: 5323
  misc_feature (1)..(1562): Ceres Seq. ID no. 12341687
  misc_feature: MA Experiment ID: 108528 Result: Down-regulated in Transcription
  misc_feature: MA Experiment 108528 PARAMETER Experiment Name: Zm_Imbibed_Seeds_P Parameter: Age (day) Value: 5 vs. 2
  misc_feature: MA Experiment 108528 PARAMETER Experiment Name: Zm_Imbibed_Seeds_P Parameter: Organism Value: Zea mays
  misc_feature: MA Experiment 108528 PARAMETER Experiment Name: Zm_Imbibed_Seeds_P Parameter: Plant Line Value: 35A19
  misc_feature: MA Experiment 108528 PARAMETER Experiment Name: Zm_Imbibed_Seeds_P Parameter: Tissue Value: Aerial vs. Embryo
  misc_feature: MA Experiment ID: 108530 Result: Down-regulated in Transcription
  misc_feature: MA Experiment 108530 PARAMETER Experiment Name: Zm_Imbibed_Seeds_P Parameter: Age (day) Value: 6 vs. 2
  misc_feature: MA Experiment 108530 PARAMETER Experiment Name: Zm_Imbibed_Seeds_P Parameter: Organism Value: Zea mays
  misc_feature: MA Experiment 108530 PARAMETER Experiment Name: Zm_Imbibed_Seeds_P Parameter: Plant Line Value: 35A19
  misc_feature: MA Experiment 108530 PARAMETER Experiment Name: Zm_Imbibed_Seeds_P Parameter: Tissue Value: Aerial vs. Embryo
  misc_feature: MA Experiment ID: 108535 Result: Up-regulated in Transcription
  misc_feature: MA Experiment 108535 PARAMETER Experiment Name: Zm_Meristem_P Parameter: Age (day) Value: 8
  misc_feature: MA Experiment 108535 PARAMETER Experiment Name: Zm_Meristem_P Parameter: Organism Value: Zea mays
  misc_feature: MA Experiment 108535 PARAMETER Experiment Name: Zm_Meristem_P Parameter: Plant Line Value: 35A19
  misc_feature: MA Experiment 108535 PARAMETER Experiment Name: Zm_Meristem_P Parameter: Tissue Value: Root Meristem vs. Above Root Meristem
  misc_feature: MA Experiment ID: 108544 Result: Down-regulated in Transcription
  misc_feature: MA Experiment ID: 108547 Result: Down-regulated in Transcription
  misc_feature: MA Experiment 108547 PARAMETER Experiment Name: Zm_Imbibed_Seeds_P Parameter: Age (day) Value: 4 vs. 2
  misc_feature: MA Experiment 108547 PARAMETER Experiment Name: Zm_Imbibed_Seeds_P Parameter: Organism Value: Zea mays
  misc_feature: MA Experiment 108547 PARAMETER Experiment Name: Zm_Imbibed_Seeds_P Parameter: Plant Line Value: 35A19
  misc_feature: MA Experiment 108547 PARAMETER Experiment Name: Zm_Imbibed_Seeds_P Parameter: Tissue Value: Aerial vs. Embryo
  misc_feature: MA Experiment ID: 20000108 Result: Up-regulated in Transcription
  misc_feature: MA Experiment 20000108 PARAMETER Experiment Name: Zm_Root-Tips_P Parameter: Age (day) Value: 12
  misc_feature: MA Experiment 20000108 PARAMETER Experiment Name: Zm_Root-Tips_P Parameter: Organism Value: Zea mays
  misc_feature: MA Experiment 20000108 PARAMETER Experiment Name: Zm_Root-Tips_P Parameter: Tissue Value: Root tips vs. Root mid region    35
  misc_feature: MA Experiment 20000108 PARAMETER Experiment Name: Zm_Root-Tips_P Parameter: Tissue Value: Root tips vs. Root mid region   Sequence Listing-Misc Features (4)

SEQ ID NO: 8327 - protein, 357 aa, Zea mays subsp. mays; identical to SEQ ID NO: 5324
  peptide (1)..(357): Ceres Seq. ID no. 12341688
  misc_feature (104)..(344): Pfam Name: Protein phosphatase 2C Pfam Description: Protein phosphatase 2C
  misc_feature (104)..(344): Pfam Name: Protein phosphatase 2C Pfam Description: Protein phosphatase 2C
  misc_feature (1)..(356): Homolog of NCBI NO: 18423476 NR Description: protein phosphatase 2C (PP2C); protein id: supported by cDNA: gi_15027924, supported by cDNA: gi_18086419, by cDNA: gi_20259166 [Arabidopsis thaliana]
  misc_feature (1)..(356): Homolog of NCBI NO: 18086420 NR Description: AT5g53140/MFH8_8 [Arabidopsis thaliana]
  misc_feature (118)..(356): Homolog of NCBI NO: 9757995 NR Description: protein phosphatase 2C-like [Arabidopsis thaliana]
  misc_feature (118)..(357): Homolog of NCBI NO: 34912708 NR Description: putative protein phosphatase 2C-like protein
  misc_feature (89)..(357): Homolog of NCBI NO: 30689144 NR Description: protein phosphatase 2C (PP2C), putative thaliana] >gi|19347765|gb|AAL86334.1| unknown protein thaliana] >gi|22136752|gb|AAM91695.1| unknown protein
  misc_feature (1)..(356): Homolog of NCBI NO: 18086420 NR Description: AT5g53140/MFH8_8 [Arabidopsis thaliana]
  misc_feature (118)..(357): Homolog of NCBI NO: 34912708 NR Description: putative protein phosphatase 2C-like protein
  misc_feature (100)..(287): Homolog of NCBI NO: 7486331 NR Description: hypothetical protein F28M20.60 - Arabidopsis >gi|3281853|emb|CAA19748.1| putative protein [Arabidopsis >gi|7270078|emb|CAB79893.1| putative protein [Arabidopsis
  misc_feature (89)..(353): Homolog of NCBI NO: 38345197 NR Description: OSJNBa0015K02.7 [Oryza sativa (japonica
  misc_feature (93)..(356): Homolog of NCBI NO: 18416366 NR Description: protein phosphatase 2C -like protein; protein id:
  misc_feature (94)..(351): Homolog of NCBI NO: 20146110 NR Description: protein phosphatase 2C [Mesembryanthemum
  misc_feature (93)..(356): Homolog of NCBI NO: 15238651 NR Description: Protein phosphatase 2C-like protein; protein id:
  misc_feature (89)..(357): Homolog of NCBI NO: 30689144 NR Description: protein phosphatase 2C (PP2C), putative thaliana] >gi|19347765|gb|AAL86334.1| unknown protein thaliana] >gi|22136752|gb|AAM91695.1| unknown protein
  misc_feature (118)..(356): Homolog of NCBI NO: 9757995 NR Description: protein phosphatase 2C-like [Arabidopsis thaliana]
  misc_feature (1)..(356): Homolog of NCBI NO: 18423476 NR Description: protein phosphatase 2C (PP2C); protein id: supported by cDNA: gi_15027924, supported by cDNA: gi_18086419, by cDNA: gi_20259166 [Arabidopsis thaliana]
  misc_feature (93)..(356): Homolog of NCBI NO: 15238651 NR Description: Protein phosphatase 2C-like protein; protein id:
  misc_feature (94)..(351): Homolog of NCBI NO: 20146110 NR Description: protein phosphatase 2C [Mesembryanthemum
  misc_feature (93)..(356): Homolog of NCBI NO: 18416366 NR Description: protein phosphatase 2C -like protein; protein id:
  misc_feature (89)..(353): Homolog of NCBI NO: 38345197 NR Description: OSJNBa0015K02.7 [Oryza sativa (japonica
  misc_feature (100)..(287): Homolog of NCBI NO: 7486331 NR Description: hypothetical protein F28M20.60 - Arabidopsis >gi|3281853|emb|CAA19748.1| putative protein [Arabidopsis >gi|7270078|emb|CAB79893.1| putative protein [Arabidopsis

SEQ ID NO: 8328 - protein, 303 aa, Zea mays subsp. mays; identical to SEQ ID NO: 5325
  peptide (1)..(303): Ceres Seq. ID no. 12341689
  misc_feature (50)..(290): Pfam Name: Protein phosphatase 2C Pfam Description: Protein phosphatase 2C
  misc_feature (50)..(290): Pfam Name: Protein phosphatase 2C Pfam Description: Protein phosphatase 2C
  misc_feature (1)..(302): Homolog of NCBI NO: 18423476 NR Description: protein phosphatase 2C (PP2C); protein id: supported by cDNA: gi_15027924, supported by cDNA: gi_18086419, by cDNA: gi_20259166 [Arabidopsis thaliana]
  misc_feature (1)..(302): Homolog of NCBI NO: 18086420 NR Description: AT5g53140/MFH8_8 [Arabidopsis thaliana]
  misc_feature (64)..(302): Homolog of NCBI NO: 9757995 NR Description: protein phosphatase 2C-like [Arabidopsis thaliana]
  misc_feature (64)..(303): Homolog of NCBI NO: 34912708 NR Description: putative protein phosphatase 2C-like protein
  misc_feature (35)..(303): Homolog of NCBI NO: 30689144 NR Description: protein phosphatase 2C (PP2C), putative thaliana] >gi|19347765|gb|AAL86334.1| unknown protein thaliana] >gi|22136752|gb|AAM91695.1| unknown protein
  misc_feature (1)..(302): Homolog of NCBI NO: 18423476 NR Description: protein phosphatase 2C (PP2C); protein id: supported by cDNA: gi_15027924, supported by cDNA: gi_18086419, by cDNA: gi_20259166 [Arabidopsis thaliana]
  misc_feature (64)..(302): Homolog of NCBI NO: 9757995 NR Description: protein phosphatase 2C-like [Arabidopsis thaliana]
  misc_feature (35)..(299): Homolog of NCBI NO: 38345197 NR Description: OSJNBa0015K02.7 [Oryza sativa (japonica
  misc_feature (39)..(302): Homolog of NCBI NO: 18416366 NR Description: protein phosphatase 2C -like protein; protein id:
  misc_feature (40)..(297): Homolog of NCBI NO: 20146110 NR Description: protein phosphatase 2C [Mesembryanthemum
  misc_feature (39)..(302): Homolog of NCBI NO: 15238651 NR Description: Protein phosphatase 2C-like protein; protein id:
  misc_feature (35)..(303): Homolog of NCBI NO: 30689144 NR Description: protein phosphatase 2C (PP2C), putative thaliana] >gi|19347765|gb|AAL86334.1| unknown protein thaliana] >gi|22136752|gb|AAM91695.1| unknown protein
  misc_feature (64)..(303): Homolog of NCBI NO: 34912708 NR Description: putative protein phosphatase 2C-like protein
  misc_feature (1)..(302): Homolog of NCBI NO: 18086420 NR Description: AT5g53140/MFH8_8 [Arabidopsis thaliana]
  misc_feature (39)..(302): Homolog of NCBI NO: 15238651 NR Description: Protein phosphatase 2C-like protein; protein id:
  misc_feature (40)..(297): Homolog of NCBI NO: 20146110 NR Description: protein phosphatase 2C [Mesembryanthemum
  misc_feature (39)..(302): Homolog of NCBI NO: 18416366 NR Description: protein phosphatase 2C -like protein; protein id:
  misc_feature (35)..(299): Homolog of NCBI NO: 38345197 NR Description: OSJNBa0015K02.7 [Oryza sativa (japonica
  misc_feature (46)..(233): Homolog of NCBI NO: 7486331 NR Description: hypothetical protein F28M20.60 - Arabidopsis >gi|3281853|emb|CAA19748.1| putative protein [Arabidopsis >gi|7270078|emb|CAB79893.1| putative protein [Arabidopsis
  misc_feature (46)..(233): Homolog of NCBI NO: 7486331 NR Description: hypothetical protein F28M20.60 - Arabidopsis >gi|3281853|emb|CAA19748.1| putative protein [Arabidopsis >gi|7270078|emb|CAB79893.1| putative protein [Arabidopsis

SEQ ID NO: 8329 - protein, 302 aa, Zea mays subsp. mays; identical to SEQ ID NO: 5326
  peptide (1)..(302): Ceres Seq. ID no. 12341690
  misc_feature (49)..(289): Pfam Name: Protein phosphatase 2C Pfam Description: Protein phosphatase 2C
  misc_feature (49)..(289): Pfam Name: Protein phosphatase 2C Pfam Description: Protein phosphatase 2C
  misc_feature (1)..(301): Homolog of NCBI NO: 18423476 NR Description: protein phosphatase 2C (PP2C); protein id: supported by cDNA: gi_15027924, supported by cDNA: gi_18086419, by cDNA: gi_20259166 [Arabidopsis thaliana]
  misc_feature (1)..(301): Homolog of NCBI NO: 18086420 NR Description: AT5g53140/MFH8_8 [Arabidopsis thaliana]
  misc_feature (63)..(301): Homolog of NCBI NO: 9757995 NR Description: protein phosphatase 2C-like [Arabidopsis thaliana]
  misc_feature (63)..(302): Homolog of NCBI NO: 34912708 NR Description: putative protein phosphatase 2C-like protein
  misc_feature (34)..(302): Homolog of NCBI NO: 30689144 NR Description: protein phosphatase 2C (PP2C), putative thaliana] >gi|19347765|gb|AAL86334.1| unknown protein thaliana] >gi|22136752|gb|AAM91695.1| unknown protein
  misc_feature (1)..(301): Homolog of NCBI NO: 18086420 NR Description: AT5g53140/MFH8_8 [Arabidopsis thaliana]
  misc_feature (63)..(302): Homolog of NCBI NO: 34912708 NR Description: putative protein phosphatase 2C-like protein
  misc_feature (45)..(232): Homolog of NCBI NO: 7486331 NR Description: hypothetical protein F28M20.60 - Arabidopsis >gi|3281853|emb|CAA19748.1| putative protein [Arabidopsis >gi|7270078|emb|CAB79893.1| putative protein [Arabidopsis
  misc_feature (34)..(298): Homolog of NCBI NO: 38345197 NR Description: OSJNBa0015K02.7 [Oryza sativa (japonica
  misc_feature (38)..(301): Homolog of NCBI NO: 18416366 NR Description: protein phosphatase 2C -like protein; protein id:
  misc_feature (39)..(296): Homolog of NCBI NO: 20146110 NR Description: protein phosphatase 2C [Mesembryanthemum
  misc_feature (38)..(301): Homolog of NCBI NO: 15238651 NR Description: Protein phosphatase 2C-like protein; protein id:
  misc_feature (34)..(302): Homolog of NCBI NO: 30689144 NR Description: protein phosphatase 2C (PP2C), putative thaliana] >gi|19347765|gb|AAL86334.1| unknown protein thaliana] >gi|22136752|gb|AAM91695.1| unknown protein
  misc_feature (63)..(301): Homolog of NCBI NO: 9757995 NR Description: protein phosphatase 2C-like [Arabidopsis thaliana]
  misc_feature (1)..(301): Homolog of NCBI NO: 18423476 NR Description: protein phosphatase 2C (PP2C); protein id: supported by cDNA: gi_15027924, supported by cDNA: gi_18086419, by cDNA: gi_20259166 [Arabidopsis thaliana]
  misc_feature (38)..(301): Homolog of NCBI NO: 15238651 NR Description: Protein phosphatase 2C-like protein; protein id:
  misc_feature (39)..(296): Homolog of NCBI NO: 20146110 NR Description: protein phosphatase 2C [Mesembryanthemum
  misc_feature (38)..(301): Homolog of NCBI NO: 18416366 NR Description: protein phosphatase 2C -like protein; protein id:
  misc_feature (34)..(298): Homolog of NCBI NO: 38345197 NR Description: OSJNBa0015K02.7 [Oryza sativa (japonica
  misc_feature (45)..(232): Homolog of NCBI NO: 7486331 NR Description: hypothetical protein F28M20.60 - Arabidopsis >gi|3281853|emb|CAA19748.1| putative protein [Arabidopsis >gi|7270078|emb|CAB79893.1| putative protein [Arabidopsis

SEQ ID NO: 8330 - DNA, 1135 bp, Zea mays subsp. mays
  misc_feature (1)..(1135): Ceres Seq. ID no. 12408545
  misc_feature: MA Experiment ID: 108523 Result: Down-regulated in Transcription
  misc_feature: MA Experiment 108523 PARAMETER Experiment Name: Zm_42deg_Heat_P Parameter: Age (day) Value: 8
  misc_feature: MA Experiment 108523 PARAMETER Experiment Name: Zm_42deg_Heat_P Parameter: Organism Value: Zea mays
  misc_feature: MA Experiment 108523 PARAMETER Experiment Name: Zm_42deg_Heat_P Parameter: Plant Line Value: 35A19
  misc_feature: MA Experiment 108523 PARAMETER Experiment Name: Zm_42deg_Heat_P Parameter: Temperature (deg C) Value: 42 vs. 22
  misc_feature: MA Experiment 108523 PARAMETER Experiment Name: Zm_42deg_Heat_P Parameter: Timepoint (hr) Value: 6
  misc_feature: MA Experiment 108523 PARAMETER Experiment Name: Zm_42deg_Heat_P Parameter: Tissue Value: Aerial
  misc_feature: MA Experiment ID: 108527 Result: Down-regulated in Transcription
  misc_feature: MA Experiment 108527 PARAMETER Experiment Name: Zm_5mM_NO_P Parameter: Age (day) Value: 8
  misc_feature: MA Experiment 108527 PARAMETER Experiment Name: Zm_5mM_NO_P Parameter: Organism Value: Zea mays
  misc_feature: MA Experiment 108527 PARAMETER Experiment Name: Zm_5mM_NO_P Parameter: Plant Line Value: 35A19
  misc_feature: MA Experiment 108527 PARAMETER Experiment Name: Zm_5mM_NO_P Parameter: Timepoint (hr) Value: 6
  misc_feature: MA Experiment 108527 PARAMETER Experiment Name: Zm_5mM_NO_P Parameter: Tissue Value: Aerial
  misc_feature: MA Experiment 108527 PARAMETER Experiment Name: Zm_5mM_NO_P Parameter: Treatment Value: 5mM NO vs. No Treatment
  misc_feature: MA Experiment ID: 108528 Result: Up-regulated in Transcription
  misc_feature: MA Experiment 108528 PARAMETER Experiment Name: Zm_Imbibed_Seeds_P Parameter: Age (day) Value: 5 vs. 2
  misc_feature: MA Experiment 108528 PARAMETER Experiment Name: Zm_Imbibed_Seeds_P Parameter: Organism Value: Zea mays
  misc_feature: MA Experiment 108528 PARAMETER Experiment Name: Zm_Imbibed_Seeds_P Parameter: Plant Line Value: 35A19
  misc_feature: MA Experiment 108528 PARAMETER Experiment Name: Zm_Imbibed_Seeds_P Parameter: Tissue Value: Aerial vs. Embryo
  misc_feature: MA Experiment ID: 108530 Result: Up-regulated in Transcription
  misc_feature: MA Experiment 108530 PARAMETER Experiment Name: Zm_Imbibed_Seeds_P Parameter: Age (day) Value: 6 vs. 2
  misc_feature: MA Experiment 108530 PARAMETER Experiment Name: Zm_Imbibed_Seeds_P Parameter: Organism Value: Zea mays
  misc_feature: MA Experiment 108530 PARAMETER Experiment Name: Zm_Imbibed_Seeds_P Parameter: Plant Line Value: 35A19
  misc_feature: MA Experiment 108530 PARAMETER Experiment Name: Zm_Imbibed_Seeds_P Parameter: Tissue Value: Aerial vs. Embryo
  misc_feature: MA Experiment ID: 108536 Result: Down-regulated in Transcription
  misc_feature: MA Experiment 108536 PARAMETER Experiment Name: Zm_Meristem_P Parameter: Age (day) Value: 8
  misc_feature: MA Experiment 108536 PARAMETER Experiment Name: Zm_Meristem_P Parameter: Organism Value: Zea mays
  misc_feature: MA Experiment 108536 PARAMETER Experiment Name: Zm_Meristem_P Parameter: Plant Line Value: 35A19
  misc_feature: MA Experiment 108536 PARAMETER Experiment Name: Zm_Meristem_P Parameter: Tissue Value: Shoot Meristem vs. Above Shoot Meristem
  misc_feature: MA Experiment ID: 108545 Result: Up-regulated in Transcription
  misc_feature: MA Experiment 108545 PARAMETER Experiment Name: Zm_Imbibed_Seeds_P Parameter: Age (day) Value: 3 vs. 2
  misc_feature: MA Experiment 108545 PARAMETER Experiment Name: Zm_Imbibed_Seeds_P Parameter: Organism Value: Zea mays
  misc_feature: MA Experiment 108545 PARAMETER Experiment Name: Zm_Imbibed_Seeds_P Parameter: Plant Line Value: 35A19
  misc_feature: MA Experiment 108545 PARAMETER Experiment Name: Zm_Imbibed_Seeds_P Parameter: Tissue Value: Aerial vs. Embryo
  misc_feature: MA Experiment ID: 108547 Result: Up-regulated in Transcription
  misc_feature: MA Experiment 108547 PARAMETER Experiment Name: Zm_Imbibed_Seeds_P Parameter: Age (day) Value: 4 vs. 2
  misc_feature: MA Experiment 108547 PARAMETER Experiment Name: Zm_Imbibed_Seeds_P Parameter: Organism Value: Zea mays
  misc_feature: MA Experiment 108547 PARAMETER Experiment Name: Zm_Imbibed_Seeds_P Parameter: Plant Line Value: 35A19
  misc_feature: MA Experiment 108547 PARAMETER Experiment Name: Zm_Imbibed_Seeds_P Parameter: Tissue Value: Aerial vs. Embryo
  misc_feature: MA Experiment ID: 108559 Result: Down-regulated in Transcription
  misc_feature: MA Experiment 108559 PARAMETER Experiment Name: Zm_5mM_NO_P Parameter: Age (day) Value: 8
  misc_feature: MA Experiment 108559 PARAMETER Experiment Name: Zm_5mM_NO_P Parameter: Organism Value: Zea mays
  misc_feature: MA Experiment 108559 PARAMETER Experiment Name: Zm_5mM_NO_P Parameter: Plant Line Value: 35A19
  misc_feature: MA Experiment 108559 PARAMETER Experiment Name: Zm_5mM_NO_P Parameter: Timepoint (hr) Value: 12
  misc_feature: MA Experiment 108559 PARAMETER Experiment Name: Zm_5mM_NO_P Parameter: Tissue Value: Aerial
  misc_feature: MA Experiment 108559 PARAMETER Experiment Name: Zm_5mM_NO_P Parameter: Treatment Value: 5mM NO vs. No Treatment
  misc_feature: MA Experiment ID: 108688 Result: Down-regulated in Transcription
  misc_feature: MA Experiment 108688 PARAMETER Experiment Name: Zm_Embryos-Flowers__P Parameter: Tissue Value: Immature Flowers vs. Aerial+
  misc_feature: MA Experiment ID: 20000477 Result: Down-regulated in Transcription
  misc_feature: MA Experiment 20000477 PARAMETER Experiment Name: Zm_5mM_SA_P Parameter: Age (day) Value: 10
  misc_feature: MA Experiment 20000477 PARAMETER Experiment Name: Zm_5mM_SA_P Parameter: Organism Value: Zea mays
  misc_feature: MA Experiment 20000477 PARAMETER Experiment Name: Zm_5mM_SA_P Parameter: Plant Line Value: 35A19
  misc_feature: MA Experiment 20000477 PARAMETER Experiment Name: Zm_5mM_SA_P Parameter: Timepoint (hr) Value: 48
  misc_feature: MA Experiment 20000477 PARAMETER Experiment Name: Zm_5mM_SA_P Parameter: Tissue Value: Aerial
  misc_feature: MA Experiment 20000477 PARAMETER Experiment Name: Zm_5mM_SA_P Parameter: Treatment Value: 5mM SA vs. No Treatment
  misc_feature: MA Experiment ID: 20000478 Result: Down-regulated in Transcription
  misc_feature: MA Experiment 20000478 PARAMETER Experiment Name: Zm_5mM_SA_P Parameter: Age (day) Value: 11
  misc_feature: MA Experiment 20000478 PARAMETER Experiment Name: Zm_5mM_SA_P Parameter: Organism Value: Zea mays
  misc_feature: MA Experiment 20000478 PARAMETER Experiment Name: Zm_5mM_SA_P Parameter: Plant Line Value: 35A19
  misc_feature: MA Experiment 20000478 PARAMETER Experiment Name: Zm_5mM_SA_P Parameter: Timepoint (hr) Value: 72
  misc_feature: MA Experiment 20000478 PARAMETER Experiment Name: Zm_5mM_SA_P Parameter: Tissue Value: Aerial
  misc_feature: MA Experiment 20000478 PARAMETER Experiment Name: Zm_5mM_SA_P Parameter: Treatment Value: 5mM SA vs. No Treatment
  misc_feature: MA Experiment ID: 20000535 Result: Down-regulated in Transcription
  misc_feature: MA Experiment 20000535 PARAMETER Experiment Name: Zm_Hybrid_Seed_Dev_P Parameter: DAP Value: 30 vs. 12
  misc_feature: MA Experiment 20000535 PARAMETER Experiment Name: Zm_Hybrid_Seed_Dev_P Parameter: Organism Value: Zea mays
  misc_feature: MA Experiment 20000535 PARAMETER Experiment Name: Zm_Hybrid_Seed_Dev_P Parameter: Plant Line Value: 35A19
  misc_feature: MA Experiment 20000535 PARAMETER Experiment Name: Zm_Hybrid_Seed_Dev_P Parameter: Tissue Value: Embryo vs. Unfert Floret
  misc_feature: MA Experiment ID: 20000626 Result: Down-regulated in Transcription
  misc_feature: MA Experiment 20000626 PARAMETER Experiment Name: Zm_Herbicide-Treatments_P Parameter: Timepoint (hr) Value: 12
  misc_feature: MA Experiment 20000626 PARAMETER Experiment Name: Zm_Herbicide-Treatments_P Parameter: Tissue Value: Aerial
  misc_feature: MA Experiment 20000626 PARAMETER Experiment Name: Zm_Herbicide-Treatments_P Parameter: Treatment Value: Roundup vs. No Treatment
aaaggaccaacgtgctcgatctccatctcgaccgtcgctcaccgggaagctacgctacgacgaagcatggcgtccgtcaccgcccgcgccccggtcgcagccctgcgcccgtcgtcgtcgtcggccttccttggccactctagccgcctcggccgcactgctaccgcgtcgccgacgaggcgcagcctcaaggcggaggccaagggcgagtggctcccgggccttccctcccccgcctacctcgacggcagcctgccgggtgacaatggcttcgacccgttgggcctggcggaggacccggagaacctgaggtggtacgtgcaggcggagctggtgaacgggcggtgggcgatgctgggcgtggccgggatgctgatcccggaggtgctgaccaaggccgggctgatcaacgcgccgcagtggtacgacgccggcaagtcggagtacttcgcgtcgtcgtcgacgctgttcgtgatcgagttcatcctgtttcactacgtggagatccggcggtggcaggacatcaagaaccccggcagcgtcaaccaggaccccatcttcaagagctacagcctgccgccgcacgagtgcggctaccccggcagcgtcttcaacccgctcaacttcgcgcccacgctcgaggccaaggagaaggagctcgccaacgggaggctggccatgctggcgttcctggccttcctgatccagcacaacgtcaccggcaaggggcccttcgacaacctgctgcagcacctgtccgacccatggcacaacaccatcatccagaccctgtcgggttgagtcgacggtccatcaggtcatgtgatccgagctgaaataaaggaagacaaatcttgaaacgcgatcgatgttacgttcctttctgggccggatcagttcgtgtgatgcgttcttaatcgactgagggctaaggaatgtgacgtactggtatatgtacattagttgaagcggaggctataaagggtgtagagattgtttcatcagtgtatatcatctgtcccgatgggttttgttttgtgcttttcacgattcattgtggaagcacatgtattattagtacaagaactgctagtagatatataggcttataattaagcacgacttctaaaacctc

SEQ ID NO: 8331 - protein, 266 aa, Zea mays subsp. mays
  peptide (1)..(266): Ceres Seq. ID no. 12408546
  misc_feature (77)..(238): Pfam Name: Chlorophyll A-B binding protein Pfam Description: Chlorophyll A-B binding protein
  misc_feature (23)..(266): Homolog of NCBI NO: 3789952 NR Description: chlorophyll a/b-binding protein presursor [Oryza
  misc_feature (38)..(266): Homolog of NCBI NO: 9624495 NR Description: chlorophyll a/b-binding protein precursor
  misc_feature (23)..(265): Homolog of NCBI NO: 100196 NR Description: chlorophyll a/b-binding protein (cab-11) - tomato
  misc_feature (23)..(266): Homolog of NCBI NO: 322392 NR Description: chlorophyll a/b-binding protein type 4,
  misc_feature (23)..(266): Homolog of NCBI NO: 13385204 NR Description: cDNA sequence BC002118; hypothetical protein, [Mus musculus] >gi|12805303|gb|AAH02118.1| Unknown (protein for
  misc_feature (23)..(265): Homolog of NCBI NO: 100197 NR Description: chlorophyll a/b-binding protein (cab-12) - tomato
  misc_feature (41)..(266): Homolog of NCBI NO: 322393 NR Description: chlorophyll a/b-binding protein type 4, I - Scotch pine (fragment) >gi|829287|emb|CAA78901.1| Lhca4
  misc_feature (23)..(266): Homolog of NCBI NO: 20218813 NR Description: putative chlorophyll a/b-binding protein type 4
  misc_feature (23)..(266): Homolog of NCBI NO: 11277626 NR Description: chlorophyll a/b-binding protein [imported] -
  misc_feature (22)..(260): Homolog of NCBI NO: 2129879 NR Description: chlorophyll a/b-binding protein type II precursor,
KGPTCSISISTVAHREATLRRSMASVTARAPVAALRPSSSSAFLGHSSRLGRTATASPTRRSLKAEAKGEWLPGLPSPAYLDGSLPGDNGFDPLGLAEDPENLRWYVQAELVNGRWAMLGVAGMLIPEVLTKAGLINAPQWYDAGKSEYFASSSTLFVIEFILFHYVEIRRWQDIKNPGSVNQDPIFKSYSLPPHECGYPGSVFNPLNFAPTLEAKEKELANGRLAMLAFLAFLIQHNVTGKGPFDNLLQHLSDPWHNTIIQTLSG

SEQ ID NO: 8332 - protein, 244 aa, Zea mays subsp. mays
  peptide (1)..(244): Ceres Seq. ID no. 12408547
  misc_feature (55)..(216): Pfam Name: Chlorophyll A-B binding protein Pfam Description: Chlorophyll A-B binding protein
  misc_feature (1)..(244): Homolog of NCBI NO: 3789952 NR Description: chlorophyll a/b-binding protein presursor [Oryza
  misc_feature (16)..(244): Homolog of NCBI NO: 9624495 NR Description: chlorophyll a/b-binding protein precursor
  misc_feature (1)..(243): Homolog of NCBI NO: 100196 NR Description: chlorophyll a/b-binding protein (cab-11) - tomato
  misc_feature (1)..(244): Homolog of NCBI NO: 322392 NR Description: chlorophyll a/b-binding protein type 4,
  misc_feature (1)..(244): Homolog of NCBI NO: 13385204 NR Description: cDNA sequence BC002118; hypothetical protein, [Mus musculus] >gi|12805303|gb|AAH02118.1| Unknown (protein for
  misc_feature (1)..(243): Homolog of NCBI NO: 100197 NR Description: chlorophyll a/b-binding protein (cab-12) - tomato
  misc_feature (19)..(244): Homolog of NCBI NO: 322393 NR Description: chlorophyll a/b-binding protein type 4, I - Scotch pine (fragment) >gi|829287|emb|CAA78901.1| Lhca4
  misc_feature (1)..(244): Homolog of NCBI NO: 20218813 NR Description: putative chlorophyll a/b-binding protein type 4
  misc_feature (1)..(244): Homolog of NCBI NO: 11277626 NR Description: chlorophyll a/b-binding protein [imported] -
  misc_feature (1)..(238): Homolog of NCBI NO: 2129879 NR Description: chlorophyll a/b-binding protein type II precursor,
MASVTARAPVAALRPSSSSAFLGHSSRLGRTATASPTRRSLKAEAKGEWLPGLPSPAYLDGSLPGDNGFDPLGLAEDPENLRWYVQAELVNGRWAMLGVAGMLIPEVLTKAGLINAPQWYDAGKSEYFASSSTLFVIEFILFHYVEIRRWQDIKNPGSVNQDPIFKSYSLPPHECGYPGSVFNPLNFAPTLEAKEKELANGRLAMLAFLAFLIQHNVTGKGPFDNLLQHLSDPWHNTIIQTLSG

SEQ ID NO: 8333 - protein, 149 aa, Zea mays subsp. mays
  peptide (1)..(149): Ceres Seq. ID no. 12408548
  misc_feature (1)..(121): Pfam Name: Chlorophyll A-B binding protein Pfam Description: Chlorophyll A-B binding protein
  misc_feature (1)..(149): Homolog of NCBI NO: 3789952 NR Description: chlorophyll a/b-binding protein presursor [Oryza
  misc_feature (1)..(149): Homolog of NCBI NO: 9624495 NR Description: chlorophyll a/b-binding protein precursor
  misc_feature (1)..(148): Homolog of NCBI NO: 100196 NR Description: chlorophyll a/b-binding protein (cab-11) - tomato
  misc_feature (1)..(149): Homolog of NCBI NO: 322392 NR Description: chlorophyll a/b-binding protein type 4,
  misc_feature (1)..(149): Homolog of NCBI NO: 13385204 NR Description: cDNA sequence BC002118; hypothetical protein, [Mus musculus] >gi|12805303|gb|AAH02118.1| Unknown (protein for
  misc_feature (1)..(148): Homolog of NCBI NO: 100197 NR Description: chlorophyll a/b-binding protein (cab-12) - tomato
  misc_feature (1)..(149): Homolog of NCBI NO: 322393 NR Description: chlorophyll a/b-binding protein type 4, I - Scotch pine (fragment) >gi|829287|emb|CAA78901.1| Lhca4
  misc_feature (1)..(149): Homolog of NCBI NO: 20218813 NR Description: putative chlorophyll a/b-binding protein type 4
  misc_feature (1)..(149): Homolog of NCBI NO: 11277626 NR Description: chlorophyll a/b-binding protein [imported] -
  misc_feature (1)..(143): Homolog of NCBI NO: 2129879 NR Description: chlorophyll a/b-binding protein type II precursor,
MLGVAGMLIPEVLTKAGLINAPQWYDAGKSEYFASSSTLFVIEFILFHYVEIRRWQDIKNPGSVNQDPIFKSYSLPPHECGYPGSVFNPLNFAPTLEAKEKELANGRLAMLAFLAFLIQHNVTGKGPFDNLLQHLSDPWHNTIIQTLSG

SEQ ID NO: 8334 - DNA, 1498 bp, Zea mays subsp. mays
  misc_feature (1)..(1498): Ceres Seq. ID no. 13493669
  misc_feature: MA Experiment ID: 108523 Result: Up-regulated in Transcription
  misc_feature: MA Experiment 108523 PARAMETER Experiment Name: Zm_42deg_Heat_P Parameter: Age (day) Value: 8
  misc_feature: MA Experiment 108523 PARAMETER Experiment Name: Zm_42deg_Heat_P Parameter: Organism Value: Zea mays
  misc_feature: MA Experiment 108523 PARAMETER Experiment Name: Zm_42deg_Heat_P Parameter: Plant Line Value: 35A19
  misc_feature: MA Experiment 108523 PARAMETER Experiment Name: Zm_42deg_Heat_P Parameter: Temperature (deg C) Value: 42 vs. 22
  misc_feature: MA Experiment 108523 PARAMETER Experiment Name: Zm_42deg_Heat_P Parameter: Timepoint (hr) Value: 6
  misc_feature: MA Experiment 108523 PARAMETER Experiment Name: Zm_42deg_Heat_P Parameter: Tissue Value: Aerial
  misc_feature: MA Experiment ID: 108556 Result: Up-regulated in Transcription
  misc_feature: MA Experiment 108556 PARAMETER Experiment Name: Zm_Drought_P Parameter: Age (day) Value: 9
  misc_feature: MA Experiment 108556 PARAMETER Experiment Name: Zm_Drought_P Parameter: Organism Value: Zea mays
  misc_feature: MA Experiment 108556 PARAMETER Experiment Name: Zm_Drought_P Parameter: Plant Line Value: 35A19
  misc_feature: MA Experiment 108556 PARAMETER Experiment Name: Zm_Drought_P Parameter: Timepoint (hr) Value: 24
  misc_feature: MA Experiment 108556 PARAMETER Experiment Name: Zm_Drought_P Parameter: Tissue Value: Aerial
  misc_feature: MA Experiment 108556 PARAMETER Experiment Name: Zm_Drought_P Parameter: Treatment Value: Drought vs. No Drought
  misc_feature: MA Experiment ID: 20000478 Result: Up-regulated in Transcription
  misc_feature: MA Experiment 20000478 PARAMETER Experiment Name: Zm_5mM_SA_P Parameter: Age (day) Value: 11
  misc_feature: MA Experiment 20000478 PARAMETER Experiment Name: Zm_5mM_SA_P Parameter: Organism Value: Zea mays
  misc_feature: MA Experiment 20000478 PARAMETER Experiment Name: Zm_5mM_SA_P Parameter: Plant Line Value: 35A19
  misc_feature: MA Experiment 20000478 PARAMETER Experiment Name: Zm_5mM_SA_P Parameter: Timepoint (hr) Value: 72
  misc_feature: MA Experiment 20000478 PARAMETER Experiment Name: Zm_5mM_SA_P Parameter: Tissue Value: Aerial
  misc_feature: MA Experiment 20000478 PARAMETER Experiment Name: Zm_5mM_SA_P Parameter: Treatment Value: 5mM SA vs. No Treatment
  misc_feature: MA Experiment ID: 20000479 Result: Up-regulated in Transcription
  misc_feature: MA Experiment 20000479 PARAMETER Experiment Name: Zm_Drought_P Parameter: Age (day) Value: 10
  misc_feature: MA Experiment 20000479 PARAMETER Experiment Name: Zm_Drought_P Parameter: Organism Value: Zea mays
  misc_feature: MA Experiment 20000479 PARAMETER Experiment Name: Zm_Drought_P Parameter: Plant Line Value: 35A19
  misc_feature: MA Experiment 20000479 PARAMETER Experiment Name: Zm_Drought_P Parameter: Timepoint (hr) Value: 48
  misc_feature: MA Experiment 20000479 PARAMETER Experiment Name: Zm_Drought_P Parameter: Tissue Value: Aerial
  misc_feature: MA Experiment 20000479 PARAMETER Experiment Name: Zm_Drought_P Parameter: Treatment Value: Drought vs. No Drought
  misc_feature: MA Experiment ID: 20000480 Result: Up-regulated in Transcription
  misc_feature: MA Experiment 20000480 PARAMETER Experiment Name: Zm_Drought_P Parameter: Age (day) Value: 11
  misc_feature: MA Experiment 20000480 PARAMETER Experiment Name: Zm_Drought_P Parameter: Organism Value: Zea mays
  misc_feature: MA Experiment 20000480 PARAMETER Experiment Name: Zm_Drought_P Parameter: Plant Line Value: 35A19
  misc_feature: MA Experiment 20000480 PARAMETER Experiment Name: Zm_Drought_P Parameter: Timepoint (hr) Value: 72
  misc_feature: MA Experiment 20000480 PARAMETER Experiment Name: Zm_Drought_P Parameter: Tissue Value: Aerial
  misc_feature: MA Experiment 20000480 PARAMETER Experiment Name: Zm_Drought_P Parameter: Treatment Value: Drought vs. No Drought
ctttccgcctcggcacctccccacccctctcgccttcgcttcgtcgccacggcgagccccacgccgccgatcggggcgccgccagcggcggcggcgcccgatccgatggaagcggaggtggggccgccgaatccgccgcggccggagccagccggatcggagcccgacgacgcgcgcctctccccgcctcctcctgctcctgctccgccgcctccgcccccgcctcctcccgccgccgaggctgccgccgcgcccaccgcctccgcggccttctcgctgcaggctccagctccggcgccggcggaggcgaacggcagctccgacaggaagaggaggaggaaggcggaggacggggacgggtgcaagacctgcagctgcaagaagtccaggtgcctcaagctttactgtgtgtgctttgcttctgggttacattgtactgaatcatgtggatgtgaaccttgtcataacaagccacaattgcaaggtactctgcggatggcaacagttttacctctgaaacctgtccaaacattcgaagctggccaagatatagtggaacaagtcataaggtctcctatggatcttattagaagaaaatgcacatgcaagaagtcaggctgccttaagaagtactgcgactgctaccagggaggggcaggatgctccatcaactgtaaatgcgatgattgtagaaacccatttgggagaaaagtcggcgttattttggacggtaaaagcagtcttactgcacctatactgcacgaaagaaacgggactgaagttgactcaagcgacgaggaagacgacttctacatgaatcgacagctctccccaatacctccgtctccggtgtctagggagtcttcgttccaacaggagactctagtcggcgtcgaggtccagaccatgaacgggcacctgtaccccaaaccactgacccaggtgcgccccgagccgtcgtcctggcagctctcccggaggcccatcgaggaaccgcgcggggagatatggcgcttctcgaggaggccgagcgaggacgggacctctgatgccatggaagtgcacgccgtcgccccgagagagagcaagaaggcggcagaggtccgcggggacaggttcggcatcccgcggtgcatcgaggtgatgagcgccatggcggagctgtcgccggtggagaagtcgctggcgcccgacgtcttcttggacgcgagcaaccgggagatcttcctctcgctgagtgtagatattaggccaatctggctgaggcgcaagatgaagagccttgtctagctagacgctacaacagagatagcctgaggaattttcgtcgtcggcgtatacctaataaacccgtgctgtactgtagatatataatatatgtgccttagattcagagttgagttctggaccgatgggtgtaatataccttagtgctaatttatggtgcatgctgttatattggagttcttcctatggtaagttcgttatgatttcagcc

SEQ ID NO: 8335 - protein, 429 aa, Zea mays subsp. mays
  peptide (1)..(429): Ceres Seq. ID no. 13493670
  misc_feature (197)..(236): Pfam Name: Tesmin/TSO1-like CXC domain Pfam Description: Tesmin/TSO1-like CXC domain
  misc_feature (103)..(269): Homolog of NCBI NO: 34393829 NR Description: putative CXC domain protein TSO1 [Oryza sativa
  misc_feature (102)..(281): Homolog of NCBI NO: 15028139 NR Description: putative DNA binding protein [Arabidopsis
  misc_feature (102)..(281): Homolog of NCBI NO: 23297130 NR Description: putative DNA binding protein [Arabidopsis
  misc_feature (102)..(281): Homolog of NCBI NO: 6739821 NR Description: putative DNA binding protein [Arabidopsis >gi|7767425|gb|AAF69124.1|AF204059_1 CXC domain protein TSO1
  misc_feature (102)..(281): Homolog of NCBI NO: 30686784 NR Description: DNA binding protein -related [Arabidopsis
  misc_feature (107)..(243): Homolog of NCBI NO: 7767427 NR Description: CXC domain containing TSO1-like protein 1
  misc_feature (107)..(243): Homolog of NCBI NO: 18403510 NR Description: CXC domain containing TSO1-related protein 1 [Arabidopsis thaliana] >gi|20466374|gb|AAM20504.1| unknown [Arabidopsis thaliana] >gi|22136318|gb|AAM91237.1| unknown
  misc_feature (109)..(293): Homolog of NCBI NO: 40241245 NR Description: cysteine-rich polycomb-like protein [Lotus
LSASAPPHPSRLRFVATASPTPPIGAPPAAAAPDPMEAEVGPPNPPRPEPAGSEPDDARLSPPPPAPAPPPPPPPPPAAEAAAAPTASAAFSLQAPAPAPAEANGSSDRKRRRKAEDGDGCKTCSCKKSRCLKLYCVCFASGLHCTESCGCEPCHNKPQLQGTLRMATVLPLKPVQTFEAGQDIVEQVIRSPMDLIRRKCTCKKSGCLKKYCDCYQGGAGCSINCKCDDCRNPFGRKVGVILDGKSSLTAPILHERNGTEVDSSDEEDDFYMNRQLSPIPPSPVSRESSFQQETLVGVEVQTMNGHLYPKPLTQVRPEPSSWQLSRRPIEEPRGEIWRFSRRPSEDGTSDAMEVHAVAPRESKKAAEVRGDRFGIPRCIEVMSAMAELSPVEKSLAPDVFLDASNREIFLSLSVDIRPIWLRRKMKSLV

SEQ ID NO: 8336 - protein, 394 aa, Zea mays subsp. mays
  peptide (1)..(394): Ceres Seq. ID no. 13493671
  misc_feature (162)..(201): Pfam Name: Tesmin/TSO1-like CXC domain Pfam Description: Tesmin/TSO1-like CXC domain
  misc_feature (72)..(208): Homolog of NCBI NO: 7767427 NR Description: CXC domain containing TSO1-like protein 1
  misc_feature (72)..(208): Homolog of NCBI NO: 18403510 NR Description: CXC domain containing TSO1-related protein 1 [Arabidopsis thaliana] >gi|20466374|gb|AAM20504.1| unknown [Arabidopsis thaliana] >gi|22136318|gb|AAM91237.1| unknown
  misc_feature (67)..(246): Homolog of NCBI NO: 15028139 NR Description: putative DNA binding protein [Arabidopsis
  misc_feature (67)..(246): Homolog of NCBI NO: 6739821 NR Description: putative DNA binding protein [Arabidopsis >gi|7767425|gb|AAF69124.1|AF204059_1 CXC domain protein TSO1
  misc_feature (67)..(246): Homolog of NCBI NO: 30686784 NR Description: DNA binding protein -related [Arabidopsis
  misc_feature (67)..(246): Homolog of NCBI NO: 23297130 NR Description: putative DNA binding protein [Arabidopsis
  misc_feature (68)..(234): Homolog of NCBI NO: 34393829 NR Description: putative CXC domain protein TSO1 [Oryza sativa
  misc_feature (74)..(258): Homolog of NCBI NO: 40241245 NR Description: cysteine-rich polycomb-like protein [Lotus
MEAEVGPPNPPRPEPAGSEPDDARLSPPPPAPAPPPPPPPPPAAEAAAAPTASAAFSLQAPAPAPAEANGSSDRKRRRKAEDGDGCKTCSCKKSRCLKLYCVCFASGLHCTESCGCEPCHNKPQLQGTLRMATVLPLKPVQTFEAGQDIVEQVIRSPMDLIRRKCTCKKSGCLKKYCDCYQGGAGCSINCKCDDCRNPFGRKVGVILDGKSSLTAPILHERNGTEVDSSDEEDDFYMNRQLSPIPPSPVSRESSFQQETLVGVEVQTMNGHLYPKPLTQVRPEPSSWQLSRRPIEEPRGEIWRFSRRPSEDGTSDAMEVHAVAPRESKKAAEVRGDRFGIPRCIEVMSAMAELSPVEKSLAPDVFLDASNREIFLSLSVDIRPIWLRRKMKSLV

SEQ ID NO: 8337 - protein, 264 aa, Zea mays subsp. mays
  peptide (1)..(264): Ceres Seq. ID no. 13493672
  misc_feature (32)..(71): Pfam Name: Tesmin/TSO1-like CXC domain Pfam Description: Tesmin/TSO1-like CXC domain
  misc_feature (1)..(104): Homolog of NCBI NO: 34393829 NR Description: putative CXC domain protein TSO1 [Oryza sativa
  misc_feature (1)..(116): Homolog of NCBI NO: 15028139 NR Description: putative DNA binding protein [Arabidopsis
  misc_feature (1)..(116): Homolog of NCBI NO: 23297130 NR Description: putative DNA binding protein [Arabidopsis
  misc_feature (1)..(116): Homolog of NCBI NO: 6739821 NR Description: putative DNA binding protein [Arabidopsis >gi|7767425|gb|AAF69124.1|AF204059_1 CXC domain protein TSO1
  misc_feature (1)..(116): Homolog of NCBI NO: 30686784 NR Description: DNA binding protein -related [Arabidopsis
  misc_feature (1)..(78): Homolog of NCBI NO: 7767427 NR Description: CXC domain containing TSO1-like protein 1
  misc_feature (1)..(78): Homolog of NCBI NO: 18403510 NR Description: CXC domain containing TSO1-related protein 1 [Arabidopsis thaliana] >gi|20466374|gb|AAM20504.1| unknown [Arabidopsis thaliana] >gi|22136318|gb|AAM91237.1| unknown
  misc_feature (1)..(128): Homolog of NCBI NO: 40241245 NR Description: cysteine-rich polycomb-like protein [Lotus
MATVLPLKPVQTFEAGQDIVEQVIRSPMDLIRRKCTCKKSGCLKKYCDCYQGGAGCSINCKCDDCRNPFGRKVGVILDGKSSLTAPILHERNGTEVDSSDEEDDFYMNRQLSPIPPSPVSRESSFQQETLVGVEVQTMNGHLYPKPLTQVRPEPSSWQLSRRPIEEPRGEIWRFSRRPSEDGTSDAMEVHAVAPRESKKAAEVRGDRFGIPRCIEVMSAMAELSPVEKSLAPDVFLDASNREIFLSLSVDIRPIWLRRKMKSLV

SEQ ID NO: 8338 - DNA, 2002 bp, Zea mays subsp. mays
  misc_feature (1)..(2002): Ceres Seq. ID no. 12374270
  misc_feature: MA Experiment ID: 108535 Result: Up-regulated in Transcription
  misc_feature: MA Experiment 108535 PARAMETER Experiment Name: Zm_Meristem_P Parameter: Age (day) Value: 8
  misc_feature: MA Experiment 108535 PARAMETER Experiment Name: Zm_Meristem_P Parameter: Organism Value: Zea mays
  misc_feature: MA Experiment 108535 PARAMETER Experiment Name: Zm_Meristem_P Parameter: Plant Line Value: 35A19
  misc_feature: MA Experiment 108535 PARAMETER Experiment Name: Zm_Meristem_P Parameter: Tissue Value: Root Meristem vs. Above Root Meristem
  misc_feature: MA Experiment ID: 108544 Result: Down-regulated in Transcription
gccaggatgacaaaatttcccactccactcgaattaaaaccctagcggcaaaaccttcgctctgcgccgccgtcgcctgctcccgtcccgccaccacatccgcccaggagctcgccgtcggggaggctgctcgaggagccgcgctgtctctcccgcgccgcgaccttcgccctcgccgccgccatgatctgcgcgatctccggtgaggtgccggacgagccggtggtgtcgaagaagtcggggcttctcttcgagcggcggctcatcgagcgctacattgaggaccatggcaagtgccccatcaccaaggatgagcttactatggatgatatcgtgccggtcaataccaacaaggtcgtgaagcccaggcctttgcaggctgcaagcattccaggactccttgggatttttcagaacgagtgggatgctctcatgctttctaattttgctttggagcagcagctacacacagcaagacaagaacttagtcatgcactctaccagcatgacgctgcctgccgtgttatagccaggttgaagaaggaaagagatgaggctagagcacttttggctcaagctgagagacagattccagcatcagttgcaggagctgctcctgcagctgttgtttccaatggaaaaagagcaatggaagatgaaattggccctgacggaaagaagattcgtcctggtatcaaccctgtcatgattgatgaacttacagagtgtaataccatgctttcagcacagcgtaagaaaagacaggttcctccaactctggcaccattagatgcactcgagagatacactcaaatctccagccatccccttcataagacaaacaaaccaggcattttgtccatggatgttcatccttcaaaggatgttgttgcaactgggggtatcgatacaaatgcagtaatctttgatcggtcatctggtcaaatcttgtgcacgcttactggtcactcaaagaagataaccactttaaagtttgttccacgggatcaactctttgtaactggatcagcagataagactgttcgcatttggcaagagaacgagaatggaaactataactgcgtccatacattgaaagatcatactgctgaggttgaagctgttacagtacatgcgactcagaagtattttgtgagtgcttccaaggataattcgtggtgcttctatgatatttcaacaggatcttgcctgacacaggttggcgaggcttcaggacaagagggatatacatccgcgtctttccatccagatggtcttatccttggaacaggaactactgatgctgttgttaaaatttgggatgtgaagactcagtcgaatgtcgcgaagtttgaggggcatgtaggaccagtcactgctatgtccttctctgaaaatggttacttcctagcgactgctgctcatgatggtgtcaagctttgggatcttcggaaattaagaaattttaggaccttctctccctatgattcagatacgccaacaaatactgtggaatttgattttagtggaaactatcttgccattggtggttcagatataagggtctaccaagtagctaatgttaaggccgaatggaatctcatcaagacattaccagatttatctggaacagggaaagtaacttcggtaaagttcggagcagatgctaagtacatagccgtaggttctatggaccgcaatctacggatatttggcctccctggagacgaccaaatggaggaatcaaccacagcggcagagtgaggaaaatccatggtacctaatttcctcctcctggtatactccgcaatatgttctgatgatgggtagactgagtgcaaatggatacatcacgagagaagggtcctcgcggcgatgaactggcttgagcttcggtcggtgtaaacaagctgtgacattattgtattgtaggcctcactaattcttctgatggggatacaatttgttttgatgagtacgagtgtacgacgctaaacagcct

SEQ ID NO: 8339 - protein, 526 aa, Zea mays subsp. mays
  peptide (1)..(526): Ceres Seq. ID no. 12374271
  misc_feature (1)..(63): Pfam Name: U-box domain Pfam Description: U-box domain
  misc_feature (1)..(526): Homolog of NCBI NO: 37535206 NR Description: putative WD-repeat containing protein [Oryza
  misc_feature (1)..(521): Homolog of NCBI NO: 18390401 NR Description: putative pre-mRNA splicing factor PRP19; protein At1g04510.1, supported by cDNA: gi_14532631 [Arabidopsis
  misc_feature (1)..(506): Homolog of NCBI NO: 30685651 NR Description: transducin / WD-40 repeat protein family
  misc_feature (1)..(506): Homolog of NCBI NO: 30685653 NR Description: transducin / WD-40 repeat protein family
  misc_feature (1)..(285): Homolog of NCBI NO: 25408261 NR Description: probable PRP19-like spliceosomal protein
  misc_feature (310)..(506): Homolog of NCBI NO: 25408261 NR Description: probable PRP19-like spliceosomal protein
  misc_feature (1)..(512): Homolog of NCBI NO: 28278498 NR Description: Similar to nuclear matrix protein NMP200 related
  misc_feature (1)..(512): Homolog of NCBI NO: 7657381 NR Description: nuclear matrix protein NMP200 related to splicing PRP19 [Homo sapiens] >gi|5689738|emb|CAB51857.1| nuclear matrix NMP200 [Homo sapiens] >gi|14250536|gb|AAH08719.1|AAH08719 nuclear
  misc_feature (1)..(512): Homolog of NCBI NO: 19527358 NR Description: nuclear matrix protein SNEV [Mus musculus] Unknown (protein for MGC:8213) [Mus musculus] putative nuclear matrix protein SNEV [Mus musculus] [Mus
  misc_feature (1)..(512): Homolog of NCBI NO: 21326455 NR Description: neuronal differentiation-related gene [Rattus
MICAISGEVPDEPVVSKKSGLLFERRLIERYIEDHGKCPITKDELTMDDIVPVNTNKVVKPRPLQAASIPGLLGIFQNEWDALMLSNFALEQQLHTARQELSHALYQHDAACRVIARLKKERDEARALLAQAERQIPASVAGAAPAAVVSNGKRAMEDEIGPDGKKIRPGINPVMIDELTECNTMLSAQRKKRQVPPTLAPLDALERYTQISSHPLHKTNKPGILSMDVHPSKDVVATGGIDTNAVIFDRSSGQILCTLTGHSKKITTLKFVPRDQLFVTGSADKTVRIWQENENGNYNCVHTLKDHTAEVEAVTVHATQKYFVSASKDNSWCFYDISTGSCLTQVGEASGQEGYTSASFHPDGLILGTGTTDAVVKIWDVKTQSNVAKFEGHVGPVTAMSFSENGYFLATAAHDGVKLWDLRKLRNFRTFSPYDSDTPTNTVEFDFSGNYLAIGGSDIRVYQVANVKAEWNLIKTLPDLSGTGKVTSVKFGADAKYIAVGSMDRNLRIFGLPGDDQMEESTTAAE

SEQ ID NO: 8340 - protein, 480 aa, Zea mays subsp. mays
  peptide (1)..(480): Ceres Seq. ID no. 12374272
  misc_feature (1)..(480): Homolog of NCBI NO: 37535206 NR Description: putative WD-repeat containing protein [Oryza
  misc_feature (1)..(475): Homolog of NCBI NO: 18390401 NR Description: putative pre-mRNA splicing factor PRP19; protein At1g04510.1, supported by cDNA: gi_14532631 [Arabidopsis
  misc_feature (1)..(460): Homolog of NCBI NO: 30685651 NR Description: transducin / WD-40 repeat protein family
  misc_feature (1)..(460): Homolog of NCBI NO: 30685653 NR Description: transducin / WD-40 repeat protein family
  misc_feature (1)..(239): Homolog of NCBI NO: 25408261 NR Description: probable PRP19-like spliceosomal protein
  misc_feature (264)..(460): Homolog of NCBI NO: 25408261 NR Description: probable PRP19-like spliceosomal protein
  misc_feature (1)..(466): Homolog of NCBI NO: 28278498 NR Description: Similar to nuclear matrix protein NMP200 related
  misc_feature (1)..(466): Homolog of NCBI NO: 7657381 NR Description: nuclear matrix protein NMP200 related to splicing PRP19 [Homo sapiens] >gi|5689738|emb|CAB51857.1| nuclear matrix NMP200 [Homo sapiens] >gi|14250536|gb|AAH08719.1|AAH08719 nuclear
  misc_feature (1)..(466): Homolog of NCBI NO: 19527358 NR Description: nuclear matrix protein SNEV [Mus musculus] Unknown (protein for MGC:8213) [Mus musculus] putative nuclear matrix protein SNEV [Mus musculus] [Mus
  misc_feature (1)..(466): Homolog of NCBI NO: 21326455 NR Description: neuronal differentiation-related gene [Rattus
MDDIVPVNTNKVVKPRPLQAASIPGLLGIFQNEWDALMLSNFALEQQLHTARQELSHALYQHDAACRVIARLKKERDEARALLAQAERQIPASVAGAAPAAVVSNGKRAMEDEIGPDGKKIRPGINPVMIDELTECNTMLSAQRKKRQVPPTLAPLDALERYTQISSHPLHKTNKPGILSMDVHPSKDVVATGGIDTNAVIFDRSSGQILCTLTGHSKKITTLKFVPRDQLFVTGSADKTVRIWQENENGNYNCVHTLKDHTAEVEAVTVHATQKYFVSASKDNSWCFYDISTGSCLTQVGEASGQEGYTSASFHPDGLILGTGTTDAVVKIWDVKTQSNVAKFEGHVGPVTAMSFSENGYFLATAAHDGVKLWDLRKLRNFRTFSPYDSDTPTNTVEFDFSGNYLAIGGSDIRVYQVANVKAEWNLIKTLPDLSGTGKVTSVKFGADAKYIAVGSMDRNLRIFGLPGDDQMEESTTAAE

SEQ ID NO: 8341 - protein, 443 aa, Zea mays subsp. mays
  peptide (1)..(443): Ceres Seq. ID no. 12374273
  misc_feature (1)..(443): Homolog of NCBI NO: 37535206 NR Description: putative WD-repeat containing protein [Oryza
  misc_feature (1)..(438): Homolog of NCBI NO: 18390401 NR Description: putative pre-mRNA splicing factor PRP19; protein At1g04510.1, supported by cDNA: gi_14532631 [Arabidopsis
  misc_feature (1)..(423): Homolog of NCBI NO: 30685651 NR Description: transducin / WD-40 repeat protein family
  misc_feature (1)..(423): Homolog of NCBI NO: 30685653 NR Description: transducin / WD-40 repeat protein family
  misc_feature (1)..(202): Homolog of NCBI NO: 25408261 NR Description: probable PRP19-like spliceosomal protein
  misc_feature (227)..(423): Homolog of NCBI NO: 25408261 NR Description: probable PRP19-like spliceosomal protein
  misc_feature (1)..(429): Homolog of NCBI NO: 28278498 NR Description: Similar to nuclear matrix protein NMP200 related
  misc_feature (1)..(429): Homolog of NCBI NO: 7657381 NR Description: nuclear matrix protein NMP200 related to splicing PRP19 [Homo sapiens] >gi|5689738|emb|CAB51857.1| nuclear matrix NMP200 [Homo sapiens] >gi|14250536|gb|AAH08719.1|AAH08719 nuclear
  misc_feature (1)..(429): Homolog of NCBI NO: 19527358 NR Description: nuclear matrix protein SNEV [Mus musculus] Unknown (protein for MGC:8213) [Mus musculus] putative nuclear matrix protein SNEV [Mus musculus] [Mus
  misc_feature (1)..(429): Homolog of NCBI NO: 21326455 NR Description: neuronal differentiation-related gene [Rattus
MLSNFALEQQLHTARQELSHALYQHDAACRVIARLKKERDEARALLAQAERQIPASVAGAAPAAVVSNGKRAMEDEIGPDGKKIRPGINPVMIDELTECNTMLSAQRKKRQVPPTLAPLDALERYTQISSHPLHKTNKPGILSMDVHPSKDVVATGGIDTNAVIFDRSSGQILCTLTGHSKKITTLKFVPRDQLFVTGSADKTVRIWQENENGNYNCVHTLKDHTAEVEAVTVHATQKYFVSASKDNSWCFYDISTGSCLTQVGEASGQEGYTSASFHPDGLILGTGTTDAVVKIWDVKTQSNVAKFEGHVGPVTAMSFSENGYFLATAAHDGVKLWDLRKLRNFRTFSPYDSDTPTNTVEFDFSGNYLAIGGSDIRVYQVANVKAEWNLIKTLPDLSGTGKVTSVKFGADAKYIAVGSMDRNLRIFGLPGDDQMEESTTAAE

SEQ ID NO: 8342 - DNA, 916 bp, Zea mays subsp. mays; identical to SEQ ID NO: 5212
  misc_feature (1)..(916): Ceres Seq. ID no. 13625767
  misc_feature: MA Experiment ID: 108527 Result: Down-regulated in Transcription
  misc_feature: MA Experiment 108527 PARAMETER Experiment Name: Zm_5mM_NO_P Parameter: Age (day) Value: 8
  misc_feature: MA Experiment 108527 PARAMETER Experiment Name: Zm_5mM_NO_P Parameter: Organism Value: Zea mays
  misc_feature: MA Experiment 108527 PARAMETER Experiment Name: Zm_5mM_NO_P Parameter: Plant Line Value: 35A19
  misc_feature: MA Experiment 108527 PARAMETER Experiment Name: Zm_5mM_NO_P Parameter: Timepoint (hr) Value: 6
  misc_feature: MA Experiment 108527 PARAMETER Experiment Name: Zm_5mM_NO_P Parameter: Tissue Value: Aerial
  misc_feature: MA Experiment 108527 PARAMETER Experiment Name: Zm_5mM_NO_P Parameter: Treatment Value: 5mM NO vs. No Treatment
  misc_feature: MA Experiment ID: 108528 Result: Up-regulated in Transcription
  misc_feature: MA Experiment 108528 PARAMETER Experiment Name: Zm_Imbibed_Seeds_P Parameter: Age (day) Value: 5 vs. 2
  misc_feature: MA Experiment 108528 PARAMETER Experiment Name: Zm_Imbibed_Seeds_P Parameter: Organism Value: Zea mays
  misc_feature: MA Experiment 108528 PARAMETER Experiment Name: Zm_Imbibed_Seeds_P Parameter: Plant Line Value: 35A19
  misc_feature: MA Experiment 108528 PARAMETER Experiment Name: Zm_Imbibed_Seeds_P Parameter: Tissue Value: Aerial vs. Embryo
  misc_feature: MA Experiment ID: 108530 Result: Up-regulated in Transcription
  misc_feature: MA Experiment 108530 PARAMETER Experiment Name: Zm_Imbibed_Seeds_P Parameter: Age (day) Value: 6 vs. 2
  misc_feature: MA Experiment 108530 PARAMETER Experiment Name: Zm_Imbibed_Seeds_P Parameter: Organism Value: Zea mays
  misc_feature: MA Experiment 108530 PARAMETER Experiment Name: Zm_Imbibed_Seeds_P Parameter: Plant Line Value: 35A19
  misc_feature: MA Experiment 108530 PARAMETER Experiment Name: Zm_Imbibed_Seeds_P Parameter: Tissue Value: Aerial vs. Embryo
  misc_feature: MA Experiment ID: 108536 Result: Down-regulated in Transcription
  misc_feature: MA Experiment 108536 PARAMETER Experiment Name: Zm_Meristem_P Parameter: Age (day) Value: 8
  misc_feature: MA Experiment 108536 PARAMETER Experiment Name: Zm_Meristem_P Parameter: Organism Value: Zea mays
  misc_feature: MA Experiment 108536 PARAMETER Experiment Name: Zm_Meristem_P Parameter: Plant Line Value: 35A19
  misc_feature: MA Experiment 108536 PARAMETER Experiment Name: Zm_Meristem_P Parameter: Tissue Value: Shoot Meristem vs. Above Shoot Meristem
  misc_feature: MA Experiment ID: 108545 Result: Up-regulated in Transcription
  misc_feature: MA Experiment 108545 PARAMETER Experiment Name: Zm_Imbibed_Seeds_P Parameter: Age (day) Value: 3 vs. 2
  misc_feature: MA Experiment 108545 PARAMETER Experiment Name: Zm_Imbibed_Seeds_P Parameter: Organism Value: Zea mays
  misc_feature: MA Experiment 108545 PARAMETER Experiment Name: Zm_Imbibed_Seeds_P Parameter: Plant Line Value: 35A19
  misc_feature: MA Experiment 108545 PARAMETER Experiment Name: Zm_Imbibed_Seeds_P Parameter: Tissue Value: Aerial vs. Embryo
  misc_feature: MA Experiment ID: 108546 Result: Down-regulated in Transcription
  misc_feature: MA Experiment 108546 PARAMETER Experiment Name: Zm_Imbibed_Seeds_P Parameter: Age (day) Value: 3 vs. 2
  misc_feature: MA Experiment 108546 PARAMETER Experiment Name: Zm_Imbibed_Seeds_P Parameter: Organism Value: Zea mays
  misc_feature: MA Experiment 108546 PARAMETER Experiment Name: Zm_Imbibed_Seeds_P Parameter: Plant Line Value: 35A19
  misc_feature: MA Experiment 108546 PARAMETER Experiment Name: Zm_Imbibed_Seeds_P Parameter: Tissue Value: Roots vs. Embryo
  misc_feature: MA Experiment ID: 108547 Result: Up-regulated in Transcription
  misc_feature: MA Experiment 108547 PARAMETER Experiment Name: Zm_Imbibed_Seeds_P Parameter: Age (day) Value: 4 vs. 2
  misc_feature: MA Experiment 108547 PARAMETER Experiment Name: Zm_Imbibed_Seeds_P Parameter: Organism Value: Zea mays
  misc_feature: MA Experiment 108547 PARAMETER Experiment Name: Zm_Imbibed_Seeds_P Parameter: Plant Line Value: 35A19
  misc_feature: MA Experiment 108547 PARAMETER Experiment Name: Zm_Imbibed_Seeds_P Parameter: Tissue Value: Aerial vs. Embryo
  misc_feature: MA Experiment ID: 108687 Result: Down-regulated in Transcription
  misc_feature: MA Experiment 108687 PARAMETER Experiment Name: Zm_Embryos-Flowers__P Parameter: Tissue Value: Embryo vs. Aerial+
  misc_feature: MA Experiment ID: 20000479 Result: Down-regulated in Transcription
  misc_feature: MA Experiment 20000479 PARAMETER Experiment Name: Zm_Drought_P Parameter: Age (day) Value: 10
  misc_feature: MA Experiment 20000479 PARAMETER Experiment Name: Zm_Drought_P Parameter: Organism Value: Zea mays
  misc_feature: MA Experiment 20000479 PARAMETER Experiment Name: Zm_Drought_P Parameter: Plant Line Value: 35A19
  misc_feature: MA Experiment 20000479 PARAMETER Experiment Name: Zm_Drought_P Parameter: Timepoint (hr) Value: 48
  misc_feature: MA Experiment 20000479 PARAMETER Experiment Name: Zm_Drought_P Parameter: Tissue Value: Aerial
  misc_feature: MA Experiment 20000479 PARAMETER Experiment Name: Zm_Drought_P Parameter: Treatment Value: Drought vs. No Drought
  misc_feature: MA Experiment ID: 20000480 Result: Down-regulated in Transcription
  misc_feature: MA Experiment 20000480 PARAMETER Experiment Name: Zm_Drought_P Parameter: Age (day) Value: 11
  misc_feature: MA Experiment 20000480 PARAMETER Experiment Name: Zm_Drought_P Parameter: Organism Value: Zea mays
  misc_feature: MA Experiment 20000480 PARAMETER Experiment Name: Zm_Drought_P Parameter: Plant Line Value: 35A19
  misc_feature: MA Experiment 20000480 PARAMETER Experiment Name: Zm_Drought_P Parameter: Timepoint (hr) Value: 72
  misc_feature: MA Experiment 20000480 PARAMETER Experiment Name: Zm_Drought_P Parameter: Tissue Value: Aerial
  misc_feature: MA Experiment 20000480 PARAMETER Experiment Name: Zm_Drought_P Parameter: Treatment Value: Drought vs. No Drought
  misc_feature: MA Experiment ID: 20000534 Result: Down-regulated in Transcription
  misc_feature: MA Experiment 20000534 PARAMETER Experiment Name: Zm_Hybrid_Pollen_P Parameter: Age (day) Value: 8
  misc_feature: MA Experiment 20000534 PARAMETER Experiment Name: Zm_Hybrid_Pollen_P Parameter: Organism Value: Zea mays
  misc_feature: MA Experiment 20000534 PARAMETER Experiment Name: Zm_Hybrid_Pollen_P Parameter: Plant Line Value: 35A19
  misc_feature: MA Experiment 20000534 PARAMETER Experiment Name: Zm_Hybrid_Pollen_P Parameter: Tissue Value: Pollen vs. Aerial
  misc_feature: MA Experiment ID: 20000626 Result: Down-regulated in Transcription
  misc_feature: MA Experiment 20000626 PARAMETER Experiment Name: Zm_Herbicide-Treatments_P Parameter: Timepoint (hr) Value: 12
  misc_feature: MA Experiment 20000626 PARAMETER Experiment Name: Zm_Herbicide-Treatments_P Parameter: Tissue Value: Aerial
  misc_feature: MA Experiment 20000626 PARAMETER Experiment Name: Zm_Herbicide-Treatments_P Parameter: Treatment Value: Roundup vs. No Treatment

SEQ ID NO: 8343 - protein, 269 aa, Zea mays subsp. mays; identical to SEQ ID NO: 5213
  peptide (1)..(269): Ceres Seq. ID no. 13625768
  misc_feature (201)..(269): Pfam Name: Ribosomal protein L7/L12 C-terminal domain Pfam Description: Ribosomal protein L7/L12 C-terminal domain
  misc_feature (201)..(269): Pfam Name: Ribosomal protein L7/L12 C-terminal domain Pfam Description: Ribosomal protein L7/L12 C-terminal domain
  misc_feature (201)..(269): Pfam Name: Ribosomal protein L7/L12 C-terminal domain Pfam Description: Ribosomal protein L7/L12 C-terminal domain
  misc_feature (87)..(269): Homolog of NCBI NO: 34912074 NR Description: putative ribosomal protein L12 [Oryza sativa
  misc_feature (87)..(269): Homolog of NCBI NO: 464517 NR Description: 50S RIBOSOMAL PROTEIN L12-1, CHLOROPLAST
  misc_feature (87)..(269): Homolog of NCBI NO: 464518 NR Description: 50S RIBOSOMAL PROTEIN L12-2, CHLOROPLAST (CL12-2) >gi|288584|emb|CAA48414.1| ribosomal protein L12 [Secale
  misc_feature (73)..(260): Homolog of NCBI NO: 1345575 NR Description: ribosomal protein L12 [Secale cereale]
  misc_feature (85)..(269): Homolog of NCBI NO: 4176422 NR Description: ribosomal protein L12 [Oryza sativa (japonica
  misc_feature (87)..(269): Homolog of NCBI NO: 464517 NR Description: 50S RIBOSOMAL PROTEIN L12-1, CHLOROPLAST
  misc_feature (73)..(260): Homolog of NCBI NO: 1345575 NR Description: ribosomal protein L12 [Secale cereale]
  misc_feature (87)..(269): Homolog of NCBI NO: 464518 NR Description: 50S RIBOSOMAL PROTEIN L12-2, CHLOROPLAST (CL12-2) >gi|288584|emb|CAA48414.1| ribosomal protein L12 [Secale
  misc_feature (87)..(269): Homolog of NCBI NO: 464517 NR Description: 50S RIBOSOMAL PROTEIN L12-1, CHLOROPLAST
  misc_feature (87)..(269): Homolog of NCBI NO: 34912074 NR Description: putative ribosomal protein L12 [Oryza sativa
  misc_feature (87)..(268): Homolog of NCBI NO: 133085 NR Description: 50S RIBOSOMAL PROTEIN L12, CHLOROPLAST PRECURSOR
  misc_feature (87)..(269): Homolog of NCBI NO: 133088 NR Description: 50S RIBOSOMAL PROTEIN L12, CHLOROPLAST PRECURSOR
  misc_feature (87)..(269): Homolog of NCBI NO: 20020 NR Description: ribosomal protein L12-1a [Nicotiana tabacum]
  misc_feature (87)..(269): Homolog of NCBI NO: 548746 NR Description: 50S RIBOSOMAL PROTEIN L12, CHLOROPLAST PRECURSOR
  misc_feature (87)..(269): Homolog of NCBI NO: 418872 NR Description: ribosomal protein L12.1 precursor, chloroplast -
  misc_feature (85)..(269): Homolog of NCBI NO: 4176422 NR Description: ribosomal protein L12 [Oryza sativa (japonica
  misc_feature (87)..(268): Homolog of NCBI NO: 133085 NR Description: 50S RIBOSOMAL PROTEIN L12, CHLOROPLAST PRECURSOR
  misc_feature (87)..(269): Homolog of NCBI NO: 133088 NR Description: 50S RIBOSOMAL PROTEIN L12, CHLOROPLAST PRECURSOR
  misc_feature (87)..(269): Homolog of NCBI NO: 20020 NR Description: ribosomal protein L12-1a [Nicotiana tabacum]
  misc_feature (87)..(269): Homolog of NCBI NO: 548746 NR Description: 50S RIBOSOMAL PROTEIN L12, CHLOROPLAST PRECURSOR
  misc_feature (87)..(269): Homolog of NCBI NO: 418872 NR Description: ribosomal protein L12.1 precursor, chloroplast -
  misc_feature (85)..(269): Homolog of NCBI NO: 4176422 NR Description: ribosomal protein L12 [Oryza sativa (japonica
  misc_feature (73)..(260): Homolog of NCBI NO: 1345575 NR Description: ribosomal protein L12 [Secale cereale]
  misc_feature (87)..(269): Homolog of NCBI NO: 464518 NR Description: 50S RIBOSOMAL PROTEIN L12-2, CHLOROPLAST (CL12-2) >gi|288584|emb|CAA48414.1| ribosomal protein L12 [Secale
  misc_feature (87)..(269): Homolog of NCBI NO: 34912074 NR Description: putative ribosomal protein L12 [Oryza sativa
  misc_feature (87)..(269): Homolog of NCBI NO: 418872 NR Description: ribosomal protein L12.1 precursor, chloroplast -
  misc_feature (87)..(269): Homolog of NCBI NO: 548746 NR Description: 50S RIBOSOMAL PROTEIN L12, CHLOROPLAST PRECURSOR
  misc_feature (87)..(269): Homolog of NCBI NO: 20020 NR Description: ribosomal protein L12-1a [Nicotiana tabacum]
  misc_feature (87)..(269): Homolog of NCBI NO: 133088 NR Description: 50S RIBOSOMAL PROTEIN L12, CHLOROPLAST PRECURSOR
  misc_feature (87)..(268): Homolog of NCBI NO: 133085 NR Description: 50S RIBOSOMAL PROTEIN L12, CHLOROPLAST PRECURSOR
  misc_feature (42)..(42): Xaa is any aa, unknown or other

SEQ ID NO: 8344 - protein, 183 aa, Zea mays subsp. mays; identical to SEQ ID NO: 5214
  peptide (1)..(183): Ceres Seq. ID no. 13625769
  misc_feature (115)..(183): Pfam Name: Ribosomal protein L7/L12 C-terminal domain Pfam Description: Ribosomal protein L7/L12 C-terminal domain
  misc_feature (115)..(183): Pfam Name: Ribosomal protein L7/L12 C-terminal domain Pfam Description: Ribosomal protein L7/L12 C-terminal domain
  misc_feature (115)..(183): Pfam Name: Ribosomal protein L7/L12 C-terminal domain Pfam Description: Ribosomal protein L7/L12 C-terminal domain
  misc_feature (1)..(183): Homolog of NCBI NO: 34912074 NR Description: putative ribosomal protein L12 [Oryza sativa
  misc_feature (1)..(183): Homolog of NCBI NO: 464517 NR Description: 50S RIBOSOMAL PROTEIN L12-1, CHLOROPLAST
  misc_feature (1)..(183): Homolog of NCBI NO: 464518 NR Description: 50S RIBOSOMAL PROTEIN L12-2, CHLOROPLAST (CL12-2) >gi|288584|emb|CAA48414.1| ribosomal protein L12 [Secale
  misc_feature (1)..(174): Homolog of NCBI NO: 1345575 NR Description: ribosomal protein L12 [Secale cereale]
  misc_feature (1)..(183): Homolog of NCBI NO: 4176422 NR Description: ribosomal protein L12 [Oryza sativa (japonica
  misc_feature (1)..(183): Homolog of NCBI NO: 464517 NR Description: 50S RIBOSOMAL PROTEIN L12-1, CHLOROPLAST
  misc_feature (1)..(174): Homolog of NCBI NO: 1345575 NR Description: ribosomal protein L12 [Secale cereale]
  misc_feature (1)..(183): Homolog of NCBI NO: 464518 NR Description: 50S RIBOSOMAL PROTEIN L12-2, CHLOROPLAST (CL12-2) >gi|288584|emb|CAA48414.1| ribosomal protein L12 [Secale
  misc_feature (1)..(183): Homolog of NCBI NO: 464517 NR Description: 50S RIBOSOMAL PROTEIN L12-1, CHLOROPLAST
  misc_feature (1)..(183): Homolog of NCBI NO: 34912074 NR Description: putative ribosomal protein L12 [Oryza sativa
  misc_feature (1)..(182): Homolog of NCBI NO: 133085 NR Description: 50S RIBOSOMAL PROTEIN L12, CHLOROPLAST PRECURSOR
  misc_feature (1)..(183): Homolog of NCBI NO: 133088 NR Description: 50S RIBOSOMAL PROTEIN L12, CHLOROPLAST PRECURSOR
  misc_feature (1)..(183): Homolog of NCBI NO: 20020 NR Description: ribosomal protein L12-1a [Nicotiana tabacum]
  misc_feature (1)..(183): Homolog of NCBI NO: 548746 NR Description: 50S RIBOSOMAL PROTEIN L12, CHLOROPLAST PRECURSOR
  misc_feature (1)..(183): Homolog of NCBI NO: 418872 NR Description: ribosomal protein L12.1 precursor, chloroplast -
  misc_feature (1)..(183): Homolog of NCBI NO: 4176422 NR Description: ribosomal protein L12 [Oryza sativa (japonica
  misc_feature (1)..(182): Homolog of NCBI NO: 133085 NR Description: 50S RIBOSOMAL PROTEIN L12, CHLOROPLAST PRECURSOR
  misc_feature (1)..(183): Homolog of NCBI NO: 133088 NR Description: 50S RIBOSOMAL PROTEIN L12, CHLOROPLAST PRECURSOR
  misc_feature (1)..(183): Homolog of NCBI NO: 20020 NR Description: ribosomal protein L12-1a [Nicotiana tabacum]
  misc_feature (1)..(183): Homolog of NCBI NO: 548746 NR Description: 50S RIBOSOMAL PROTEIN L12, CHLOROPLAST PRECURSOR
  misc_feature (1)..(183): Homolog of NCBI NO: 418872 NR Description: ribosomal protein L12.1 precursor, chloroplast -
  misc_feature (1)..(183): Homolog of NCBI NO: 4176422 NR Description: ribosomal protein L12 [Oryza sativa (japonica
  misc_feature (1)..(174): Homolog of NCBI NO: 1345575 NR Description: ribosomal protein L12 [Secale cereale]
  misc_feature (1)..(183): Homolog of NCBI NO: 464518 NR Description: 50S RIBOSOMAL PROTEIN L12-2, CHLOROPLAST (CL12-2) >gi|288584|emb|CAA48414.1| ribosomal protein L12 [Secale
  misc_feature (1)..(183): Homolog of NCBI NO: 34912074 NR Description: putative ribosomal protein L12 [Oryza sativa
  misc_feature (1)..(183): Homolog of NCBI NO: 418872 NR Description: ribosomal protein L12.1 precursor, chloroplast -
  misc_feature (1)..(183): Homolog of NCBI NO: 548746 NR Description: 50S RIBOSOMAL PROTEIN L12, CHLOROPLAST PRECURSOR
  misc_feature (1)..(183): Homolog of NCBI NO: 20020 NR Description: ribosomal protein L12-1a [Nicotiana tabacum]
  misc_feature (1)..(183): Homolog of NCBI NO: 133088 NR Description: 50S RIBOSOMAL PROTEIN L12, CHLOROPLAST PRECURSOR
  misc_feature (1)..(182): Homolog of NCBI NO: 133085 NR Description: 50S RIBOSOMAL PROTEIN L12, CHLOROPLAST PRECURSOR

SEQ ID NO: 8345 - DNA, 1255 bp, Zea mays subsp. mays
  misc_feature (1)..(1255): Ceres Seq. ID no. 12404948
  misc_feature: MA Experiment ID: 20000477 Result: Down-regulated in Transcription
  misc_feature: MA Experiment 20000477 PARAMETER Experiment Name: Zm_5mM_SA_P Parameter: Age (day) Value: 10
  misc_feature: MA Experiment 20000477 PARAMETER Experiment Name: Zm_5mM_SA_P Parameter: Organism Value: Zea mays
  misc_feature: MA Experiment 20000477 PARAMETER Experiment Name: Zm_5mM_SA_P Parameter: Plant Line Value: 35A19
  misc_feature: MA Experiment 20000477 PARAMETER Experiment Name: Zm_5mM_SA_P Parameter: Timepoint (hr) Value: 48
  misc_feature: MA Experiment 20000477 PARAMETER Experiment Name: Zm_5mM_SA_P Parameter: Tissue Value: Aerial
  misc_feature: MA Experiment 20000477 PARAMETER Experiment Name: Zm_5mM_SA_P Parameter: Treatment Value: 5mM SA vs. No Treatment
  misc_feature: MA Experiment ID: 20000492 Result: Down-regulated in Transcription
  misc_feature: MA Experiment 20000492 PARAMETER Experiment Name: Zm_Hybrid_Seed_Dev_P Parameter: DAP Value: 12
  misc_feature: MA Experiment 20000492 PARAMETER Experiment Name: Zm_Hybrid_Seed_Dev_P Parameter: Organism Value: Zea mays
  misc_feature: MA Experiment 20000492 PARAMETER Experiment Name: Zm_Hybrid_Seed_Dev_P Parameter: Plant Line Value: 35A19
  misc_feature: MA Experiment 20000492 PARAMETER Experiment Name: Zm_Hybrid_Seed_Dev_P Parameter: Tissue Value: Fert Kernel vs. Unfert Floret
  misc_feature: MA Experiment ID: 20000535 Result: Down-regulated in Transcription
  misc_feature: MA Experiment 20000535 PARAMETER Experiment Name: Zm_Hybrid_Seed_Dev_P Parameter: DAP Value: 30 vs. 12
  misc_feature: MA Experiment 20000535 PARAMETER Experiment Name: Zm_Hybrid_Seed_Dev_P Parameter: Organism Value: Zea mays
  misc_feature: MA Experiment 20000535 PARAMETER Experiment Name: Zm_Hybrid_Seed_Dev_P Parameter: Plant Line Value: 35A19
  misc_feature: MA Experiment 20000535 PARAMETER Experiment Name: Zm_Hybrid_Seed_Dev_P Parameter: Tissue Value: Embryo vs. Unfert Floret
atggcagatgcacaggtagtagtaactgcagctgcaaagctggcagtgtcggtgtcggtgtcgtcgtcggcgtcggtgctggggagcgggcgagcggcgcgtcgcatgattctgtcctcctgacgtggcagctaacgattccgattccctttggttgcagtgcgacgacattgacatggacatggcgcagctggagtggctgtcggggctcttcgacgacgcatccatcccgcacgagccggcgttccccggcgcggcgcccatcatcaagagctccgcgctggcggccggcgcgctgctgccgccggacaagatgggggacgcgctgctgttccgcagctccagccccatctcggtgctggagcacggcagcttcaacaacgccaacggcggtggcggcggctgctccgcgtcgtcggagtcgtcctcggcgtcctcgtcctcggagtctttctccggcagcgggagcggcgaaggccatgcgtggtcggcgcccgtgtcgccgccacccgtgctcgtcataccggcgcgcgcgcggagcaagcgctcccgcccgtccgcgttcacgcgcgccggggcggaggcgcccaccatcctcgtgccgacgcccatgtactcgtccgggccgtcccactcggaccccgagagcatcgctgagtccagcccgcacccggcgccgcccatgaagaaaaagaagaaggccaagaagccgccggcgccgcccgcgcccgcctcttccgacgacaacgacggcgacgccgactacgaggaaggcggcgagcgcacggagccgcagggctgcgccgtcaggaggtgcacgcactgccagatcgagaagacgccgcagtggcgcgcggggccgctggggcccaagaccctctgcaacgcctgtggcgtgcgctacaagtccggccgcctgttcccggagtaccgtcccgcggcgagccccaccttcgtgccgtccatccactccaactcgcacaagaaggtggtggagatgcgccagaaggctgtccggagcggtgacccgtcgtgcgacctcctgcagttcatccgccgccgggattgacgtcccggcacggtgtcgccggactgtcggtcggtctcgtcccccttatagctagctatatagtatatgtatacatgctagtatgtatgcatgcatggttgcttcagcagtcgttggtcgtcgtcgtccatcatggtcatcatcaccacttcaccggtcaccgccatggcatggatcccacccctc

SEQ ID NO: 8346 - protein, 297 aa, Zea mays subsp. mays
  peptide (1)..(297): Ceres Seq. ID no. 12404949
  misc_feature (1)..(297): Homolog of NCBI NO: 15451574 NR Description: Putative GATA-1 zinc finger protein [Oryza sativa]
  misc_feature (80)..(280): Homolog of NCBI NO: 37572443 NR Description: AG-motif binding protein-1 [Nicotiana tabacum]
  misc_feature (80)..(280): Homolog of NCBI NO: 37572451 NR Description: AG-motif binding protein-5 [Nicotiana tabacum]
  misc_feature (74)..(285): Homolog of NCBI NO: 34909448 NR Description: OSJNBa0014K08.18 [Oryza sativa (japonica
  misc_feature (84)..(278): Homolog of NCBI NO: 37536778 NR Description: putative transcription factor [Oryza sativa
  misc_feature (84)..(278): Homolog of NCBI NO: 15239503 NR Description: GATA zinc finger protein; protein id: At5g25830.1
  misc_feature (78)..(283): Homolog of NCBI NO: 15233101 NR Description: GATA zinc finger protein; protein id: supported by cDNA: gi_15724333, supported by cDNA: gi_18700239
  misc_feature (116)..(294): Homolog of NCBI NO: 15239343 NR Description: GATA zinc finger protein; protein id: At5g66320.1
  misc_feature (204)..(280): Homolog of NCBI NO: 12711287 NR Description: GATA-1 zinc finger protein [Nicotiana tabacum]
  misc_feature (212)..(284): Homolog of NCBI NO: 37572449 NR Description: AG-motif binding protein-4 [Nicotiana tabacum]
MDMAQLEWLSGLFDDASIPHEPAFPGAAPIIKSSALAAGALLPPDKMGDALLFRSSSPISVLEHGSFNNANGGGGGCSASSESSSASSSSESFSGSGSGEGHAWSAPVSPPPVLVIPARARSKRSRPSAFTRAGAEAPTILVPTPMYSSGPSHSDPESIAESSPHPAPPMKKKKKAKKPPAPPAPASSDDNDGDADYEEGGERTEPQGCAVRRCTHCQIEKTPQWRAGPLGPKTLCNACGVRYKSGRLFPEYRPAASPTFVPSIHSNSHKKVVEMRQKAVRSGDPSCDLLQFIRRRD

SEQ ID NO: 8347 - protein, 295 aa, Zea mays subsp. mays
  peptide (1)..(295): Ceres Seq. ID no. 12404950
  misc_feature (1)..(295): Homolog of NCBI NO: 15451574 NR Description: Putative GATA-1 zinc finger protein [Oryza sativa]
  misc_feature (78)..(278): Homolog of NCBI NO: 37572443 NR Description: AG-motif binding protein-1 [Nicotiana tabacum]
  misc_feature (78)..(278): Homolog of NCBI NO: 37572451 NR Description: AG-motif binding protein-5 [Nicotiana tabacum]
  misc_feature (72)..(283): Homolog of NCBI NO: 34909448 NR Description: OSJNBa0014K08.18 [Oryza sativa (japonica
  misc_feature (82)..(276): Homolog of NCBI NO: 37536778 NR Description: putative transcription factor [Oryza sativa
  misc_feature (82)..(276): Homolog of NCBI NO: 15239503 NR Description: GATA zinc finger protein; protein id: At5g25830.1
  misc_feature (76)..(281): Homolog of NCBI NO: 15233101 NR Description: GATA zinc finger protein; protein id: supported by cDNA: gi_15724333, supported by cDNA: gi_18700239
  misc_feature (114)..(292): Homolog of NCBI NO: 15239343 NR Description: GATA zinc finger protein; protein id: At5g66320.1
  misc_feature (202)..(278): Homolog of NCBI NO: 12711287 NR Description: GATA-1 zinc finger protein [Nicotiana tabacum]
  misc_feature (210)..(282): Homolog of NCBI NO: 37572449 NR Description: AG-motif binding protein-4 [Nicotiana tabacum]
MAQLEWLSGLFDDASIPHEPAFPGAAPIIKSSALAAGALLPPDKMGDALLFRSSSPISVLEHGSFNNANGGGGGCSASSESSSASSSSESFSGSGSGEGHAWSAPVSPPPVLVIPARARSKRSRPSAFTRAGAEAPTILVPTPMYSSGPSHSDPESIAESSPHPAPPMKKKKKAKKPPAPPAPASSDDNDGDADYEEGGERTEPQGCAVRRCTHCQIEKTPQWRAGPLGPKTLCNACGVRYKSGRLFPEYRPAASPTFVPSIHSNSHKKVVEMRQKAVRSGDPSCDLLQFIRRRD

SEQ ID NO: 8348 - protein, 251 aa, Zea mays subsp. mays
  peptide (1)..(251): Ceres Seq. ID no. 12404951
  misc_feature (1)..(251): Homolog of NCBI NO: 15451574 NR Description: Putative GATA-1 zinc finger protein [Oryza sativa]
  misc_feature (34)..(234): Homolog of NCBI NO: 37572443 NR Description: AG-motif binding protein-1 [Nicotiana tabacum]
  misc_feature (34)..(234): Homolog of NCBI NO: 37572451 NR Description: AG-motif binding protein-5 [Nicotiana tabacum]
  misc_feature (28)..(239): Homolog of NCBI NO: 34909448 NR Description: OSJNBa0014K08.18 [Oryza sativa (japonica
  misc_feature (38)..(232): Homolog of NCBI NO: 37536778 NR Description: putative transcription factor [Oryza sativa
  misc_feature (38)..(232): Homolog of NCBI NO: 15239503 NR Description: GATA zinc finger protein; protein id: At5g25830.1
  misc_feature (32)..(237): Homolog of NCBI NO: 15233101 NR Description: GATA zinc finger protein; protein id: supported by cDNA: gi_15724333, supported by cDNA: gi_18700239
  misc_feature (70)..(248): Homolog of NCBI NO: 15239343 NR Description: GATA zinc finger protein; protein id: At5g66320.1
  misc_feature (158)..(234): Homolog of NCBI NO: 12711287 NR Description: GATA-1 zinc finger protein [Nicotiana tabacum]
  misc_feature (166)..(238): Homolog of NCBI NO: 37572449 NR Description: AG-motif binding protein-4 [Nicotiana tabacum]
MGDALLFRSSSPISVLEHGSFNNANGGGGGCSASSESSSASSSSESFSGSGSGEGHAWSAPVSPPPVLVIPARARSKRSRPSAFTRAGAEAPTILVPTPMYSSGPSHSDPESIAESSPHPAPPMKKKKKAKKPPAPPAPASSDDNDGDADYEEGGERTEPQGCAVRRCTHCQIEKTPQWRAGPLGPKTLCNACGVRYKSGRLFPEYRPAASPTFVPSIHSNSHKKVVEMRQKAVRSGDPSCDLLQFIRRRD

SEQ ID NO: 8349 - DNA, 1614 bp, Zea mays subsp. mays; identical to SEQ ID NO: 1798
  misc_feature (1)..(1614): Ceres Seq. ID no. 12410981
  misc_feature: MA Experiment ID: 108527 Result: Down-regulated in Transcription
  misc_feature: MA Experiment 108527 PARAMETER Experiment Name: Zm_5mM_NO_P Parameter: Age (day) Value: 8
  misc_feature: MA Experiment 108527 PARAMETER Experiment Name: Zm_5mM_NO_P Parameter: Organism Value: Zea mays
  misc_feature: MA Experiment 108527 PARAMETER Experiment Name: Zm_5mM_NO_P Parameter: Plant Line Value: 35A19
  misc_feature: MA Experiment 108527 PARAMETER Experiment Name: Zm_5mM_NO_P Parameter: Timepoint (hr) Value: 6
  misc_feature: MA Experiment 108527 PARAMETER Experiment Name: Zm_5mM_NO_P Parameter: Tissue Value: Aerial
  misc_feature: MA Experiment 108527 PARAMETER Experiment Name: Zm_5mM_NO_P Parameter: Treatment Value: 5mM NO vs. No Treatment
  misc_feature: MA Experiment ID: 108528 Result: Up-regulated in Transcription
  misc_feature: MA Experiment 108528 PARAMETER Experiment Name: Zm_Imbibed_Seeds_P Parameter: Age (day) Value: 5 vs. 2
  misc_feature: MA Experiment 108528 PARAMETER Experiment Name: Zm_Imbibed_Seeds_P Parameter: Organism Value: Zea mays
  misc_feature: MA Experiment 108528 PARAMETER Experiment Name: Zm_Imbibed_Seeds_P Parameter: Plant Line Value: 35A19
  misc_feature: MA Experiment 108528 PARAMETER Experiment Name: Zm_Imbibed_Seeds_P Parameter: Tissue Value: Aerial vs. Embryo
  misc_feature: MA Experiment ID: 108530 Result: Up-regulated in Transcription
  misc_feature: MA Experiment 108530 PARAMETER Experiment Name: Zm_Imbibed_Seeds_P Parameter: Age (day) Value: 6 vs. 2
  misc_feature: MA Experiment 108530 PARAMETER Experiment Name: Zm_Imbibed_Seeds_P Parameter: Organism Value: Zea mays
  misc_feature: MA Experiment 108530 PARAMETER Experiment Name: Zm_Imbibed_Seeds_P Parameter: Plant Line Value: 35A19
  misc_feature: MA Experiment 108530 PARAMETER Experiment Name: Zm_Imbibed_Seeds_P Parameter: Tissue Value: Aerial vs. Embryo
  misc_feature: MA Experiment ID: 108543 Result: Down-regulated in Transcription
  misc_feature: MA Experiment ID: 108545 Result: Up-regulated in Transcription
  misc_feature: MA Experiment 108545 PARAMETER Experiment Name: Zm_Imbibed_Seeds_P Parameter: Age (day) Value: 3 vs. 2
  misc_feature: MA Experiment 108545 PARAMETER Experiment Name: Zm_Imbibed_Seeds_P Parameter: Organism Value: Zea mays
  misc_feature: MA Experiment 108545 PARAMETER Experiment Name: Zm_Imbibed_Seeds_P Parameter: Plant Line Value: 35A19
  misc_feature: MA Experiment 108545 PARAMETER Experiment Name: Zm_Imbibed_Seeds_P Parameter: Tissue Value: Aerial vs. Embryo
  misc_feature: MA Experiment ID: 108547 Result: Up-regulated in Transcription
  misc_feature: MA Experiment 108547 PARAMETER Experiment Name: Zm_Imbibed_Seeds_P Parameter: Age (day) Value: 4 vs. 2
  misc_feature: MA Experiment 108547 PARAMETER Experiment Name: Zm_Imbibed_Seeds_P Parameter: Organism Value: Zea mays
  misc_feature: MA Experiment 108547 PARAMETER Experiment Name: Zm_Imbibed_Seeds_P Parameter: Plant Line Value: 35A19
  misc_feature: MA Experiment 108547 PARAMETER Experiment Name: Zm_Imbibed_Seeds_P Parameter: Tissue Value: Aerial vs. Embryo
  misc_feature: MA Experiment ID: 20000626 Result: Down-regulated in Transcription
  misc_feature: MA Experiment 20000626 PARAMETER Experiment Name: Zm_Herbicide-Treatments_P Parameter: Timepoint (hr) Value: 12
  misc_feature: MA Experiment 20000626 PARAMETER Experiment Name: Zm_Herbicide-Treatments_P Parameter: Tissue Value: Aerial
  misc_feature: MA Experiment 20000626 PARAMETER Experiment Name: Zm_Herbicide-Treatments_P Parameter: Treatment Value: Roundup vs. No Treatment
  misc_feature: MA Experiment ID: 20000630 Result: Down-regulated in Transcription
  misc_feature: MA Experiment 20000630 PARAMETER Experiment Name: Zm_Herbicide-Treatments_P Parameter: Timepoint (hr) Value: 4
  misc_feature: MA Experiment 20000630 PARAMETER Experiment Name: Zm_Herbicide-Treatments_P Parameter: Tissue Value: Aerial
  misc_feature: MA Experiment 20000630 PARAMETER Experiment Name: Zm_Herbicide-Treatments_P Parameter: Treatment Value: Roundup vs. No Treatment

SEQ ID NO: 8350 - protein, 352 aa, Zea mays subsp. mays; identical to SEQ ID NO: 1799
  peptide (1)..(352): Ceres Seq. ID no. 12410982
  misc_feature (1)..(119): Pfam Name: Cupin Pfam Description: Cupin
  misc_feature (16)..(352): Homolog of NCBI NO: 29247944 NR Description: GLP_26_54603_52153 [Giardia lamblia ATCC 50803]
  misc_feature (34)..(352): Homolog of NCBI NO: 29247944 NR Description: GLP_26_54603_52153 [Giardia lamblia ATCC 50803]
  misc_feature (55)..(352): Homolog of NCBI NO: 23104258 NR Description: hypothetical protein [Azotobacter vinelandii]
  misc_feature (108)..(108): Xaa is any aa, unknown or other
  misc_feature (109)..(109): Xaa is any aa, unknown or other

SEQ ID NO: 8351 - protein, 344 aa, Zea mays subsp. mays; identical to SEQ ID NO: 1800
  peptide (1)..(344): Ceres Seq. ID no. 12410983
  misc_feature (79)..(135): Pfam Name: Carboxylesterase Pfam Description: Carboxylesterase
  misc_feature (3)..(331): Homolog of NCBI NO: 34904770 NR Description: similar to carboxylesterase [Oryza sativa
  misc_feature (1)..(334): Homolog of NCBI NO: 34904760 NR Description: similar to carboxylesterase [Oryza sativa
  misc_feature (1)..(332): Homolog of NCBI NO: 34393714 NR Description: putative esterase [Oryza sativa (japonica
  misc_feature (1)..(332): Homolog of NCBI NO: 34904774 NR Description: similar to carboxylesterase [Oryza sativa
  misc_feature (15)..(327): Homolog of NCBI NO: 34904772 NR Description: similar to carboxylesterase [Oryza sativa
  misc_feature (1)..(328): Homolog of NCBI NO: 15237783 NR Description: putative protein; protein id: At5g23530.1, by cDNA: 9482. [Arabidopsis thaliana] >gi|8809707|dbj|BAA97248.1| similarity to unknown protein~gb|AAF27018.1~gene_id:MQM1.21
  misc_feature (1)..(328): Homolog of NCBI NO: 21618039 NR Description: unknown [Arabidopsis thaliana]
  misc_feature (1)..(332): Homolog of NCBI NO: 15240483 NR Description: putative protein; protein id: At5g27320.1, by cDNA: gi_15451145 [Arabidopsis thaliana] Unknown protein [Arabidopsis thaliana]
  misc_feature (2)..(334): Homolog of NCBI NO: 34904758 NR Description: hypothetical protein~predicted by GeneMark.hmm
  misc_feature (34)..(339): Homolog of NCBI NO: 15229371 NR Description: putative protein; protein id: At3g63010.1
  misc_feature (77)..(77): Xaa is any aa, unknown or other
  misc_feature (78)..(78): Xaa is any aa, unknown or other

SEQ ID NO: 8352 - DNA, 1567 bp, Zea mays subsp. mays
  misc_feature (1)..(1567): Ceres Seq. ID no. 12407394
  misc_feature: MA Experiment ID: 108535 Result: Down-regulated in Transcription
  misc_feature: MA Experiment 108535 PARAMETER Experiment Name: Zm_Meristem_P Parameter: Age (day) Value: 8
  misc_feature: MA Experiment 108535 PARAMETER Experiment Name: Zm_Meristem_P Parameter: Organism Value: Zea mays
  misc_feature: MA Experiment 108535 PARAMETER Experiment Name: Zm_Meristem_P Parameter: Plant Line Value: 35A19
  misc_feature: MA Experiment 108535 PARAMETER Experiment Name: Zm_Meristem_P Parameter: Tissue Value: Root Meristem vs. Above Root Meristem
  misc_feature: MA Experiment ID: 108543 Result: Up-regulated in Transcription
  misc_feature: MA Experiment ID: 108544 Result: Up-regulated in Transcription
  misc_feature: MA Experiment ID: 20000108 Result: Down-regulated in Transcription
  misc_feature: MA Experiment 20000108 PARAMETER Experiment Name: Zm_Root-Tips_P Parameter: Age (day) Value: 12
  misc_feature: MA Experiment 20000108 PARAMETER Experiment Name: Zm_Root-Tips_P Parameter: Organism Value: Zea mays
  misc_feature: MA Experiment 20000108 PARAMETER Experiment Name: Zm_Root-Tips_P Parameter: Tissue Value: Root tips vs. Root mid region    35
  misc_feature: MA Experiment 20000108 PARAMETER Experiment Name: Zm_Root-Tips_P Parameter: Tissue Value: Root tips vs. Root mid region   Sequence Listing-Misc Features (4)
  misc_feature: MA Experiment ID: 20000477 Result: Down-regulated in Transcription
  misc_feature: MA Experiment 20000477 PARAMETER Experiment Name: Zm_5mM_SA_P Parameter: Age (day) Value: 10
  misc_feature: MA Experiment 20000477 PARAMETER Experiment Name: Zm_5mM_SA_P Parameter: Organism Value: Zea mays
  misc_feature: MA Experiment 20000477 PARAMETER Experiment Name: Zm_5mM_SA_P Parameter: Plant Line Value: 35A19
  misc_feature: MA Experiment 20000477 PARAMETER Experiment Name: Zm_5mM_SA_P Parameter: Timepoint (hr) Value: 48
  misc_feature: MA Experiment 20000477 PARAMETER Experiment Name: Zm_5mM_SA_P Parameter: Tissue Value: Aerial
  misc_feature: MA Experiment 20000477 PARAMETER Experiment Name: Zm_5mM_SA_P Parameter: Treatment Value: 5mM SA vs. No Treatment
  misc_feature: MA Experiment ID: 20000535 Result: Down-regulated in Transcription
  misc_feature: MA Experiment 20000535 PARAMETER Experiment Name: Zm_Hybrid_Seed_Dev_P Parameter: DAP Value: 30 vs. 12
  misc_feature: MA Experiment 20000535 PARAMETER Experiment Name: Zm_Hybrid_Seed_Dev_P Parameter: Organism Value: Zea mays
  misc_feature: MA Experiment 20000535 PARAMETER Experiment Name: Zm_Hybrid_Seed_Dev_P Parameter: Plant Line Value: 35A19
  misc_feature: MA Experiment 20000535 PARAMETER Experiment Name: Zm_Hybrid_Seed_Dev_P Parameter: Tissue Value: Embryo vs. Unfert Floret
gaacatcctaatcgaaaaaagccccagcagtttgccactcccacgcgaaacagaagccccagcagggcggcactcccgacgcgacgcccctgcttgccggccgggaggctcactcgactctgcctccacttcctcgtctgtccgttggagcacggcgccgatggcggcggcgccagcgctcgcgcgggagctgctggacgcggcgcgggagccggagttcgcggagtggcagcgcggcgtgcggcgccggatccaccagcacccggagctggccttccaggagcaccgcaccagcgcgctcgtgcgcgccgagctcgacgcgatcggcgtcccgtacgcctggcccgtcgcgcagacgggcgtcgtggccaccatcaccggccccgccgcgggccccgtgttcgcgctccgcgccgacatggacgcgctccccatccaggaaatggtagaatgggagttcaagagcaaggaagacgggaagatgcatgcgtgcggccatgacgcccacgtggcgatgcttcttggagcagctaggttgcttcagtctcggagggacgatttaaagggtacagtgaagctcgtcttccagccagccgaggagggacacgccggcgcataccacgtcctcaaggaaggcgtcctggacaacgtgcaggccatcttcggcgtgcacgtggacacggcgttgccggtggggctcgtcgggtccaggccagggccgttcctcgccggatcggcgcggttcacggcgaccatcacggggaaaggcgggcacgcagcggggccgcagcacgtcgtcgacccgatcgtcgcggcgtcctccgccgtgctcagcctccagcagctcgtcgcccgcgagaccgacccgctacagggcgcagttgtgtcggtgaccttcatcaaaggaggaggcggagctttcaatgtcatcccagaatccgtcaccatgggcggcaccttgaggagcatgacgaacgatggcatgtcctatctcgtgaaaagaatcagagaggtgatacaaggacaagccgccgtgagccgctgcgccgctacggtggacttgatggaggagaggatgaggccgtacccggccaccgtgaacgacgaggccatgtactcccacgccaaggcggtggcggagagcatgctgggcgaggccagcgtgatgctgtgcccccagttcatggcggcggaggacttcggcttctacgcgcagcggatcccggcggccttcttcagcgtcggcgtccgcgacgaggcgacggggaaggtccaccacgtgcactcaccgcacctggacatcgacgaggccgcgctccccgtcggagccgcgttgcacgccgccttggctatggagtacctgaacaaacacgcaccatgcaaataaacacaaggctctggccatcccgataatacatgtcattcttattgaagtgactgcatgccgcaaaatcttccctccttggagcggtaagaatttgctaccccgcatccgtgctctgtacgtcgaaaataaatgtgtccagacatccctgaaagattggtttggttgtactgcgcctgttcc

SEQ ID NO: 8353 - protein, 461 aa, Zea mays subsp. mays
  peptide (1)..(461): Ceres Seq. ID no. 12407395
  misc_feature (74)..(455): Pfam Name: Peptidase family M20/M25/M40 Pfam Description: Peptidase family M20/M25/M40
  misc_feature (56)..(458): Homolog of NCBI NO: 28376718 NR Description: putative IAA amidohydrolase [Oryza sativa
  misc_feature (60)..(458): Homolog of NCBI NO: 28376716 NR Description: putative IAA amidohydrolase [Oryza sativa
  misc_feature (50)..(457): Homolog of NCBI NO: 34900782 NR Description: putative IAA amidohydrolase [Oryza sativa
  misc_feature (63)..(458): Homolog of NCBI NO: 34900780 NR Description: putative IAA amidohydrolase [Oryza sativa
  misc_feature (50)..(458): Homolog of NCBI NO: 34900784 NR Description: IAA amidohydrolase-like protein~contains ESTs
  misc_feature (59)..(457): Homolog of NCBI NO: 15233011 NR Description: IAA-amino acid hydrolase (ILR1); protein id: supported by cDNA: 259555., supported by cDNA: gi_15451119, by cDNA: gi_18652313, supported by cDNA: gi_20148340 acid
  misc_feature (59)..(457): Homolog of NCBI NO: 21554648 NR Description: IAA-amino acid hydrolase (ILR1) [Arabidopsis
  misc_feature (59)..(457): Homolog of NCBI NO: 887785 NR Description: ILR1
  misc_feature (59)..(457): Homolog of NCBI NO: 18129692 NR Description: IAA amidohydrolase [Arabidopsis suecica]
  misc_feature (63)..(461): Homolog of NCBI NO: 34910396 NR Description: putative IAA-Ala hydrolase [Oryza sativa
NILIEKSPSSLPLPRETEAPAGRHSRRDAPACRPGGSLDSASTSSSVRWSTAPMAAAPALARELLDAAREPEFAEWQRGVRRRIHQHPELAFQEHRTSALVRAELDAIGVPYAWPVAQTGVVATITGPAAGPVFALRADMDALPIQEMVEWEFKSKEDGKMHACGHDAHVAMLLGAARLLQSRRDDLKGTVKLVFQPAEEGHAGAYHVLKEGVLDNVQAIFGVHVDTALPVGLVGSRPGPFLAGSARFTATITGKGGHAAGPQHVVDPIVAASSAVLSLQQLVARETDPLQGAVVSVTFIKGGGGAFNVIPESVTMGGTLRSMTNDGMSYLVKRIREVIQGQAAVSRCAATVDLMEERMRPYPATVNDEAMYSHAKAVAESMLGEASVMLCPQFMAAEDFGFYAQRIPAAFFSVGVRDEATGKVHHVHSPHLDIDEAALPVGAALHAALAMEYLNKHAPCK

SEQ ID NO: 8354 - protein, 408 aa, Zea mays subsp. mays
  peptide (1)..(408): Ceres Seq. ID no. 12407396
  misc_feature (21)..(402): Pfam Name: Peptidase family M20/M25/M40 Pfam Description: Peptidase family M20/M25/M40
  misc_feature (10)..(408): Homolog of NCBI NO: 34910396 NR Description: putative IAA-Ala hydrolase [Oryza sativa
  misc_feature (3)..(405): Homolog of NCBI NO: 28376718 NR Description: putative IAA amidohydrolase [Oryza sativa
  misc_feature (7)..(405): Homolog of NCBI NO: 28376716 NR Description: putative IAA amidohydrolase [Oryza sativa
  misc_feature (1)..(404): Homolog of NCBI NO: 34900782 NR Description: putative IAA amidohydrolase [Oryza sativa
  misc_feature (10)..(405): Homolog of NCBI NO: 34900780 NR Description: putative IAA amidohydrolase [Oryza sativa
  misc_feature (1)..(405): Homolog of NCBI NO: 34900784 NR Description: IAA amidohydrolase-like protein~contains ESTs
  misc_feature (6)..(404): Homolog of NCBI NO: 15233011 NR Description: IAA-amino acid hydrolase (ILR1); protein id: supported by cDNA: 259555., supported by cDNA: gi_15451119, by cDNA: gi_18652313, supported by cDNA: gi_20148340 acid
  misc_feature (6)..(404): Homolog of NCBI NO: 21554648 NR Description: IAA-amino acid hydrolase (ILR1) [Arabidopsis
  misc_feature (6)..(404): Homolog of NCBI NO: 887785 NR Description: ILR1
  misc_feature (6)..(404): Homolog of NCBI NO: 18129692 NR Description: IAA amidohydrolase [Arabidopsis suecica]
MAAAPALARELLDAAREPEFAEWQRGVRRRIHQHPELAFQEHRTSALVRAELDAIGVPYAWPVAQTGVVATITGPAAGPVFALRADMDALPIQEMVEWEFKSKEDGKMHACGHDAHVAMLLGAARLLQSRRDDLKGTVKLVFQPAEEGHAGAYHVLKEGVLDNVQAIFGVHVDTALPVGLVGSRPGPFLAGSARFTATITGKGGHAAGPQHVVDPIVAASSAVLSLQQLVARETDPLQGAVVSVTFIKGGGGAFNVIPESVTMGGTLRSMTNDGMSYLVKRIREVIQGQAAVSRCAATVDLMEERMRPYPATVNDEAMYSHAKAVAESMLGEASVMLCPQFMAAEDFGFYAQRIPAAFFSVGVRDEATGKVHHVHSPHLDIDEAALPVGAALHAALAMEYLNKHAPCK

SEQ ID NO: 8355 - protein, 322 aa, Zea mays subsp. mays
  peptide (1)..(322): Ceres Seq. ID no. 12407397
  misc_feature (1)..(316): Pfam Name: Peptidase family M20/M25/M40 Pfam Description: Peptidase family M20/M25/M40
  misc_feature (1)..(319): Homolog of NCBI NO: 28376718 NR Description: putative IAA amidohydrolase [Oryza sativa
  misc_feature (1)..(319): Homolog of NCBI NO: 28376716 NR Description: putative IAA amidohydrolase [Oryza sativa
  misc_feature (1)..(318): Homolog of NCBI NO: 34900782 NR Description: putative IAA amidohydrolase [Oryza sativa
  misc_feature (1)..(319): Homolog of NCBI NO: 34900780 NR Description: putative IAA amidohydrolase [Oryza sativa
  misc_feature (1)..(319): Homolog of NCBI NO: 34900784 NR Description: IAA amidohydrolase-like protein~contains ESTs
  misc_feature (1)..(318): Homolog of NCBI NO: 15233011 NR Description: IAA-amino acid hydrolase (ILR1); protein id: supported by cDNA: 259555., supported by cDNA: gi_15451119, by cDNA: gi_18652313, supported by cDNA: gi_20148340 acid
  misc_feature (1)..(318): Homolog of NCBI NO: 21554648 NR Description: IAA-amino acid hydrolase (ILR1) [Arabidopsis
  misc_feature (1)..(318): Homolog of NCBI NO: 887785 NR Description: ILR1
  misc_feature (1)..(318): Homolog of NCBI NO: 18129692 NR Description: IAA amidohydrolase [Arabidopsis suecica]
  misc_feature (1)..(322): Homolog of NCBI NO: 34910396 NR Description: putative IAA-Ala hydrolase [Oryza sativa
MDALPIQEMVEWEFKSKEDGKMHACGHDAHVAMLLGAARLLQSRRDDLKGTVKLVFQPAEEGHAGAYHVLKEGVLDNVQAIFGVHVDTALPVGLVGSRPGPFLAGSARFTATITGKGGHAAGPQHVVDPIVAASSAVLSLQQLVARETDPLQGAVVSVTFIKGGGGAFNVIPESVTMGGTLRSMTNDGMSYLVKRIREVIQGQAAVSRCAATVDLMEERMRPYPATVNDEAMYSHAKAVAESMLGEASVMLCPQFMAAEDFGFYAQRIPAAFFSVGVRDEATGKVHHVHSPHLDIDEAALPVGAALHAALAMEYLNKHAPCK

SEQ ID NO: 8356 - DNA, 1390 bp, Zea mays subsp. mays
  misc_feature (1)..(1390): Ceres Seq. ID no. 12412584
  misc_feature: MA Experiment ID: 108535 Result: Down-regulated in Transcription
  misc_feature: MA Experiment 108535 PARAMETER Experiment Name: Zm_Meristem_P Parameter: Age (day) Value: 8
  misc_feature: MA Experiment 108535 PARAMETER Experiment Name: Zm_Meristem_P Parameter: Organism Value: Zea mays
  misc_feature: MA Experiment 108535 PARAMETER Experiment Name: Zm_Meristem_P Parameter: Plant Line Value: 35A19
  misc_feature: MA Experiment 108535 PARAMETER Experiment Name: Zm_Meristem_P Parameter: Tissue Value: Root Meristem vs. Above Root Meristem
  misc_feature: MA Experiment ID: 108543 Result: Up-regulated in Transcription
  misc_feature: MA Experiment ID: 108544 Result: Up-regulated in Transcription
  misc_feature: MA Experiment ID: 20000492 Result: Up-regulated in Transcription
  misc_feature: MA Experiment 20000492 PARAMETER Experiment Name: Zm_Hybrid_Seed_Dev_P Parameter: DAP Value: 12
  misc_feature: MA Experiment 20000492 PARAMETER Experiment Name: Zm_Hybrid_Seed_Dev_P Parameter: Organism Value: Zea mays
  misc_feature: MA Experiment 20000492 PARAMETER Experiment Name: Zm_Hybrid_Seed_Dev_P Parameter: Plant Line Value: 35A19
  misc_feature: MA Experiment 20000492 PARAMETER Experiment Name: Zm_Hybrid_Seed_Dev_P Parameter: Tissue Value: Fert Kernel vs. Unfert Floret
  misc_feature: MA Experiment ID: 20001613 Result: Up-regulated in Transcription
  misc_feature: MA Experiment 20001613 PARAMETER Experiment Name: Zm_50ppm_KNO3_L-to-H_P Parameter: Age (day) Value: 20
  misc_feature: MA Experiment 20001613 PARAMETER Experiment Name: Zm_50ppm_KNO3_L-to-H_P Parameter: Organism Value: Zea mays
  misc_feature: MA Experiment 20001613 PARAMETER Experiment Name: Zm_50ppm_KNO3_L-to-H_P Parameter: Plant Line Value: 35A19
  misc_feature: MA Experiment 20001613 PARAMETER Experiment Name: Zm_50ppm_KNO3_L-to-H_P Parameter: Timepoint (hr) Value: 24
  misc_feature: MA Experiment 20001613 PARAMETER Experiment Name: Zm_50ppm_KNO3_L-to-H_P Parameter: Tissue Value: Roots
  misc_feature: MA Experiment 20001613 PARAMETER Experiment Name: Zm_50ppm_KNO3_L-to-H_P Parameter: Treatment Value: 50ppm KNO3 vs. 50ppm KCl
aaaagcccacttctgtagctgtagactgtagttctgttcctccccactcactcctgcgcttcctcgccgcgcggttccttctccctgatcctcctttggcttcgcggttcatggcgatgtggagggccgccgctaggcagctggtcgaccgggcgctcggctcaagggccgcgcacacgtctacaggcagcaaaaagatagtcggggtgttctacaaggccggggagtatgccgacaagaaccccaacttcgtcggctgcgtcgagggtgcactcggcatccgcggctggctcgagtcgcagggccatcagtacattgtcaccgatgacaaggaaggccccaactgtgaactggagaagcacattgaagacatgcatgtcctgattaccaccccattccacccagcttatgtcactgcagagaggataaagaacgcgaagaatcttgagcttcttctcacggcaggaattggctcagatcatattgatcttccagcagctgctgctgcgggcttaactgtggctgaggtcactggaagcaacactgtctctgtggcagaagatgagctcttgcgcattctgattctgctcaggaacttcttgcctgggtaccaacaggtagttcaaggcgaatggaacgtagcaggcattgcccatagagcttatgatcttgaaggaaaaactgttgggactgttggggctggtcgtattggcaggctcttgcttcagcgtcttaagccctttaactgcaacctgctttaccatgacagacttcagattgacccagagcttgagaaagaaattggggccaaatttgaggaggacctggatgctatgcttccagagtgtgatgtgattgtgatcaacacacctcttacggagaaaacaagaggcatgtttaacaaagagaggattgcaaagatgaagaaaggtgtaattgttgtgaataatgctcgaggagcaatcatggatgctcaagcagtcgcagatgcatgttctagcggtcacattgctggatacggtggtgatgtgtggttcccccaaccagcacccaaggatcacccctggcgctacatgccaaaccatgccatgacccctcacatctctgggactacaattgatgcgcagctgcggtatgcggatggtgtgagggacatgctgaataggtatttcaagggcgaggacttccccgtgcagaactacatcgtcaaggaaggccagcttgccagtcagtaccagtgaccgcgcgagatgttgctgtgccgtgtaggcttttctggtgagaagctgcgaggaagaaactcctgttgcgtacttgcgttactgtatgagtagctctgagaaacctgtcagcggccacctgtaataaaagaatgccttgctggtatcgc

SEQ ID NO: 8357 - protein, 412 aa, Zea mays subsp. mays
  peptide (1)..(412): Ceres Seq. ID no. 12412585
  misc_feature (81)..(178): Pfam Name: D-isomer specific 2-hydroxyacid dehydrogenase, Pfam Description: D-isomer specific 2-hydroxyacid dehydrogenase,
  misc_feature (38)..(412): Homolog of NCBI NO: 21263612 NR Description: Formate dehydrogenase, mitochondrial precursor dependent formate dehydrogenase) (FDH)
  misc_feature (37)..(412): Homolog of NCBI NO: 21263611 NR Description: Formate dehydrogenase, mitochondrial precursor
  misc_feature (43)..(412): Homolog of NCBI NO: 38636526 NR Description: formate dehydrogenase [Quercus robur]
  misc_feature (37)..(412): Homolog of NCBI NO: 26454627 NR Description: Formate dehydrogenase, mitochondrial precursor dependent formate dehydrogenase) (FDH)
  misc_feature (54)..(412): Homolog of NCBI NO: 542089 NR Description: formate dehydrogenase (EC 1.2.1.2) precursor,
  misc_feature (55)..(412): Homolog of NCBI NO: 15241492 NR Description: formate dehydrogenase (FDH); protein id: supported by cDNA: 7530., supported by cDNA: gi_14517547, by cDNA: gi_15810033, supported by cDNA: gi_19548046, supported
  misc_feature (154)..(352): Homolog of NCBI NO: 17017281 NR Description: formate dehydrogenase [Zea mays]
  misc_feature (69)..(310): Homolog of NCBI NO: 40738675 NR Description: FDH_EMENI Probable formate dehydrogenase
  misc_feature (309)..(412): Homolog of NCBI NO: 40738675 NR Description: FDH_EMENI Probable formate dehydrogenase
  misc_feature (32)..(412): Homolog of NCBI NO: 4572458 NR Description: NAD-dependent formate dehydrogenase
KPTSVAVDCSSVPPHSLLRFLAARFLLPDPPLASRFMAMWRAAARQLVDRALGSRAAHTSTGSKKIVGVFYKAGEYADKNPNFVGCVEGALGIRGWLESQGHQYIVTDDKEGPNCELEKHIEDMHVLITTPFHPAYVTAERIKNAKNLELLLTAGIGSDHIDLPAAAAAGLTVAEVTGSNTVSVAEDELLRILILLRNFLPGYQQVVQGEWNVAGIAHRAYDLEGKTVGTVGAGRIGRLLLQRLKPFNCNLLYHDRLQIDPELEKEIGAKFEEDLDAMLPECDVIVINTPLTEKTRGMFNKERIAKMKKGVIVVNNARGAIMDAQAVADACSSGHIAGYGGDVWFPQPAPKDHPWRYMPNHAMTPHISGTTIDAQLRYADGVRDMLNRYFKGEDFPVQNYIVKEGQLASQYQ

SEQ ID NO: 8358 - protein, 376 aa, Zea mays subsp. mays
  peptide (1)..(376): Ceres Seq. ID no. 12412586
  misc_feature (45)..(142): Pfam Name: D-isomer specific 2-hydroxyacid dehydrogenase, Pfam Description: D-isomer specific 2-hydroxyacid dehydrogenase,
  misc_feature (2)..(376): Homolog of NCBI NO: 21263612 NR Description: Formate dehydrogenase, mitochondrial precursor dependent formate dehydrogenase) (FDH)
  misc_feature (1)..(376): Homolog of NCBI NO: 21263611 NR Description: Formate dehydrogenase, mitochondrial precursor
  misc_feature (7)..(376): Homolog of NCBI NO: 38636526 NR Description: formate dehydrogenase [Quercus robur]
  misc_feature (1)..(376): Homolog of NCBI NO: 26454627 NR Description: Formate dehydrogenase, mitochondrial precursor dependent formate dehydrogenase) (FDH)
  misc_feature (18)..(376): Homolog of NCBI NO: 542089 NR Description: formate dehydrogenase (EC 1.2.1.2) precursor,
  misc_feature (19)..(376): Homolog of NCBI NO: 15241492 NR Description: formate dehydrogenase (FDH); protein id: supported by cDNA: 7530., supported by cDNA: gi_14517547, by cDNA: gi_15810033, supported by cDNA: gi_19548046, supported
  misc_feature (118)..(316): Homolog of NCBI NO: 17017281 NR Description: formate dehydrogenase [Zea mays]
  misc_feature (33)..(274): Homolog of NCBI NO: 40738675 NR Description: FDH_EMENI Probable formate dehydrogenase
  misc_feature (273)..(376): Homolog of NCBI NO: 40738675 NR Description: FDH_EMENI Probable formate dehydrogenase
  misc_feature (1)..(376): Homolog of NCBI NO: 4572458 NR Description: NAD-dependent formate dehydrogenase
MAMWRAAARQLVDRALGSRAAHTSTGSKKIVGVFYKAGEYADKNPNFVGCVEGALGIRGWLESQGHQYIVTDDKEGPNCELEKHIEDMHVLITTPFHPAYVTAERIKNAKNLELLLTAGIGSDHIDLPAAAAAGLTVAEVTGSNTVSVAEDELLRILILLRNFLPGYQQVVQGEWNVAGIAHRAYDLEGKTVGTVGAGRIGRLLLQRLKPFNCNLLYHDRLQIDPELEKEIGAKFEEDLDAMLPECDVIVINTPLTEKTRGMFNKERIAKMKKGVIVVNNARGAIMDAQAVADACSSGHIAGYGGDVWFPQPAPKDHPWRYMPNHAMTPHISGTTIDAQLRYADGVRDMLNRYFKGEDFPVQNYIVKEGQLASQYQ

SEQ ID NO: 8359 - protein, 374 aa, Zea mays subsp. mays
  peptide (1)..(374): Ceres Seq. ID no. 12412587
  misc_feature (43)..(140): Pfam Name: D-isomer specific 2-hydroxyacid dehydrogenase, Pfam Description: D-isomer specific 2-hydroxyacid dehydrogenase,
  misc_feature (1)..(374): Homolog of NCBI NO: 21263612 NR Description: Formate dehydrogenase, mitochondrial precursor dependent formate dehydrogenase) (FDH)
  misc_feature (1)..(374): Homolog of NCBI NO: 21263611 NR Description: Formate dehydrogenase, mitochondrial precursor
  misc_feature (5)..(374): Homolog of NCBI NO: 38636526 NR Description: formate dehydrogenase [Quercus robur]
  misc_feature (1)..(374): Homolog of NCBI NO: 26454627 NR Description: Formate dehydrogenase, mitochondrial precursor dependent formate dehydrogenase) (FDH)
  misc_feature (16)..(374): Homolog of NCBI NO: 542089 NR Description: formate dehydrogenase (EC 1.2.1.2) precursor,
  misc_feature (17)..(374): Homolog of NCBI NO: 15241492 NR Description: formate dehydrogenase (FDH); protein id: supported by cDNA: 7530., supported by cDNA: gi_14517547, by cDNA: gi_15810033, supported by cDNA: gi_19548046, supported
  misc_feature (116)..(314): Homolog of NCBI NO: 17017281 NR Description: formate dehydrogenase [Zea mays]
  misc_feature (31)..(272): Homolog of NCBI NO: 40738675 NR Description: FDH_EMENI Probable formate dehydrogenase
  misc_feature (271)..(374): Homolog of NCBI NO: 40738675 NR Description: FDH_EMENI Probable formate dehydrogenase
  misc_feature (1)..(374): Homolog of NCBI NO: 4572458 NR Description: NAD-dependent formate dehydrogenase
MWRAAARQLVDRALGSRAAHTSTGSKKIVGVFYKAGEYADKNPNFVGCVEGALGIRGWLESQGHQYIVTDDKEGPNCELEKHIEDMHVLITTPFHPAYVTAERIKNAKNLELLLTAGIGSDHIDLPAAAAAGLTVAEVTGSNTVSVAEDELLRILILLRNFLPGYQQVVQGEWNVAGIAHRAYDLEGKTVGTVGAGRIGRLLLQRLKPFNCNLLYHDRLQIDPELEKEIGAKFEEDLDAMLPECDVIVINTPLTEKTRGMFNKERIAKMKKGVIVVNNARGAIMDAQAVADACSSGHIAGYGGDVWFPQPAPKDHPWRYMPNHAMTPHISGTTIDAQLRYADGVRDMLNRYFKGEDFPVQNYIVKEGQLASQYQ

SEQ ID NO: 8360 - DNA, 1482 bp, Zea mays subsp. mays
  misc_feature (1)..(1482): Ceres Seq. ID no. 12369082
  misc_feature: MA Experiment ID: 108543 Result: Up-regulated in Transcription
  misc_feature: MA Experiment ID: 108544 Result: Down-regulated in Transcription
  misc_feature: MA Experiment ID: 20000477 Result: Down-regulated in Transcription
  misc_feature: MA Experiment 20000477 PARAMETER Experiment Name: Zm_5mM_SA_P Parameter: Age (day) Value: 10
  misc_feature: MA Experiment 20000477 PARAMETER Experiment Name: Zm_5mM_SA_P Parameter: Organism Value: Zea mays
  misc_feature: MA Experiment 20000477 PARAMETER Experiment Name: Zm_5mM_SA_P Parameter: Plant Line Value: 35A19
  misc_feature: MA Experiment 20000477 PARAMETER Experiment Name: Zm_5mM_SA_P Parameter: Timepoint (hr) Value: 48
  misc_feature: MA Experiment 20000477 PARAMETER Experiment Name: Zm_5mM_SA_P Parameter: Tissue Value: Aerial
  misc_feature: MA Experiment 20000477 PARAMETER Experiment Name: Zm_5mM_SA_P Parameter: Treatment Value: 5mM SA vs. No Treatment
  misc_feature: MA Experiment ID: 20000478 Result: Down-regulated in Transcription
  misc_feature: MA Experiment 20000478 PARAMETER Experiment Name: Zm_5mM_SA_P Parameter: Age (day) Value: 11
  misc_feature: MA Experiment 20000478 PARAMETER Experiment Name: Zm_5mM_SA_P Parameter: Organism Value: Zea mays
  misc_feature: MA Experiment 20000478 PARAMETER Experiment Name: Zm_5mM_SA_P Parameter: Plant Line Value: 35A19
  misc_feature: MA Experiment 20000478 PARAMETER Experiment Name: Zm_5mM_SA_P Parameter: Timepoint (hr) Value: 72
  misc_feature: MA Experiment 20000478 PARAMETER Experiment Name: Zm_5mM_SA_P Parameter: Tissue Value: Aerial
  misc_feature: MA Experiment 20000478 PARAMETER Experiment Name: Zm_5mM_SA_P Parameter: Treatment Value: 5mM SA vs. No Treatment
gacattattgccccctcttcccttcccaacccaacccattgcatttgcaagcccttttacattgcagagcgccagagcctcgctcgctctcggaacagagctaggcagctaacagacgaagaagaagcaagccaagcagaattgagagagaggcgaggacgtggcgacgacggcagccgcgatggcgacgacgacggacctggggttcgaggcgacggagctccgcctgggcctgcccggcgggggaggtggaggggagccggcgctgggcggcgaggggaggagctcttcctccgcctccggcaagaggggcttcgccgagaccatcgacctgaagctgaagctggagccagcggccgtcgtggaggcggaggaggaggaggaggaccacggcgttgctgttgcccttgagaaggaggaggaggccgggaagatgaagcggtccccgagccagagcagcgtcgccgccgccgccgccgccgtgctggctgaccccgccgagaagccgcgcgccgccaaggctcaggtggtgggatggccaccggtccggtcgttccggaagaacatcatgtccgtgcagtccgacaagggcgccggcaaagacgccgccgccgccaacggcgacaagtcctcggcggcggcaggcggcggtgccgcgttcgtgaaggtgagcttggacggcgcgccctacctgcgcaaagtggacctcaagatgtacaggagctaccagcagctgtccaaggcgctcgagaacatgttcagctccttcaccatcggaagctgtgggtctcaagggatgaacggcatgaacgagagcaagctggtggatctgctcaacggctccgagtacgtgccgacctacgaggacaaggacggggactggatgctcgtcggcgacgtgccgtgggagatgttcgtcgaatcatgcaagcgccttcggatcatgaaaggatcagaagccattggcctggcgccaagggccatggagaaatgcaagaacagaagctgaggagaagacggacggacggaagcttgcatctcagcaccaccaggggtggatggatgcaagaagaacaaatctccatggcttttgcagctctgctcgtctctgtatcatactcgtcgtccctgcccttcaggcctctgtatctccctgatcaatgaagtcgttttggtgtgtcaactgttctctccgtgcccagcttgtcagtgaaagagtcagtcagtgtccatcaagtctcatcttgtcctatacagaagagagaagccatgcatgaacatgtacctgtcctataacaatgtctttttttgctacctgtttttttttctctctctctctttttttggcacaagatgcaaaggcaccctgctcctgatcaaagggccttttgcatcataagctgtttgattataattaccatggtgtgtcagtggaacaaataactgttgcaaggtgttaaaaaaaagttgtattgtaatatg

SEQ ID NO: 8361 - protein, 275 aa, Zea mays subsp. mays
  peptide (1)..(275): Ceres Seq. ID no. 12369083
  misc_feature (7)..(60): Pfam Name: AUX/IAA family Pfam Description: AUX/IAA family
  misc_feature (88)..(275): Homolog of NCBI NO: 15229343 NR Description: auxin-induced protein; protein id: At3g04730.1, by cDNA: 32727., supported by cDNA: gi_12083209, supported by
  misc_feature (7)..(60): Homolog of NCBI NO: 15229343 NR Description: auxin-induced protein; protein id: At3g04730.1, by cDNA: 32727., supported by cDNA: gi_12083209, supported by
  misc_feature (104)..(275): Homolog of NCBI NO: 4887020 NR Description: Nt-iaa28 deduced protein [Nicotiana tabacum]
  misc_feature (7)..(55): Homolog of NCBI NO: 4887020 NR Description: Nt-iaa28 deduced protein [Nicotiana tabacum]
  misc_feature (103)..(275): Homolog of NCBI NO: 114734 NR Description: AUXIN-INDUCED PROTEIN AUX28 >gi|81759|pir||A28993
  misc_feature (7)..(94): Homolog of NCBI NO: 114734 NR Description: AUXIN-INDUCED PROTEIN AUX28 >gi|81759|pir||A28993
  misc_feature (1)..(275): Homolog of NCBI NO: 20269059 NR Description: aux/IAA protein [Populus tremula x Populus
  misc_feature (89)..(263): Homolog of NCBI NO: 20269061 NR Description: aux/IAA protein [Populus tremula x Populus
  misc_feature (5)..(55): Homolog of NCBI NO: 20269061 NR Description: aux/IAA protein [Populus tremula x Populus
  misc_feature (86)..(275): Homolog of NCBI NO: 4887022 NR Description: Nt-iaa4.1 deduced protein [Nicotiana tabacum]
MATTTDLGFEATELRLGLPGGGGGGEPALGGEGRSSSSASGKRGFAETIDLKLKLEPAAVVEAEEEEEDHGVAVALEKEEEAGKMKRSPSQSSVAAAAAAVLADPAEKPRAAKAQVVGWPPVRSFRKNIMSVQSDKGAGKDAAAANGDKSSAAAGGGAAFVKVSLDGAPYLRKVDLKMYRSYQQLSKALENMFSSFTIGSCGSQGMNGMNESKLVDLLNGSEYVPTYEDKDGDWMLVGDVPWEMFVESCKRLRIMKGSEAIGLAPRAMEKCKNRS

SEQ ID NO: 8362 - protein, 209 aa, Zea mays subsp. mays
  peptide (1)..(209): Ceres Seq. ID no. 12369084
MATGPVVPEEHHVRAVRQGRRQRRRRRQRRQVLGGGRRRCRVREGELGRRALPAQSGPQDVQELPAAVQGAREHVQLLHHRKLWVSRDERHEREQAGGSAQRLRVRADLRGQGRGLDARRRRAVGDVRRIMQAPSDHERIRSHWPGAKGHGEMQEQKLRRRRTDGSLHLSTTRGGWMQEEQISMAFAALLVSVSYSSSLPFRPLYLPDQ

SEQ ID NO: 8363 - protein, 191 aa, Zea mays subsp. mays
  peptide (1)..(191): Ceres Seq. ID no. 12369085
  misc_feature (4)..(183): Pfam Name: AUX/IAA family Pfam Description: AUX/IAA family
  misc_feature (4)..(191): Homolog of NCBI NO: 15229343 NR Description: auxin-induced protein; protein id: At3g04730.1, by cDNA: 32727., supported by cDNA: gi_12083209, supported by
  misc_feature (20)..(191): Homolog of NCBI NO: 4887020 NR Description: Nt-iaa28 deduced protein [Nicotiana tabacum]
  misc_feature (19)..(191): Homolog of NCBI NO: 114734 NR Description: AUXIN-INDUCED PROTEIN AUX28 >gi|81759|pir||A28993
  misc_feature (1)..(191): Homolog of NCBI NO: 20269059 NR Description: aux/IAA protein [Populus tremula x Populus
  misc_feature (5)..(179): Homolog of NCBI NO: 20269061 NR Description: aux/IAA protein [Populus tremula x Populus
  misc_feature (2)..(191): Homolog of NCBI NO: 4887022 NR Description: Nt-iaa4.1 deduced protein [Nicotiana tabacum]
  misc_feature (20)..(191): Homolog of NCBI NO: 20385508 NR Description: auxin-regulated protein [Populus tremula x
  misc_feature (75)..(191): Homolog of NCBI NO: 5139697 NR Description: expressed in cucumber hypocotyls [Cucumis sativus]
  misc_feature (1)..(46): Homolog of NCBI NO: 5139697 NR Description: expressed in cucumber hypocotyls [Cucumis sativus]
  misc_feature (18)..(191): Homolog of NCBI NO: 21593352 NR Description: indoleacetic acid (IAA)-inducible gene (IAA7)
MKRSPSQSSVAAAAAAVLADPAEKPRAAKAQVVGWPPVRSFRKNIMSVQSDKGAGKDAAAANGDKSSAAAGGGAAFVKVSLDGAPYLRKVDLKMYRSYQQLSKALENMFSSFTIGSCGSQGMNGMNESKLVDLLNGSEYVPTYEDKDGDWMLVGDVPWEMFVESCKRLRIMKGSEAIGLAPRAMEKCKNRS

SEQ ID NO: 8364 - DNA, 1630 bp, Zea mays subsp. mays
  misc_feature (1)..(1630): Ceres Seq. ID no. 12356575
  misc_feature: MA Experiment ID: 20000477 Result: Down-regulated in Transcription
  misc_feature: MA Experiment 20000477 PARAMETER Experiment Name: Zm_5mM_SA_P Parameter: Age (day) Value: 10
  misc_feature: MA Experiment 20000477 PARAMETER Experiment Name: Zm_5mM_SA_P Parameter: Organism Value: Zea mays
  misc_feature: MA Experiment 20000477 PARAMETER Experiment Name: Zm_5mM_SA_P Parameter: Plant Line Value: 35A19
  misc_feature: MA Experiment 20000477 PARAMETER Experiment Name: Zm_5mM_SA_P Parameter: Timepoint (hr) Value: 48
  misc_feature: MA Experiment 20000477 PARAMETER Experiment Name: Zm_5mM_SA_P Parameter: Tissue Value: Aerial
  misc_feature: MA Experiment 20000477 PARAMETER Experiment Name: Zm_5mM_SA_P Parameter: Treatment Value: 5mM SA vs. No Treatment
  misc_feature: MA Experiment ID: 20000478 Result: Down-regulated in Transcription
  misc_feature: MA Experiment 20000478 PARAMETER Experiment Name: Zm_5mM_SA_P Parameter: Age (day) Value: 11
  misc_feature: MA Experiment 20000478 PARAMETER Experiment Name: Zm_5mM_SA_P Parameter: Organism Value: Zea mays
  misc_feature: MA Experiment 20000478 PARAMETER Experiment Name: Zm_5mM_SA_P Parameter: Plant Line Value: 35A19
  misc_feature: MA Experiment 20000478 PARAMETER Experiment Name: Zm_5mM_SA_P Parameter: Timepoint (hr) Value: 72
  misc_feature: MA Experiment 20000478 PARAMETER Experiment Name: Zm_5mM_SA_P Parameter: Tissue Value: Aerial
  misc_feature: MA Experiment 20000478 PARAMETER Experiment Name: Zm_5mM_SA_P Parameter: Treatment Value: 5mM SA vs. No Treatment
gcggccaccggcttattcaagagcaccaaaagagtttcggcatggatggatagcacacagcgagcgagcgagagcggtgagcccggccaccagcgccggaggccgtcgtcgtcttactagccgacgctcgacttgggcatgaattgctagccgcgcgggtgagagattgctaggtagccagctaggtacggtgtggggagttgaatcggaggtctgccgctcgaggcggcggcggcagaaggccggtaggatgaagaagctccactggctggtgcggttcctgttcgggccggtgccggtctacttctcggcgctggccatcctcatcgtgctcaccaacgcgcagtacttcgggctggtgggcgtcggcgtggcgccgcgcaccgcgaagctggcctcctcggcgcccgtggtcagcgtcatgaagtactgcgacatcttccgcggcgagtgggtgccggacgcggaggcgccctactacaaccacaagacgtgccacatgatccaggagcaccagaactgcctcaagtacggccgccccgacctgggcttcctcaagtggcggtggcggccctccggatgcgagctgccgcgcttcgacccgctgcagttcctgcagttcgcccgcgggaagtcgctggccttcgtcggggactcgctggcgcggaaccacatgcagtcgctgctctgcctcctgtcccaggtggcgtatcccaaggacctgtcggcgaacccgtcggaccagaacaaggtgtaccactaccgggcgtacaacttcaccatcagcatgttctggtcgccgttcctggtgcgcgcccgggagcccgaccacgacggccccgcgcacacgggccactggagcctctacctggacgagcccgacgacaagtgggtgtcccagatgccccgcttcgactacgtgctggtgtcggcggccaactggttctcccgcccctccctcttctacgagcggcggcgcctcgtcgggtgcagcttctgcagccgccagtacggcgtgcccgacctgacgctctactactcgcagcgccgcgcgtggcgcgtggcgctgcgcgccatcaacgacctggagcgcctgcgagggcgcgtcatcctgcgcatgctctccccgatgtcgcacttcgagaacgggacctgggaccacggcggcgactgcaggcgcacgcagccgctgcgggcgaaccagaccgccatggagggccgcgacctgcacttctacaccgcgcagatggaggagttccgcgccgcggagaaggccgccgccgagaaggggcggcgcctgatgctcatggacgccacggcggcgatgctgatgcggcccgacggccaccccagccgctacgggcactggcccaacgagaaggtgcagctctacaacgactgcatccactggtgcctcccgggacccatcgacatctggaacgacatgctcttccagatgctcctcgcctagcagcaagcagcaaagattaaaaaaaaaactcagcaattcggtcgccggtaaccgtgcacagattggccttcttttttttgccttgtttcgtttttttaaaaaaagaagaaaatggtgcaattttgacaagcaaggattcgaaattcgccggtaaccccc

SEQ ID NO: 8365 - protein, 406 aa, Zea mays subsp. mays
  peptide (1)..(406): Ceres Seq. ID no. 12356576
  misc_feature (232)..(404): Pfam Name: Arabidopsis proteins of unknown function Pfam Description: Arabidopsis proteins of unknown function
  misc_feature (3)..(405): Homolog of NCBI NO: 34911880 NR Description: OSJNBb0032K15.17 [Oryza sativa (japonica
  misc_feature (9)..(404): Homolog of NCBI NO: 34911888 NR Description: OSJNBb0032K15.21 [Oryza sativa (japonica
  misc_feature (20)..(405): Homolog of NCBI NO: 34898638 NR Description: contains ESTs to Oryza sativa chromosome 1, OSJNBb0032K15.17~unknown protein
  misc_feature (54)..(404): Homolog of NCBI NO: 15237213 NR Description: putative protein; protein id: At5g15900.1
  misc_feature (61)..(404): Homolog of NCBI NO: 15237211 NR Description: putative protein; protein id: At5g15890.1
  misc_feature (1)..(404): Homolog of NCBI NO: 15232914 NR Description: hypothetical protein; protein id: At3g28150.1, by cDNA: gi_17979060 [Arabidopsis thaliana] emb|CAA23045.1~gene_id:MMG15.18~similar to unknown protein
  misc_feature (56)..(405): Homolog of NCBI NO: 30678135 NR Description: expressed protein [Arabidopsis thaliana] unknown protein [Arabidopsis thaliana]
  misc_feature (17)..(405): Homolog of NCBI NO: 15234058 NR Description: hypothetical protein; protein id: At4g01080.1
  misc_feature (17)..(405): Homolog of NCBI NO: 28393189 NR Description: unknown protein [Arabidopsis thaliana]
  misc_feature (71)..(405): Homolog of NCBI NO: 25518737 NR Description: hypothetical protein F6F3.23 [imported] - thaliana >gi|9665154|gb|AAF97338.1|AC023628_19 Unknown protein
MKKLHWLVRFLFGPVPVYFSALAILIVLTNAQYFGLVGVGVAPRTAKLASSAPVVSVMKYCDIFRGEWVPDAEAPYYNHKTCHMIQEHQNCLKYGRPDLGFLKWRWRPSGCELPRFDPLQFLQFARGKSLAFVGDSLARNHMQSLLCLLSQVAYPKDLSANPSDQNKVYHYRAYNFTISMFWSPFLVRAREPDHDGPAHTGHWSLYLDEPDDKWVSQMPRFDYVLVSAANWFSRPSLFYERRRLVGCSFCSRQYGVPDLTLYYSQRRAWRVALRAINDLERLRGRVILRMLSPMSHFENGTWDHGGDCRRTQPLRANQTAMEGRDLHFYTAQMEEFRAAEKAAAEKGRRLMLMDATAAMLMRPDGHPSRYGHWPNEKVQLYNDCIHWCLPGPIDIWNDMLFQMLLA

SEQ ID NO: 8366 - protein, 349 aa, Zea mays subsp. mays
  peptide (1)..(349): Ceres Seq. ID no. 12356577
  misc_feature (175)..(347): Pfam Name: Arabidopsis proteins of unknown function Pfam Description: Arabidopsis proteins of unknown function
  misc_feature (1)..(348): Homolog of NCBI NO: 34911880 NR Description: OSJNBb0032K15.17 [Oryza sativa (japonica
  misc_feature (1)..(347): Homolog of NCBI NO: 34911888 NR Description: OSJNBb0032K15.21 [Oryza sativa (japonica
  misc_feature (1)..(348): Homolog of NCBI NO: 34898638 NR Description: contains ESTs to Oryza sativa chromosome 1, OSJNBb0032K15.17~unknown protein
  misc_feature (1)..(347): Homolog of NCBI NO: 15237213 NR Description: putative protein; protein id: At5g15900.1
  misc_feature (4)..(347): Homolog of NCBI NO: 15237211 NR Description: putative protein; protein id: At5g15890.1
  misc_feature (1)..(347): Homolog of NCBI NO: 15232914 NR Description: hypothetical protein; protein id: At3g28150.1, by cDNA: gi_17979060 [Arabidopsis thaliana] emb|CAA23045.1~gene_id:MMG15.18~similar to unknown protein
  misc_feature (1)..(348): Homolog of NCBI NO: 30678135 NR Description: expressed protein [Arabidopsis thaliana] unknown protein [Arabidopsis thaliana]
  misc_feature (1)..(348): Homolog of NCBI NO: 15234058 NR Description: hypothetical protein; protein id: At4g01080.1
  misc_feature (1)..(348): Homolog of NCBI NO: 28393189 NR Description: unknown protein [Arabidopsis thaliana]
  misc_feature (14)..(348): Homolog of NCBI NO: 25518737 NR Description: hypothetical protein F6F3.23 [imported] - thaliana >gi|9665154|gb|AAF97338.1|AC023628_19 Unknown protein
MKYCDIFRGEWVPDAEAPYYNHKTCHMIQEHQNCLKYGRPDLGFLKWRWRPSGCELPRFDPLQFLQFARGKSLAFVGDSLARNHMQSLLCLLSQVAYPKDLSANPSDQNKVYHYRAYNFTISMFWSPFLVRAREPDHDGPAHTGHWSLYLDEPDDKWVSQMPRFDYVLVSAANWFSRPSLFYERRRLVGCSFCSRQYGVPDLTLYYSQRRAWRVALRAINDLERLRGRVILRMLSPMSHFENGTWDHGGDCRRTQPLRANQTAMEGRDLHFYTAQMEEFRAAEKAAAEKGRRLMLMDATAAMLMRPDGHPSRYGHWPNEKVQLYNDCIHWCLPGPIDIWNDMLFQMLLA

SEQ ID NO: 8367 - protein, 323 aa, Zea mays subsp. mays
  peptide (1)..(323): Ceres Seq. ID no. 12356578
  misc_feature (149)..(321): Pfam Name: Arabidopsis proteins of unknown function Pfam Description: Arabidopsis proteins of unknown function
  misc_feature (1)..(322): Homolog of NCBI NO: 34911880 NR Description: OSJNBb0032K15.17 [Oryza sativa (japonica
  misc_feature (1)..(321): Homolog of NCBI NO: 34911888 NR Description: OSJNBb0032K15.21 [Oryza sativa (japonica
  misc_feature (1)..(322): Homolog of NCBI NO: 34898638 NR Description: contains ESTs to Oryza sativa chromosome 1, OSJNBb0032K15.17~unknown protein
  misc_feature (1)..(321): Homolog of NCBI NO: 15237213 NR Description: putative protein; protein id: At5g15900.1
  misc_feature (1)..(321): Homolog of NCBI NO: 15237211 NR Description: putative protein; protein id: At5g15890.1
  misc_feature (1)..(321): Homolog of NCBI NO: 15232914 NR Description: hypothetical protein; protein id: At3g28150.1, by cDNA: gi_17979060 [Arabidopsis thaliana] emb|CAA23045.1~gene_id:MMG15.18~similar to unknown protein
  misc_feature (1)..(322): Homolog of NCBI NO: 30678135 NR Description: expressed protein [Arabidopsis thaliana] unknown protein [Arabidopsis thaliana]
  misc_feature (1)..(322): Homolog of NCBI NO: 15234058 NR Description: hypothetical protein; protein id: At4g01080.1
  misc_feature (1)..(322): Homolog of NCBI NO: 28393189 NR Description: unknown protein [Arabidopsis thaliana]
  misc_feature (1)..(322): Homolog of NCBI NO: 25518737 NR Description: hypothetical protein F6F3.23 [imported] - thaliana >gi|9665154|gb|AAF97338.1|AC023628_19 Unknown protein
MIQEHQNCLKYGRPDLGFLKWRWRPSGCELPRFDPLQFLQFARGKSLAFVGDSLARNHMQSLLCLLSQVAYPKDLSANPSDQNKVYHYRAYNFTISMFWSPFLVRAREPDHDGPAHTGHWSLYLDEPDDKWVSQMPRFDYVLVSAANWFSRPSLFYERRRLVGCSFCSRQYGVPDLTLYYSQRRAWRVALRAINDLERLRGRVILRMLSPMSHFENGTWDHGGDCRRTQPLRANQTAMEGRDLHFYTAQMEEFRAAEKAAAEKGRRLMLMDATAAMLMRPDGHPSRYGHWPNEKVQLYNDCIHWCLPGPIDIWNDMLFQMLLA

SEQ ID NO: 8368 - DNA, 1161 bp, Zea mays subsp. mays
  misc_feature (1)..(1161): Ceres Seq. ID no. 12408515
  misc_feature: MA Experiment ID: 20000534 Result: Up-regulated in Transcription
  misc_feature: MA Experiment 20000534 PARAMETER Experiment Name: Zm_Hybrid_Pollen_P Parameter: Age (day) Value: 8
  misc_feature: MA Experiment 20000534 PARAMETER Experiment Name: Zm_Hybrid_Pollen_P Parameter: Organism Value: Zea mays
  misc_feature: MA Experiment 20000534 PARAMETER Experiment Name: Zm_Hybrid_Pollen_P Parameter: Plant Line Value: 35A19
  misc_feature: MA Experiment 20000534 PARAMETER Experiment Name: Zm_Hybrid_Pollen_P Parameter: Tissue Value: Pollen vs. Aerial
atctagccctttgtgtgagccgccgtcgcgcactcgccgctccgcccctacgcgcagtcgccacgggagctcgttcctctccggcggcagcaccctccactataacccaacccgcaagaaaaaacccgcagcagagaagaggagtcgccgcgaccgagagctccagagcacgcccccgccacagcctccgacgatggatccaaagatgacagaggtgacccagatgttcgcccgcttcaaggcggcctacgcccgcaacgacctcaacacctgcgtcaccctcctctcgcagctcaaggtccatctcacccaattccccagccttccgcccttgtttcagcagacaccgaacattgtggaggagctcaaacttgcaagggacatttatgagcatgctgttgttttgagtgtgaaacttgaggaccaagatgcgtttgaacgcgatttctgccagctgaagccttattacatggatacatgtggcataattcccgcctcgccagaggagtacccaattttgggactcaatcttctgaggctgttggttcagaatagaattgccgaattccacactgagctggagcttttacctgccaaggcactcgagcatccttgcatcaagcatgctgtagagcttgagcaatccttcatggagggtgcctacaaccgagtgttaagcgctcggcaggctgtgccacatgagacctacgtttacttcatcgaccttctcgccaaaacagttagagatgagatcgctgggtgcagcgaaaaggggtatgattctctatctgtgagtgatgcaaagcaaatgcttatgttcagttctgaccaagatctgcacgagtacatcactgaggagcacccggaatgggagattaagaacggtgctgtcttcttccagaaggcgaaggaatcacagcccctgcaaggagatcccatccttgcagcttatcaaccagacgctcagctacgccagggagctggagcgtattgtatgatttaaaccaatccctggtggttctttccccccctgtggccgcttggcatggcttgtactgtcctttgcatttgggatgatctttgatcgcagctctcatctgactgaaacatcatgtgaatctctgaagggctcagtctctccggcattggtctgttaactcc

SEQ ID NO: 8369 - protein, 333 aa, Zea mays subsp. mays
  peptide (1)..(333): Ceres Seq. ID no. 12408516
  misc_feature (173)..(314): Pfam Name: 26S proteasome non-ATPase regulatory subunit Nin1/mts3 Pfam Description: 26S proteasome non-ATPase regulatory subunit
  misc_feature (65)..(314): Homolog of NCBI NO: 17297985 NR Description: 26S proteasome regulatory particle non-ATPase
  misc_feature (65)..(314): Homolog of NCBI NO: 15217661 NR Description: 26S proteasome regulatory subunit (RPN12), protein id: At1g64520.1, supported by cDNA: gi_14532465,
  misc_feature (173)..(314): Homolog of NCBI NO: 15238267 NR Description: putative protein; protein id: At5g42040.1 thaliana] >gi|9757949|dbj|BAB08437.1| contains similarity to 26S regulatory complex subunit~gene_id:MJC20.14 [Arabidopsis
  misc_feature (70)..(299): Homolog of NCBI NO: 38372874 NR Description: Probable 26S proteasome non-ATPase regulatory
  misc_feature (69)..(323): Homolog of NCBI NO: 21357229 NR Description: CG4157-PA [Drosophila melanogaster]
  misc_feature (73)..(282): Homolog of NCBI NO: 40787635 NR Description: Unknown (protein for IMAGE:6055235) [Homo sapiens]
  misc_feature (75)..(282): Homolog of NCBI NO: 13278567 NR Description: RIKEN cDNA 6720456J22 gene [Mus musculus]
  misc_feature (75)..(282): Homolog of NCBI NO: 27229063 NR Description: proteasome 26S non-ATPase subunit 8 [Mus >gi|26387510|dbj|BAB32006.2| unnamed protein product [Mus
  misc_feature (75)..(282): Homolog of NCBI NO: 26371077 NR Description: unnamed protein product [Mus musculus] unnamed protein product [Mus musculus]
  misc_feature (75)..(282): Homolog of NCBI NO: 34855658 NR Description: similar to proteasome 26S non-ATPase subunit 8
SSPLCEPPSRTRRSAPTRSRHGSSFLSGGSTLHYNPTRKKKPAAEKRSRRDRELQSTPPPQPPTMDPKMTEVTQMFARFKAAYARNDLNTCVTLLSQLKVHLTQFPSLPPLFQQTPNIVEELKLARDIYEHAVVLSVKLEDQDAFERDFCQLKPYYMDTCGIIPASPEEYPILGLNLLRLLVQNRIAEFHTELELLPAKALEHPCIKHAVELEQSFMEGAYNRVLSARQAVPHETYVYFIDLLAKTVRDEIAGCSEKGYDSLSVSDAKQMLMFSSDQDLHEYITEEHPEWEIKNGAVFFQKAKESQPLQGDPILAAYQPDAQLRQGAGAYCMI

SEQ ID NO: 8370 - protein, 269 aa, Zea mays subsp. mays
  peptide (1)..(269): Ceres Seq. ID no. 12408517
  misc_feature (109)..(250): Pfam Name: 26S proteasome non-ATPase regulatory subunit Nin1/mts3 Pfam Description: 26S proteasome non-ATPase regulatory subunit
  misc_feature (1)..(250): Homolog of NCBI NO: 15217661 NR Description: 26S proteasome regulatory subunit (RPN12), protein id: At1g64520.1, supported by cDNA: gi_14532465,
  misc_feature (109)..(250): Homolog of NCBI NO: 15238267 NR Description: putative protein; protein id: At5g42040.1 thaliana] >gi|9757949|dbj|BAB08437.1| contains similarity to 26S regulatory complex subunit~gene_id:MJC20.14 [Arabidopsis
  misc_feature (6)..(235): Homolog of NCBI NO: 38372874 NR Description: Probable 26S proteasome non-ATPase regulatory
  misc_feature (5)..(259): Homolog of NCBI NO: 21357229 NR Description: CG4157-PA [Drosophila melanogaster]
  misc_feature (9)..(218): Homolog of NCBI NO: 40787635 NR Description: Unknown (protein for IMAGE:6055235) [Homo sapiens]
  misc_feature (1)..(250): Homolog of NCBI NO: 17297985 NR Description: 26S proteasome regulatory particle non-ATPase
  misc_feature (11)..(218): Homolog of NCBI NO: 13278567 NR Description: RIKEN cDNA 6720456J22 gene [Mus musculus]
  misc_feature (11)..(218): Homolog of NCBI NO: 26371077 NR Description: unnamed protein product [Mus musculus] unnamed protein product [Mus musculus]
  misc_feature (11)..(218): Homolog of NCBI NO: 27229063 NR Description: proteasome 26S non-ATPase subunit 8 [Mus >gi|26387510|dbj|BAB32006.2| unnamed protein product [Mus
  misc_feature (11)..(218): Homolog of NCBI NO: 34855658 NR Description: similar to proteasome 26S non-ATPase subunit 8
MDPKMTEVTQMFARFKAAYARNDLNTCVTLLSQLKVHLTQFPSLPPLFQQTPNIVEELKLARDIYEHAVVLSVKLEDQDAFERDFCQLKPYYMDTCGIIPASPEEYPILGLNLLRLLVQNRIAEFHTELELLPAKALEHPCIKHAVELEQSFMEGAYNRVLSARQAVPHETYVYFIDLLAKTVRDEIAGCSEKGYDSLSVSDAKQMLMFSSDQDLHEYITEEHPEWEIKNGAVFFQKAKESQPLQGDPILAAYQPDAQLRQGAGAYCMI

SEQ ID NO: 8371 - protein, 265 aa, Zea mays subsp. mays
  peptide (1)..(265): Ceres Seq. ID no. 12408518
  misc_feature (105)..(246): Pfam Name: 26S proteasome non-ATPase regulatory subunit Nin1/mts3 Pfam Description: 26S proteasome non-ATPase regulatory subunit
  misc_feature (1)..(246): Homolog of NCBI NO: 17297985 NR Description: 26S proteasome regulatory particle non-ATPase
  misc_feature (1)..(246): Homolog of NCBI NO: 15217661 NR Description: 26S proteasome regulatory subunit (RPN12), protein id: At1g64520.1, supported by cDNA: gi_14532465,
  misc_feature (105)..(246): Homolog of NCBI NO: 15238267 NR Description: putative protein; protein id: At5g42040.1 thaliana] >gi|9757949|dbj|BAB08437.1| contains similarity to 26S regulatory complex subunit~gene_id:MJC20.14 [Arabidopsis
  misc_feature (2)..(231): Homolog of NCBI NO: 38372874 NR Description: Probable 26S proteasome non-ATPase regulatory
  misc_feature (1)..(255): Homolog of NCBI NO: 21357229 NR Description: CG4157-PA [Drosophila melanogaster]
  misc_feature (5)..(214): Homolog of NCBI NO: 40787635 NR Description: Unknown (protein for IMAGE:6055235) [Homo sapiens]
  misc_feature (7)..(214): Homolog of NCBI NO: 13278567 NR Description: RIKEN cDNA 6720456J22 gene [Mus musculus]
  misc_feature (7)..(214): Homolog of NCBI NO: 27229063 NR Description: proteasome 26S non-ATPase subunit 8 [Mus >gi|26387510|dbj|BAB32006.2| unnamed protein product [Mus
  misc_feature (7)..(214): Homolog of NCBI NO: 26371077 NR Description: unnamed protein product [Mus musculus] unnamed protein product [Mus musculus]
  misc_feature (7)..(214): Homolog of NCBI NO: 34855658 NR Description: similar to proteasome 26S non-ATPase subunit 8
MTEVTQMFARFKAAYARNDLNTCVTLLSQLKVHLTQFPSLPPLFQQTPNIVEELKLARDIYEHAVVLSVKLEDQDAFERDFCQLKPYYMDTCGIIPASPEEYPILGLNLLRLLVQNRIAEFHTELELLPAKALEHPCIKHAVELEQSFMEGAYNRVLSARQAVPHETYVYFIDLLAKTVRDEIAGCSEKGYDSLSVSDAKQMLMFSSDQDLHEYITEEHPEWEIKNGAVFFQKAKESQPLQGDPILAAYQPDAQLRQGAGAYCMI

SEQ ID NO: 8372 - DNA, 1686 bp, Zea mays subsp. mays
  misc_feature (1)..(1686): Ceres Seq. ID no. 12408511
  misc_feature: MA Experiment ID: 108515 Result: Down-regulated in Transcription
  misc_feature: MA Experiment 108515 PARAMETER Experiment Name: Zm_2mM_SA_P Parameter: Age (day) Value: 8
  misc_feature: MA Experiment 108515 PARAMETER Experiment Name: Zm_2mM_SA_P Parameter: Organism Value: Zea mays
  misc_feature: MA Experiment 108515 PARAMETER Experiment Name: Zm_2mM_SA_P Parameter: Plant Line Value: 35A19
  misc_feature: MA Experiment 108515 PARAMETER Experiment Name: Zm_2mM_SA_P Parameter: Timepoint (hr) Value: 12
  misc_feature: MA Experiment 108515 PARAMETER Experiment Name: Zm_2mM_SA_P Parameter: Tissue Value: Aerial
  misc_feature: MA Experiment 108515 PARAMETER Experiment Name: Zm_2mM_SA_P Parameter: Treatment Value: 2mM SA vs. No Treatment
  misc_feature: MA Experiment ID: 108527 Result: Down-regulated in Transcription
  misc_feature: MA Experiment 108527 PARAMETER Experiment Name: Zm_5mM_NO_P Parameter: Age (day) Value: 8
  misc_feature: MA Experiment 108527 PARAMETER Experiment Name: Zm_5mM_NO_P Parameter: Organism Value: Zea mays
  misc_feature: MA Experiment 108527 PARAMETER Experiment Name: Zm_5mM_NO_P Parameter: Plant Line Value: 35A19
  misc_feature: MA Experiment 108527 PARAMETER Experiment Name: Zm_5mM_NO_P Parameter: Timepoint (hr) Value: 6
  misc_feature: MA Experiment 108527 PARAMETER Experiment Name: Zm_5mM_NO_P Parameter: Tissue Value: Aerial
  misc_feature: MA Experiment 108527 PARAMETER Experiment Name: Zm_5mM_NO_P Parameter: Treatment Value: 5mM NO vs. No Treatment
  misc_feature: MA Experiment ID: 108528 Result: Up-regulated in Transcription
  misc_feature: MA Experiment 108528 PARAMETER Experiment Name: Zm_Imbibed_Seeds_P Parameter: Age (day) Value: 5 vs. 2
  misc_feature: MA Experiment 108528 PARAMETER Experiment Name: Zm_Imbibed_Seeds_P Parameter: Organism Value: Zea mays
  misc_feature: MA Experiment 108528 PARAMETER Experiment Name: Zm_Imbibed_Seeds_P Parameter: Plant Line Value: 35A19
  misc_feature: MA Experiment 108528 PARAMETER Experiment Name: Zm_Imbibed_Seeds_P Parameter: Tissue Value: Aerial vs. Embryo
  misc_feature: MA Experiment ID: 108529 Result: Down-regulated in Transcription
  misc_feature: MA Experiment 108529 PARAMETER Experiment Name: Zm_Imbibed_Seeds_P Parameter: Age (day) Value: 5 vs. 2
  misc_feature: MA Experiment 108529 PARAMETER Experiment Name: Zm_Imbibed_Seeds_P Parameter: Organism Value: Zea mays
  misc_feature: MA Experiment 108529 PARAMETER Experiment Name: Zm_Imbibed_Seeds_P Parameter: Plant Line Value: 35A19
  misc_feature: MA Experiment 108529 PARAMETER Experiment Name: Zm_Imbibed_Seeds_P Parameter: Tissue Value: Roots vs. Embryo
  misc_feature: MA Experiment ID: 108530 Result: Up-regulated in Transcription
  misc_feature: MA Experiment 108530 PARAMETER Experiment Name: Zm_Imbibed_Seeds_P Parameter: Age (day) Value: 6 vs. 2
  misc_feature: MA Experiment 108530 PARAMETER Experiment Name: Zm_Imbibed_Seeds_P Parameter: Organism Value: Zea mays
  misc_feature: MA Experiment 108530 PARAMETER Experiment Name: Zm_Imbibed_Seeds_P Parameter: Plant Line Value: 35A19
  misc_feature: MA Experiment 108530 PARAMETER Experiment Name: Zm_Imbibed_Seeds_P Parameter: Tissue Value: Aerial vs. Embryo
  misc_feature: MA Experiment ID: 108536 Result: Down-regulated in Transcription
  misc_feature: MA Experiment 108536 PARAMETER Experiment Name: Zm_Meristem_P Parameter: Age (day) Value: 8
  misc_feature: MA Experiment 108536 PARAMETER Experiment Name: Zm_Meristem_P Parameter: Organism Value: Zea mays
  misc_feature: MA Experiment 108536 PARAMETER Experiment Name: Zm_Meristem_P Parameter: Plant Line Value: 35A19
  misc_feature: MA Experiment 108536 PARAMETER Experiment Name: Zm_Meristem_P Parameter: Tissue Value: Shoot Meristem vs. Above Shoot Meristem
  misc_feature: MA Experiment ID: 108543 Result: Up-regulated in Transcription
  misc_feature: MA Experiment ID: 108544 Result: Down-regulated in Transcription
  misc_feature: MA Experiment ID: 108545 Result: Up-regulated in Transcription
  misc_feature: MA Experiment 108545 PARAMETER Experiment Name: Zm_Imbibed_Seeds_P Parameter: Age (day) Value: 3 vs. 2
  misc_feature: MA Experiment 108545 PARAMETER Experiment Name: Zm_Imbibed_Seeds_P Parameter: Organism Value: Zea mays
  misc_feature: MA Experiment 108545 PARAMETER Experiment Name: Zm_Imbibed_Seeds_P Parameter: Plant Line Value: 35A19
  misc_feature: MA Experiment 108545 PARAMETER Experiment Name: Zm_Imbibed_Seeds_P Parameter: Tissue Value: Aerial vs. Embryo
  misc_feature: MA Experiment ID: 108547 Result: Up-regulated in Transcription
  misc_feature: MA Experiment 108547 PARAMETER Experiment Name: Zm_Imbibed_Seeds_P Parameter: Age (day) Value: 4 vs. 2
  misc_feature: MA Experiment 108547 PARAMETER Experiment Name: Zm_Imbibed_Seeds_P Parameter: Organism Value: Zea mays
  misc_feature: MA Experiment 108547 PARAMETER Experiment Name: Zm_Imbibed_Seeds_P Parameter: Plant Line Value: 35A19
  misc_feature: MA Experiment 108547 PARAMETER Experiment Name: Zm_Imbibed_Seeds_P Parameter: Tissue Value: Aerial vs. Embryo
  misc_feature: MA Experiment ID: 108556 Result: Down-regulated in Transcription
  misc_feature: MA Experiment 108556 PARAMETER Experiment Name: Zm_Drought_P Parameter: Age (day) Value: 9
  misc_feature: MA Experiment 108556 PARAMETER Experiment Name: Zm_Drought_P Parameter: Organism Value: Zea mays
  misc_feature: MA Experiment 108556 PARAMETER Experiment Name: Zm_Drought_P Parameter: Plant Line Value: 35A19
  misc_feature: MA Experiment 108556 PARAMETER Experiment Name: Zm_Drought_P Parameter: Timepoint (hr) Value: 24
  misc_feature: MA Experiment 108556 PARAMETER Experiment Name: Zm_Drought_P Parameter: Tissue Value: Aerial
  misc_feature: MA Experiment 108556 PARAMETER Experiment Name: Zm_Drought_P Parameter: Treatment Value: Drought vs. No Drought
  misc_feature: MA Experiment ID: 108559 Result: Down-regulated in Transcription
  misc_feature: MA Experiment 108559 PARAMETER Experiment Name: Zm_5mM_NO_P Parameter: Age (day) Value: 8
  misc_feature: MA Experiment 108559 PARAMETER Experiment Name: Zm_5mM_NO_P Parameter: Organism Value: Zea mays
  misc_feature: MA Experiment 108559 PARAMETER Experiment Name: Zm_5mM_NO_P Parameter: Plant Line Value: 35A19
  misc_feature: MA Experiment 108559 PARAMETER Experiment Name: Zm_5mM_NO_P Parameter: Timepoint (hr) Value: 12
  misc_feature: MA Experiment 108559 PARAMETER Experiment Name: Zm_5mM_NO_P Parameter: Tissue Value: Aerial
  misc_feature: MA Experiment 108559 PARAMETER Experiment Name: Zm_5mM_NO_P Parameter: Treatment Value: 5mM NO vs. No Treatment
  misc_feature: MA Experiment ID: 108597 Result: Down-regulated in Transcription
  misc_feature: MA Experiment 108597 PARAMETER Experiment Name: Zm_100uM_ABA_P Parameter: Age (day) Value: 9
  misc_feature: MA Experiment 108597 PARAMETER Experiment Name: Zm_100uM_ABA_P Parameter: Organism Value: Zea mays
  misc_feature: MA Experiment 108597 PARAMETER Experiment Name: Zm_100uM_ABA_P Parameter: Plant Line Value: 35A19
  misc_feature: MA Experiment 108597 PARAMETER Experiment Name: Zm_100uM_ABA_P Parameter: Timepoint (hr) Value: 24
  misc_feature: MA Experiment 108597 PARAMETER Experiment Name: Zm_100uM_ABA_P Parameter: Tissue Value: Aerial
  misc_feature: MA Experiment 108597 PARAMETER Experiment Name: Zm_100uM_ABA_P Parameter: Treatment Value: 100uM ABA vs. No Treatment
  misc_feature: MA Experiment ID: 20000478 Result: Down-regulated in Transcription
  misc_feature: MA Experiment 20000478 PARAMETER Experiment Name: Zm_5mM_SA_P Parameter: Age (day) Value: 11
  misc_feature: MA Experiment 20000478 PARAMETER Experiment Name: Zm_5mM_SA_P Parameter: Organism Value: Zea mays
  misc_feature: MA Experiment 20000478 PARAMETER Experiment Name: Zm_5mM_SA_P Parameter: Plant Line Value: 35A19
  misc_feature: MA Experiment 20000478 PARAMETER Experiment Name: Zm_5mM_SA_P Parameter: Timepoint (hr) Value: 72
  misc_feature: MA Experiment 20000478 PARAMETER Experiment Name: Zm_5mM_SA_P Parameter: Tissue Value: Aerial
  misc_feature: MA Experiment 20000478 PARAMETER Experiment Name: Zm_5mM_SA_P Parameter: Treatment Value: 5mM SA vs. No Treatment
  misc_feature: MA Experiment ID: 20000480 Result: Down-regulated in Transcription
  misc_feature: MA Experiment 20000480 PARAMETER Experiment Name: Zm_Drought_P Parameter: Age (day) Value: 11
  misc_feature: MA Experiment 20000480 PARAMETER Experiment Name: Zm_Drought_P Parameter: Organism Value: Zea mays
  misc_feature: MA Experiment 20000480 PARAMETER Experiment Name: Zm_Drought_P Parameter: Plant Line Value: 35A19
  misc_feature: MA Experiment 20000480 PARAMETER Experiment Name: Zm_Drought_P Parameter: Timepoint (hr) Value: 72
  misc_feature: MA Experiment 20000480 PARAMETER Experiment Name: Zm_Drought_P Parameter: Tissue Value: Aerial
  misc_feature: MA Experiment 20000480 PARAMETER Experiment Name: Zm_Drought_P Parameter: Treatment Value: Drought vs. No Drought
  misc_feature: MA Experiment ID: 20000488 Result: Down-regulated in Transcription
  misc_feature: MA Experiment 20000488 PARAMETER Experiment Name: Zm_50mM_NH4NO3_L_to_H_P Parameter: Organism Value: Zea mays
  misc_feature: MA Experiment 20000488 PARAMETER Experiment Name: Zm_50mM_NH4NO3_L_to_H_P Parameter: Timepoint (hr) Value: 8
  misc_feature: MA Experiment 20000488 PARAMETER Experiment Name: Zm_50mM_NH4NO3_L_to_H_P Parameter: Tissue Value: Leaves
  misc_feature: MA Experiment 20000488 PARAMETER Experiment Name: Zm_50mM_NH4NO3_L_to_H_P Parameter: Treatment Value: 50mM NH4NO3 vs. 100mM Mannitol
  misc_feature: MA Experiment ID: 20000532 Result: Down-regulated in Transcription
  misc_feature: MA Experiment 20000532 PARAMETER Experiment Name: Zm_0.001percent_MeJA_P Parameter: Age (day) Value: 10
  misc_feature: MA Experiment 20000532 PARAMETER Experiment Name: Zm_0.001percent_MeJA_P Parameter: Organism Value: Zea mays
  misc_feature: MA Experiment 20000532 PARAMETER Experiment Name: Zm_0.001percent_MeJA_P Parameter: Plant Line Value: 35A19
  misc_feature: MA Experiment 20000532 PARAMETER Experiment Name: Zm_0.001percent_MeJA_P Parameter: Timepoint (hr) Value: 48
  misc_feature: MA Experiment 20000532 PARAMETER Experiment Name: Zm_0.001percent_MeJA_P Parameter: Tissue Value: Aerial
  misc_feature: MA Experiment 20000532 PARAMETER Experiment Name: Zm_0.001percent_MeJA_P Parameter: Treatment Value: 0.001percent MeJA vs. No Treatment
  misc_feature: MA Experiment ID: 20000626 Result: Down-regulated in Transcription
  misc_feature: MA Experiment 20000626 PARAMETER Experiment Name: Zm_Herbicide-Treatments_P Parameter: Timepoint (hr) Value: 12
  misc_feature: MA Experiment 20000626 PARAMETER Experiment Name: Zm_Herbicide-Treatments_P Parameter: Tissue Value: Aerial
  misc_feature: MA Experiment 20000626 PARAMETER Experiment Name: Zm_Herbicide-Treatments_P Parameter: Treatment Value: Roundup vs. No Treatment
acctatagctctctccgatccatgcagagctcggtggtcatgttgtcgagcacggtggcagcggcggccatggcatcgctgcgcaccctcccgctgccggtgctggtgcccctcgtcgcctcggggctcgtcttcctggccaccgtgctccgacgcttgctaaggcggcagcggccggtgtacctcctgaactacagctgccacctcccggacgcggagcggcaggtgaacctggaggtgtgcgagtacttcggcctcaagtgtcgccgctactccgacgacatcgccgacttcatgcggctggtgtacagcaagtccggtctgggccaggagaccttcgcgccgcccttcatctactcgggcaagttcgagaagacgctggcattcgcgatccaggaggccgaggagggtctgttcgccgtcgtggagcagctcctggcaaagtcggacgtgagtcccagcgacatcagcgtcctggtggtggcctgctccatgttctccccgatgccgtcgctggcgtccatgatcatgcaccggttcaatatgcggccggatgtgaagtcgtacagcgtggccgggatgggttgcagcgcggggaccgttggcatcgacacggcggcgcggtcgctgcgctctcggcggacgcccgggtacgcgctggtggtggtgacggagaacacgagcctaaactggtacttcggcaagaacaagcacatgctggtgaccaactgcatcttccgcgtgggcagcgcggcggcgctggtgacggacgtcccgtcccggcgcccggacgccaagtacgagctggtgcgcacgctgcggacgcaccacggcgcggacgacgcggccttcaacgcggcgctgcagatggaggacgaggagggcaacctgggcgtggcgctcaccaaggacctggtccgcgtcgccggtgcggcgctgcggaggcacatcaccacgctgggtccccaggtgctgccggtgtccgagatgctccggtacgcgtggcgcgtggcgcgcgcctacgcggccgggaacagcaaggccgcggcggcggaggtgcccgacttccagcgcgcgttcgagcacttctgcatccactcgggcgggaaggcggttatcgactcgatcgccgcggctgatggggttcgggccctacgtcgtggagccggcgcgctccacgctgcaccggttcggcaacacgtccagcagtctggtgttctacgagctggcctacttcgaggccaagcgccgcgtccgggccggcgaccgcctctggatgctggcgttcgggacggggttcaaggcgtgcagcaacgtctggcgcgcgctccgcgacgccgcgcccgacgccgacaacccatggaacggatgcgtccaccgctacccagtgccgccgccgccaccgtccaagacgcacaagcatgcttgatatagtactatgtgctcctccgtcgccgcgtctcgtgcctgtgtctgcgtcgattgtttgataagcaacatcaacgaaggcgtatgtatcctagctagggaccgggtcagttgtttgatacgcttggatgcatgatgatcagctgtctcattggctccaagaagacctatgggttgtttgatttctgtgtcagtgatatgtcatatgacaacatgagtatccctgtttggaaagtgaaatatataagaaatttaaat

SEQ ID NO: 8373 - protein, 477 aa, Zea mays subsp. mays
  peptide (1)..(477): Ceres Seq. ID no. 12408512
  misc_feature (273)..(376): Pfam Name: Chalcone and stilbene synthases, C-terminal domain Pfam Description: Chalcone and stilbene synthases, C-terminal
  misc_feature (40)..(376): Homolog of NCBI NO: 15236133 NR Description: putative ketoacyl-CoA synthase; protein id:
  misc_feature (2)..(376): Homolog of NCBI NO: 9714501 NR Description: putative fatty acid elongase [Zea mays]
  misc_feature (34)..(376): Homolog of NCBI NO: 15223556 NR Description: very-long-chain fatty acid condensing enzyme putative; protein id: At1g19440.1, supported by cDNA: 158882.
  misc_feature (43)..(376): Homolog of NCBI NO: 4091810 NR Description: fatty acid elongase 3-ketoacyl-CoA synthase 1
  misc_feature (43)..(376): Homolog of NCBI NO: 22329274 NR Description: fatty acid elongase 3-ketoacyl-CoA synthase 1; id: At1g01120.1, supported by cDNA: gi_18377663, supported by
  misc_feature (35)..(376): Homolog of NCBI NO: 11066477 NR Description: fatty acid elongase 1-like protein [Limnanthes
  misc_feature (12)..(376): Homolog of NCBI NO: 15225767 NR Description: putative beta-ketoacyl-CoA synthase; protein id:
  misc_feature (44)..(376): Homolog of NCBI NO: 15226724 NR Description: putative beta-ketoacyl-CoA synthase; protein id:
  misc_feature (35)..(376): Homolog of NCBI NO: 1045614 NR Description: beta-ketoacyl-CoA synthase
  misc_feature (38)..(376): Homolog of NCBI NO: 15219676 NR Description: putative beta-ketoacyl-CoA synthase; protein id:
TYSSLRSMQSSVVMLSSTVAAAAMASLRTLPLPVLVPLVASGLVFLATVLRRLLRRQRPVYLLNYSCHLPDAERQVNLEVCEYFGLKCRRYSDDIADFMRLVYSKSGLGQETFAPPFIYSGKFEKTLAFAIQEAEEGLFAVVEQLLAKSDVSPSDISVLVVACSMFSPMPSLASMIMHRFNMRPDVKSYSVAGMGCSAGTVGIDTAARSLRSRRTPGYALVVVTENTSLNWYFGKNKHMLVTNCIFRVGSAAALVTDVPSRRPDAKYELVRTLRTHHGADDAAFNAALQMEDEEGNLGVALTKDLVRVAGAALRRHITTLGPQVLPVSEMLRYAWRVARAYAAGNSKAAAAEVPDFQRAFEHFCIHSGGKAVIDSIAAADGVRALRRGAGALHAAPVRQHVQQSGVLRAGLLRGQAPRPGRRPPLDAGVRDGVQGVQQRLARAPRRRARRRQPMERMRPPLPSAAAATVQDAQACLI

SEQ ID NO: 8374 - protein, 470 aa, Zea mays subsp. mays
  peptide (1)..(470): Ceres Seq. ID no. 12408513
  misc_feature (266)..(369): Pfam Name: Chalcone and stilbene synthases, C-terminal domain Pfam Description: Chalcone and stilbene synthases, C-terminal
  misc_feature (33)..(369): Homolog of NCBI NO: 15236133 NR Description: putative ketoacyl-CoA synthase; protein id:
  misc_feature (1)..(369): Homolog of NCBI NO: 9714501 NR Description: putative fatty acid elongase [Zea mays]
  misc_feature (27)..(369): Homolog of NCBI NO: 15223556 NR Description: very-long-chain fatty acid condensing enzyme putative; protein id: At1g19440.1, supported by cDNA: 158882.
  misc_feature (36)..(369): Homolog of NCBI NO: 4091810 NR Description: fatty acid elongase 3-ketoacyl-CoA synthase 1
  misc_feature (36)..(369): Homolog of NCBI NO: 22329274 NR Description: fatty acid elongase 3-ketoacyl-CoA synthase 1; id: At1g01120.1, supported by cDNA: gi_18377663, supported by
  misc_feature (28)..(369): Homolog of NCBI NO: 11066477 NR Description: fatty acid elongase 1-like protein [Limnanthes
  misc_feature (5)..(369): Homolog of NCBI NO: 15225767 NR Description: putative beta-ketoacyl-CoA synthase; protein id:
  misc_feature (37)..(369): Homolog of NCBI NO: 15226724 NR Description: putative beta-ketoacyl-CoA synthase; protein id:
  misc_feature (28)..(369): Homolog of NCBI NO: 1045614 NR Description: beta-ketoacyl-CoA synthase
  misc_feature (31)..(369): Homolog of NCBI NO: 15219676 NR Description: putative beta-ketoacyl-CoA synthase; protein id:
MQSSVVMLSSTVAAAAMASLRTLPLPVLVPLVASGLVFLATVLRRLLRRQRPVYLLNYSCHLPDAERQVNLEVCEYFGLKCRRYSDDIADFMRLVYSKSGLGQETFAPPFIYSGKFEKTLAFAIQEAEEGLFAVVEQLLAKSDVSPSDISVLVVACSMFSPMPSLASMIMHRFNMRPDVKSYSVAGMGCSAGTVGIDTAARSLRSRRTPGYALVVVTENTSLNWYFGKNKHMLVTNCIFRVGSAAALVTDVPSRRPDAKYELVRTLRTHHGADDAAFNAALQMEDEEGNLGVALTKDLVRVAGAALRRHITTLGPQVLPVSEMLRYAWRVARAYAAGNSKAAAAEVPDFQRAFEHFCIHSGGKAVIDSIAAADGVRALRRGAGALHAAPVRQHVQQSGVLRAGLLRGQAPRPGRRPPLDAGVRDGVQGVQQRLARAPRRRARRRQPMERMRPPLPSAAAATVQDAQACLI

SEQ ID NO: 8375 - protein, 464 aa, Zea mays subsp. mays
  peptide (1)..(464): Ceres Seq. ID no. 12408514
  misc_feature (260)..(363): Pfam Name: Chalcone and stilbene synthases, C-terminal domain Pfam Description: Chalcone and stilbene synthases, C-terminal
  misc_feature (27)..(363): Homolog of NCBI NO: 15236133 NR Description: putative ketoacyl-CoA synthase; protein id:
  misc_feature (1)..(363): Homolog of NCBI NO: 9714501 NR Description: putative fatty acid elongase [Zea mays]
  misc_feature (21)..(363): Homolog of NCBI NO: 15223556 NR Description: very-long-chain fatty acid condensing enzyme putative; protein id: At1g19440.1, supported by cDNA: 158882.
  misc_feature (30)..(363): Homolog of NCBI NO: 4091810 NR Description: fatty acid elongase 3-ketoacyl-CoA synthase 1
  misc_feature (30)..(363): Homolog of NCBI NO: 22329274 NR Description: fatty acid elongase 3-ketoacyl-CoA synthase 1; id: At1g01120.1, supported by cDNA: gi_18377663, supported by
  misc_feature (22)..(363): Homolog of NCBI NO: 11066477 NR Description: fatty acid elongase 1-like protein [Limnanthes
  misc_feature (1)..(363): Homolog of NCBI NO: 15225767 NR Description: putative beta-ketoacyl-CoA synthase; protein id:
  misc_feature (31)..(363): Homolog of NCBI NO: 15226724 NR Description: putative beta-ketoacyl-CoA synthase; protein id:
  misc_feature (22)..(363): Homolog of NCBI NO: 1045614 NR Description: beta-ketoacyl-CoA synthase
  misc_feature (25)..(363): Homolog of NCBI NO: 15219676 NR Description: putative beta-ketoacyl-CoA synthase; protein id:
MLSSTVAAAAMASLRTLPLPVLVPLVASGLVFLATVLRRLLRRQRPVYLLNYSCHLPDAERQVNLEVCEYFGLKCRRYSDDIADFMRLVYSKSGLGQETFAPPFIYSGKFEKTLAFAIQEAEEGLFAVVEQLLAKSDVSPSDISVLVVACSMFSPMPSLASMIMHRFNMRPDVKSYSVAGMGCSAGTVGIDTAARSLRSRRTPGYALVVVTENTSLNWYFGKNKHMLVTNCIFRVGSAAALVTDVPSRRPDAKYELVRTLRTHHGADDAAFNAALQMEDEEGNLGVALTKDLVRVAGAALRRHITTLGPQVLPVSEMLRYAWRVARAYAAGNSKAAAAEVPDFQRAFEHFCIHSGGKAVIDSIAAADGVRALRRGAGALHAAPVRQHVQQSGVLRAGLLRGQAPRPGRRPPLDAGVRDGVQGVQQRLARAPRRRARRRQPMERMRPPLPSAAAATVQDAQACLI

SEQ ID NO: 8376 - DNA, 1246 bp, Zea mays subsp. mays
  misc_feature (1)..(1246): Ceres Seq. ID no. 12352601
  misc_feature: MA Experiment ID: 108528 Result: Up-regulated in Transcription
  misc_feature: MA Experiment 108528 PARAMETER Experiment Name: Zm_Imbibed_Seeds_P Parameter: Age (day) Value: 5 vs. 2
  misc_feature: MA Experiment 108528 PARAMETER Experiment Name: Zm_Imbibed_Seeds_P Parameter: Organism Value: Zea mays
  misc_feature: MA Experiment 108528 PARAMETER Experiment Name: Zm_Imbibed_Seeds_P Parameter: Plant Line Value: 35A19
  misc_feature: MA Experiment 108528 PARAMETER Experiment Name: Zm_Imbibed_Seeds_P Parameter: Tissue Value: Aerial vs. Embryo
  misc_feature: MA Experiment ID: 108530 Result: Up-regulated in Transcription
  misc_feature: MA Experiment 108530 PARAMETER Experiment Name: Zm_Imbibed_Seeds_P Parameter: Age (day) Value: 6 vs. 2
  misc_feature: MA Experiment 108530 PARAMETER Experiment Name: Zm_Imbibed_Seeds_P Parameter: Organism Value: Zea mays
  misc_feature: MA Experiment 108530 PARAMETER Experiment Name: Zm_Imbibed_Seeds_P Parameter: Plant Line Value: 35A19
  misc_feature: MA Experiment 108530 PARAMETER Experiment Name: Zm_Imbibed_Seeds_P Parameter: Tissue Value: Aerial vs. Embryo
  misc_feature: MA Experiment ID: 108535 Result: Down-regulated in Transcription
  misc_feature: MA Experiment 108535 PARAMETER Experiment Name: Zm_Meristem_P Parameter: Age (day) Value: 8
  misc_feature: MA Experiment 108535 PARAMETER Experiment Name: Zm_Meristem_P Parameter: Organism Value: Zea mays
  misc_feature: MA Experiment 108535 PARAMETER Experiment Name: Zm_Meristem_P Parameter: Plant Line Value: 35A19
  misc_feature: MA Experiment 108535 PARAMETER Experiment Name: Zm_Meristem_P Parameter: Tissue Value: Root Meristem vs. Above Root Meristem
  misc_feature: MA Experiment ID: 108543 Result: Up-regulated in Transcription
  misc_feature: MA Experiment ID: 108545 Result: Up-regulated in Transcription
  misc_feature: MA Experiment 108545 PARAMETER Experiment Name: Zm_Imbibed_Seeds_P Parameter: Age (day) Value: 3 vs. 2
  misc_feature: MA Experiment 108545 PARAMETER Experiment Name: Zm_Imbibed_Seeds_P Parameter: Organism Value: Zea mays
  misc_feature: MA Experiment 108545 PARAMETER Experiment Name: Zm_Imbibed_Seeds_P Parameter: Plant Line Value: 35A19
  misc_feature: MA Experiment 108545 PARAMETER Experiment Name: Zm_Imbibed_Seeds_P Parameter: Tissue Value: Aerial vs. Embryo
  misc_feature: MA Experiment ID: 108547 Result: Up-regulated in Transcription
  misc_feature: MA Experiment 108547 PARAMETER Experiment Name: Zm_Imbibed_Seeds_P Parameter: Age (day) Value: 4 vs. 2
  misc_feature: MA Experiment 108547 PARAMETER Experiment Name: Zm_Imbibed_Seeds_P Parameter: Organism Value: Zea mays
  misc_feature: MA Experiment 108547 PARAMETER Experiment Name: Zm_Imbibed_Seeds_P Parameter: Plant Line Value: 35A19
  misc_feature: MA Experiment 108547 PARAMETER Experiment Name: Zm_Imbibed_Seeds_P Parameter: Tissue Value: Aerial vs. Embryo
  misc_feature: MA Experiment ID: 108687 Result: Down-regulated in Transcription
  misc_feature: MA Experiment 108687 PARAMETER Experiment Name: Zm_Embryos-Flowers__P Parameter: Tissue Value: Embryo vs. Aerial+
atagttcccgtgatggtcgactgattgacactgccaacctcccaacttcccaaatatatcgtcgtcggtcaatgtcgacgagctcgcagtgcacgctcatggaaggcgctatctcccttcctcgcaacacaagcagaattgccgtggttaccggcgcgaacagaggtatcgggctagaggtgtgccggcagctggctggcaatggcgtcaccgtcgtcttgacagcagtggacgaggagctaggcgcgaaagccgtcggcaatctccaagggctagctctctccgatgttctttctcaccagctggatatcacggatgcttccagcatcgctcggttggccaacttcttgaaggcccgattcgggaagttggatatcctggtcaataatgctgcggttgctggggtcgtgtactctcaagatcatttggatgatctagaaccgagagaggaaaagttcaatctcatggatagggatcagaggcttgaatggctgtggaggaactgccgggagacctaccatgctgcaaaggaatgcctgcagacaaactactacggcacaaagcatgtgatcgaagccttgctgcctctgctgaaagcctccgatgatggaagaatcgtcaatatatcctccgactttgggttgttaaggcatttcagaaacgaggatctgaagcaagtgctgaacgacgtcggcaacctcaccgaggagcggctggacgaactgctggaccagttcctgagagacttcaaggtcggcacggcagaagcgcgcgggtggccagtggcgttcgcggcgtacaaggtgagcaaggcggccgtgaacgcgtactcgaggatgctggcggcgaagcagcccgcgctgcgcgttaactgcgcgcatcccggctacgtcaagactgacataaccttacactcggggctcctggcgccggaggagggcgcgagtaatgtggtgaaggtggcgctgctgccggacggcggggtgaccggcgccttctttgaggagggcaatgagctggcctccttcgtgtgatgtcaggatcggcctggttcgctagctgcggctgtttgccatcgcgtgagctcacggagtgtttggacccctcggtctgatgtttaagtgtgtggtagcaggatgcaagacgattctggtaataaactgattatgtttgtgaacggtgataacctgatgatgtatgtgttgtaaatttagagaacggtgataacctgatgatgtatgtgttg

SEQ ID NO: 8377 - protein, 343 aa, Zea mays subsp. mays
  peptide (1)..(343): Ceres Seq. ID no. 12352602
  misc_feature (33)..(343): Homolog of NCBI NO: 38346772 NR Description: OSJNBa0081C01.23 [Oryza sativa (japonica
  misc_feature (33)..(343): Homolog of NCBI NO: 38346769 NR Description: OSJNBa0081C01.20 [Oryza sativa (japonica
  misc_feature (33)..(343): Homolog of NCBI NO: 38346774 NR Description: OSJNBa0081C01.25 [Oryza sativa (japonica
  misc_feature (33)..(343): Homolog of NCBI NO: 38346768 NR Description: OSJNBa0081C01.19 [Oryza sativa (japonica
  misc_feature (33)..(343): Homolog of NCBI NO: 38346767 NR Description: OSJNBa0081C01.18 [Oryza sativa (japonica
  misc_feature (39)..(342): Homolog of NCBI NO: 15233062 NR Description: putative protein; protein id: At3g61220.1, by cDNA: gi_15028054, supported by cDNA: gi_20259056 [Arabidopsis
  misc_feature (23)..(335): Homolog of NCBI NO: 33146492 NR Description: carbonyl reductase -like protein [Oryza sativa
  misc_feature (44)..(337): Homolog of NCBI NO: 25518668 NR Description: hypothetical protein T1N6.22 - Arabidopsis
  misc_feature (45)..(337): Homolog of NCBI NO: 18378884 NR Description: carbonyl reductase, putative; protein id: [Arabidopsis thaliana] >gi|13878161|gb|AAK44158.1|AF370343_1 carbonyl reductase [Arabidopsis thaliana]
  misc_feature (39)..(342): Homolog of NCBI NO: 15224100 NR Description: putative carbonyl reductase; protein id: [Arabidopsis thaliana] >gi|25412197|pir||F84633 probable carbonyl
SSRDGRLIDTANLPTSQIYRRRSMSTSSQCTLMEGAISLPRNTSRIAVVTGANRGIGLEVCRQLAGNGVTVVLTAVDEELGAKAVGNLQGLALSDVLSHQLDITDASSIARLANFLKARFGKLDILVNNAAVAGVVYSQDHLDDLEPREEKFNLMDRDQRLEWLWRNCRETYHAAKECLQTNYYGTKHVIEALLPLLKASDDGRIVNISSDFGLLRHFRNEDLKQVLNDVGNLTEERLDELLDQFLRDFKVGTAEARGWPVAFAAYKVSKAAVNAYSRMLAAKQPALRVNCAHPGYVKTDITLHSGLLAPEEGASNVVKVALLPDGGVTGAFFEEGNELASFV

SEQ ID NO: 8378 - protein, 320 aa, Zea mays subsp. mays
  peptide (1)..(320): Ceres Seq. ID no. 12352603
  misc_feature (10)..(320): Homolog of NCBI NO: 38346772 NR Description: OSJNBa0081C01.23 [Oryza sativa (japonica
  misc_feature (10)..(320): Homolog of NCBI NO: 38346769 NR Description: OSJNBa0081C01.20 [Oryza sativa (japonica
  misc_feature (10)..(320): Homolog of NCBI NO: 38346774 NR Description: OSJNBa0081C01.25 [Oryza sativa (japonica
  misc_feature (10)..(320): Homolog of NCBI NO: 38346768 NR Description: OSJNBa0081C01.19 [Oryza sativa (japonica
  misc_feature (10)..(320): Homolog of NCBI NO: 38346767 NR Description: OSJNBa0081C01.18 [Oryza sativa (japonica
  misc_feature (16)..(319): Homolog of NCBI NO: 15233062 NR Description: putative protein; protein id: At3g61220.1, by cDNA: gi_15028054, supported by cDNA: gi_20259056 [Arabidopsis
  misc_feature (1)..(312): Homolog of NCBI NO: 33146492 NR Description: carbonyl reductase -like protein [Oryza sativa
  misc_feature (21)..(314): Homolog of NCBI NO: 25518668 NR Description: hypothetical protein T1N6.22 - Arabidopsis
  misc_feature (22)..(314): Homolog of NCBI NO: 18378884 NR Description: carbonyl reductase, putative; protein id: [Arabidopsis thaliana] >gi|13878161|gb|AAK44158.1|AF370343_1 carbonyl reductase [Arabidopsis thaliana]
  misc_feature (16)..(319): Homolog of NCBI NO: 15224100 NR Description: putative carbonyl reductase; protein id: [Arabidopsis thaliana] >gi|25412197|pir||F84633 probable carbonyl
MSTSSQCTLMEGAISLPRNTSRIAVVTGANRGIGLEVCRQLAGNGVTVVLTAVDEELGAKAVGNLQGLALSDVLSHQLDITDASSIARLANFLKARFGKLDILVNNAAVAGVVYSQDHLDDLEPREEKFNLMDRDQRLEWLWRNCRETYHAAKECLQTNYYGTKHVIEALLPLLKASDDGRIVNISSDFGLLRHFRNEDLKQVLNDVGNLTEERLDELLDQFLRDFKVGTAEARGWPVAFAAYKVSKAAVNAYSRMLAAKQPALRVNCAHPGYVKTDITLHSGLLAPEEGASNVVKVALLPDGGVTGAFFEEGNELASFV

SEQ ID NO: 8379 - protein, 311 aa, Zea mays subsp. mays
  peptide (1)..(311): Ceres Seq. ID no. 12352604
  misc_feature (1)..(311): Homolog of NCBI NO: 38346772 NR Description: OSJNBa0081C01.23 [Oryza sativa (japonica
  misc_feature (1)..(311): Homolog of NCBI NO: 38346769 NR Description: OSJNBa0081C01.20 [Oryza sativa (japonica
  misc_feature (1)..(311): Homolog of NCBI NO: 38346774 NR Description: OSJNBa0081C01.25 [Oryza sativa (japonica
  misc_feature (1)..(311): Homolog of NCBI NO: 38346768 NR Description: OSJNBa0081C01.19 [Oryza sativa (japonica
  misc_feature (1)..(311): Homolog of NCBI NO: 38346767 NR Description: OSJNBa0081C01.18 [Oryza sativa (japonica
  misc_feature (7)..(310): Homolog of NCBI NO: 15233062 NR Description: putative protein; protein id: At3g61220.1, by cDNA: gi_15028054, supported by cDNA: gi_20259056 [Arabidopsis
  misc_feature (1)..(303): Homolog of NCBI NO: 33146492 NR Description: carbonyl reductase -like protein [Oryza sativa
  misc_feature (12)..(305): Homolog of NCBI NO: 25518668 NR Description: hypothetical protein T1N6.22 - Arabidopsis
  misc_feature (13)..(305): Homolog of NCBI NO: 18378884 NR Description: carbonyl reductase, putative; protein id: [Arabidopsis thaliana] >gi|13878161|gb|AAK44158.1|AF370343_1 carbonyl reductase [Arabidopsis thaliana]
  misc_feature (7)..(310): Homolog of NCBI NO: 15224100 NR Description: putative carbonyl reductase; protein id: [Arabidopsis thaliana] >gi|25412197|pir||F84633 probable carbonyl
MEGAISLPRNTSRIAVVTGANRGIGLEVCRQLAGNGVTVVLTAVDEELGAKAVGNLQGLALSDVLSHQLDITDASSIARLANFLKARFGKLDILVNNAAVAGVVYSQDHLDDLEPREEKFNLMDRDQRLEWLWRNCRETYHAAKECLQTNYYGTKHVIEALLPLLKASDDGRIVNISSDFGLLRHFRNEDLKQVLNDVGNLTEERLDELLDQFLRDFKVGTAEARGWPVAFAAYKVSKAAVNAYSRMLAAKQPALRVNCAHPGYVKTDITLHSGLLAPEEGASNVVKVALLPDGGVTGAFFEEGNELASFV

SEQ ID NO: 8380 - DNA, 1741 bp, Zea mays subsp. mays
  misc_feature (1)..(1741): Ceres Seq. ID no. 12405430
  misc_feature: MA Experiment ID: 108523 Result: Up-regulated in Transcription
  misc_feature: MA Experiment 108523 PARAMETER Experiment Name: Zm_42deg_Heat_P Parameter: Age (day) Value: 8
  misc_feature: MA Experiment 108523 PARAMETER Experiment Name: Zm_42deg_Heat_P Parameter: Organism Value: Zea mays
  misc_feature: MA Experiment 108523 PARAMETER Experiment Name: Zm_42deg_Heat_P Parameter: Plant Line Value: 35A19
  misc_feature: MA Experiment 108523 PARAMETER Experiment Name: Zm_42deg_Heat_P Parameter: Temperature (deg C) Value: 42 vs. 22
  misc_feature: MA Experiment 108523 PARAMETER Experiment Name: Zm_42deg_Heat_P Parameter: Timepoint (hr) Value: 6
  misc_feature: MA Experiment 108523 PARAMETER Experiment Name: Zm_42deg_Heat_P Parameter: Tissue Value: Aerial
  misc_feature: MA Experiment ID: 108535 Result: Up-regulated in Transcription
  misc_feature: MA Experiment 108535 PARAMETER Experiment Name: Zm_Meristem_P Parameter: Age (day) Value: 8
  misc_feature: MA Experiment 108535 PARAMETER Experiment Name: Zm_Meristem_P Parameter: Organism Value: Zea mays
  misc_feature: MA Experiment 108535 PARAMETER Experiment Name: Zm_Meristem_P Parameter: Plant Line Value: 35A19
  misc_feature: MA Experiment 108535 PARAMETER Experiment Name: Zm_Meristem_P Parameter: Tissue Value: Root Meristem vs. Above Root Meristem
  misc_feature: MA Experiment ID: 108544 Result: Down-regulated in Transcription
  misc_feature: MA Experiment ID: 108556 Result: Down-regulated in Transcription
  misc_feature: MA Experiment 108556 PARAMETER Experiment Name: Zm_Drought_P Parameter: Age (day) Value: 9
  misc_feature: MA Experiment 108556 PARAMETER Experiment Name: Zm_Drought_P Parameter: Organism Value: Zea mays
  misc_feature: MA Experiment 108556 PARAMETER Experiment Name: Zm_Drought_P Parameter: Plant Line Value: 35A19
  misc_feature: MA Experiment 108556 PARAMETER Experiment Name: Zm_Drought_P Parameter: Timepoint (hr) Value: 24
  misc_feature: MA Experiment 108556 PARAMETER Experiment Name: Zm_Drought_P Parameter: Tissue Value: Aerial
  misc_feature: MA Experiment 108556 PARAMETER Experiment Name: Zm_Drought_P Parameter: Treatment Value: Drought vs. No Drought
  misc_feature: MA Experiment ID: 20000477 Result: Down-regulated in Transcription
  misc_feature: MA Experiment 20000477 PARAMETER Experiment Name: Zm_5mM_SA_P Parameter: Age (day) Value: 10
  misc_feature: MA Experiment 20000477 PARAMETER Experiment Name: Zm_5mM_SA_P Parameter: Organism Value: Zea mays
  misc_feature: MA Experiment 20000477 PARAMETER Experiment Name: Zm_5mM_SA_P Parameter: Plant Line Value: 35A19
  misc_feature: MA Experiment 20000477 PARAMETER Experiment Name: Zm_5mM_SA_P Parameter: Timepoint (hr) Value: 48
  misc_feature: MA Experiment 20000477 PARAMETER Experiment Name: Zm_5mM_SA_P Parameter: Tissue Value: Aerial
  misc_feature: MA Experiment 20000477 PARAMETER Experiment Name: Zm_5mM_SA_P Parameter: Treatment Value: 5mM SA vs. No Treatment
  misc_feature: MA Experiment ID: 20000478 Result: Down-regulated in Transcription
  misc_feature: MA Experiment 20000478 PARAMETER Experiment Name: Zm_5mM_SA_P Parameter: Age (day) Value: 11
  misc_feature: MA Experiment 20000478 PARAMETER Experiment Name: Zm_5mM_SA_P Parameter: Organism Value: Zea mays
  misc_feature: MA Experiment 20000478 PARAMETER Experiment Name: Zm_5mM_SA_P Parameter: Plant Line Value: 35A19
  misc_feature: MA Experiment 20000478 PARAMETER Experiment Name: Zm_5mM_SA_P Parameter: Timepoint (hr) Value: 72
  misc_feature: MA Experiment 20000478 PARAMETER Experiment Name: Zm_5mM_SA_P Parameter: Tissue Value: Aerial
  misc_feature: MA Experiment 20000478 PARAMETER Experiment Name: Zm_5mM_SA_P Parameter: Treatment Value: 5mM SA vs. No Treatment
  misc_feature: MA Experiment ID: 20000492 Result: Up-regulated in Transcription
  misc_feature: MA Experiment 20000492 PARAMETER Experiment Name: Zm_Hybrid_Seed_Dev_P Parameter: DAP Value: 12
  misc_feature: MA Experiment 20000492 PARAMETER Experiment Name: Zm_Hybrid_Seed_Dev_P Parameter: Organism Value: Zea mays
  misc_feature: MA Experiment 20000492 PARAMETER Experiment Name: Zm_Hybrid_Seed_Dev_P Parameter: Plant Line Value: 35A19
  misc_feature: MA Experiment 20000492 PARAMETER Experiment Name: Zm_Hybrid_Seed_Dev_P Parameter: Tissue Value: Fert Kernel vs. Unfert Floret
  misc_feature: MA Experiment ID: 20000632 Result: Down-regulated in Transcription
  misc_feature: MA Experiment 20000632 PARAMETER Experiment Name: Zm_Herbicide-Treatments_P Parameter: Timepoint (hr) Value: 4
  misc_feature: MA Experiment 20000632 PARAMETER Experiment Name: Zm_Herbicide-Treatments_P Parameter: Tissue Value: Aerial
  misc_feature: MA Experiment 20000632 PARAMETER Experiment Name: Zm_Herbicide-Treatments_P Parameter: Treatment Value: Glean vs. No Treatment
aaaacctcgtctcgcctccttcagtccatcccctcaaccccggcggccaaaagccggcgcaccgaagcggcgggccggcggcaagcggtggccatggcggagctaaagcggctgtcagagagccgggacctgacgcggatcgagcgcatcggcgcgcactcccacatccgggggctagggctggactcctccatggaggcgcgcgacgcctcggagggcatggtcgggcagctgcccgcgcgccgcgccgcggggctcatactccagctcatccgccagggcaagatcgccggccgcgccgttctcctcgcgggccagcccggcaccggcaagaccgcgctcgccatgggcatcgccaagtcgctcggcgcggagacgcccttcgcctccgtcgccgcctcggagctcttctcgctcgacctctccaagacggaggcgctcacgcaggccttccgccgcgccatcggcgtgcgcatcaaggaggagacggaaatcatcgagggcgaggtcgtggagatcttgatcgaccgccctttgtcggcctctgccgctggcggcagctcggctgcccctacaggtgctactgcggctggtaagtcgggtcggctcacgctgaagaccacggacatggaaacggtgtacgagctcgggggaaagatgattgaggctcttgggaaggagaaggtgcagagcggggatgtgattgcgcttgacaaggcctccgggaaggtcaccaagcttggacgctccattgggaggtcgcgggattatgatgccgttggcccgcacaccaagtttgtcaagtgtcctgatggcgagctccagaagcgcaaggagatcgtgcactgtgttaccttacatgagattgatgtcattaatagcaggacacagggttttcttgcactgttcactggtgacaccggtgaaattcgtgcagaggttcgggagcagattgacacaaaagtcgcagagtggagagaggaaggaaaagctgatattgtccctggtgttctgttcatcgatgaagttcacatgctagacattgagtgcttctccttcctcaaccgagcattggaaaatgacatggctccgatcctagtaatcgcaacaaacagagggatcacatccattcgtgggacaaactaccgctcgccacacgggatcccgccagacttccttgaccggttactgatcatcacgacgcagccctacacggaggacgagatcaggaagatcctggacatccggtgcgatgaggaggatgtggagatgtccgcggacgccaaggtcctgctcaccaaaatcggcgtggagacctcgctgcggtacgccatcaaccttatcacatctgccgcactagcctgccagaggcgcaaggggaaggtggtcgacatggaggacattagccgggtgtaccagttgttcctggacgtgaagcggtcgacgcagtacctgatggagtaccagagccagtacatgttcaacgaagtgcccggggaagcagatggagaggacgcgatgcaatcctagatgaacttttcttcaccaggtgtctgtgttagtatgtactgcgtgtctgcgtcgtctatttctggtgcatcttgcttgtttagttgctgttatttcctgacaaggcgtggtgtgtgcgatggactgcctgaaagctgatttaggtaactatatatgcaattcagatgtatcttagtaaaattcaccccagttggagtgacattgtttgttt

SEQ ID NO: 8381 - protein, 509 aa, Zea mays subsp. mays
  peptide (1)..(509): Ceres Seq. ID no. 12405431
  misc_feature (152)..(478): Pfam Name: TIP49 C-terminus Pfam Description: TIP49 C-terminus
  misc_feature (32)..(508): Homolog of NCBI NO: 15240788 NR Description: RuvB DNA helicase-like protein; protein id:
  misc_feature (32)..(498): Homolog of NCBI NO: 15229623 NR Description: RuvB DNA helicase - like protein; protein id:
  misc_feature (32)..(500): Homolog of NCBI NO: 6755382 NR Description: RuvB-like protein 2 [Mus musculus]
  misc_feature (32)..(497): Homolog of NCBI NO: 29126859 NR Description: Similar to RuvB-like protein 2 [Xenopus laevis]
  misc_feature (37)..(500): Homolog of NCBI NO: 5730023 NR Description: RuvB-like 2; erythrocyte cytosolic protein,
  misc_feature (31)..(496): Homolog of NCBI NO: 27819634 NR Description: RuvB-like protein 2 [Danio rerio]
  misc_feature (32)..(506): Homolog of NCBI NO: 17737635 NR Description: reptin CG9750-PA
  misc_feature (37)..(442): Homolog of NCBI NO: 4929561 NR Description: CGI-46 protein [Homo sapiens]
  misc_feature (37)..(509): Homolog of NCBI NO: 23480914 NR Description: Arabidopsis thaliana At5g67630/K9I9_20
  misc_feature (38)..(496): Homolog of NCBI NO: 38105112 NR Description: hypothetical protein MG03173.4 [Magnaporthe
KTSSRLLQSIPSTPAAKSRRTEAAGRRQAVAMAELKRLSESRDLTRIERIGAHSHIRGLGLDSSMEARDASEGMVGQLPARRAAGLILQLIRQGKIAGRAVLLAGQPGTGKTALAMGIAKSLGAETPFASVAASELFSLDLSKTEALTQAFRRAIGVRIKEETEIIEGEVVEILIDRPLSASAAGGSSAAPTGATAAGKSGRLTLKTTDMETVYELGGKMIEALGKEKVQSGDVIALDKASGKVTKLGRSIGRSRDYDAVGPHTKFVKCPDGELQKRKEIVHCVTLHEIDVINSRTQGFLALFTGDTGEIRAEVREQIDTKVAEWREEGKADIVPGVLFIDEVHMLDIECFSFLNRALENDMAPILVIATNRGITSIRGTNYRSPHGIPPDFLDRLLIITTQPYTEDEIRKILDIRCDEEDVEMSADAKVLLTKIGVETSLRYAINLITSAALACQRRKGKVVDMEDISRVYQLFLDVKRSTQYLMEYQSQYMFNEVPGEADGEDAMQS

SEQ ID NO: 8382 - protein, 478 aa, Zea mays subsp. mays; identical to SEQ ID NO: 6964
  peptide (1)..(478): Ceres Seq. ID no. 12405432
  misc_feature (121)..(447): Pfam Name: TIP49 C-terminus Pfam Description: TIP49 C-terminus
  misc_feature (1)..(477): Homolog of NCBI NO: 15240788 NR Description: RuvB DNA helicase-like protein; protein id:
  misc_feature (1)..(467): Homolog of NCBI NO: 15229623 NR Description: RuvB DNA helicase - like protein; protein id:
  misc_feature (1)..(469): Homolog of NCBI NO: 6755382 NR Description: RuvB-like protein 2 [Mus musculus]
  misc_feature (1)..(466): Homolog of NCBI NO: 29126859 NR Description: Similar to RuvB-like protein 2 [Xenopus laevis]
  misc_feature (6)..(469): Homolog of NCBI NO: 5730023 NR Description: RuvB-like 2; erythrocyte cytosolic protein,
  misc_feature (1)..(465): Homolog of NCBI NO: 27819634 NR Description: RuvB-like protein 2 [Danio rerio]
  misc_feature (1)..(475): Homolog of NCBI NO: 17737635 NR Description: reptin CG9750-PA
  misc_feature (6)..(411): Homolog of NCBI NO: 4929561 NR Description: CGI-46 protein [Homo sapiens]
  misc_feature (6)..(478): Homolog of NCBI NO: 23480914 NR Description: Arabidopsis thaliana At5g67630/K9I9_20
  misc_feature (7)..(465): Homolog of NCBI NO: 38105112 NR Description: hypothetical protein MG03173.4 [Magnaporthe

SEQ ID NO: 8383 - protein, 445 aa, Zea mays subsp. mays; identical to SEQ ID NO: 6965
  peptide (1)..(445): Ceres Seq. ID no. 12405433
  misc_feature (88)..(414): Pfam Name: TIP49 C-terminus Pfam Description: TIP49 C-terminus
  misc_feature (1)..(444): Homolog of NCBI NO: 15240788 NR Description: RuvB DNA helicase-like protein; protein id:
  misc_feature (1)..(434): Homolog of NCBI NO: 15229623 NR Description: RuvB DNA helicase - like protein; protein id:
  misc_feature (1)..(436): Homolog of NCBI NO: 6755382 NR Description: RuvB-like protein 2 [Mus musculus]
  misc_feature (1)..(433): Homolog of NCBI NO: 29126859 NR Description: Similar to RuvB-like protein 2 [Xenopus laevis]
  misc_feature (1)..(436): Homolog of NCBI NO: 5730023 NR Description: RuvB-like 2; erythrocyte cytosolic protein,
  misc_feature (1)..(432): Homolog of NCBI NO: 27819634 NR Description: RuvB-like protein 2 [Danio rerio]
  misc_feature (1)..(442): Homolog of NCBI NO: 17737635 NR Description: reptin CG9750-PA
  misc_feature (1)..(378): Homolog of NCBI NO: 4929561 NR Description: CGI-46 protein [Homo sapiens]
  misc_feature (1)..(445): Homolog of NCBI NO: 23480914 NR Description: Arabidopsis thaliana At5g67630/K9I9_20
  misc_feature (1)..(432): Homolog of NCBI NO: 38105112 NR Description: hypothetical protein MG03173.4 [Magnaporthe

SEQ ID NO: 8384 - DNA, 1479 bp, Zea mays subsp. mays
  misc_feature (1)..(1479): Ceres Seq. ID no. 12343690
  misc_feature: MA Experiment ID: 108527 Result: Up-regulated in Transcription
  misc_feature: MA Experiment 108527 PARAMETER Experiment Name: Zm_5mM_NO_P Parameter: Age (day) Value: 8
  misc_feature: MA Experiment 108527 PARAMETER Experiment Name: Zm_5mM_NO_P Parameter: Organism Value: Zea mays
  misc_feature: MA Experiment 108527 PARAMETER Experiment Name: Zm_5mM_NO_P Parameter: Plant Line Value: 35A19
  misc_feature: MA Experiment 108527 PARAMETER Experiment Name: Zm_5mM_NO_P Parameter: Timepoint (hr) Value: 6
  misc_feature: MA Experiment 108527 PARAMETER Experiment Name: Zm_5mM_NO_P Parameter: Tissue Value: Aerial
  misc_feature: MA Experiment 108527 PARAMETER Experiment Name: Zm_5mM_NO_P Parameter: Treatment Value: 5mM NO vs. No Treatment
  misc_feature: MA Experiment ID: 108559 Result: Up-regulated in Transcription
  misc_feature: MA Experiment 108559 PARAMETER Experiment Name: Zm_5mM_NO_P Parameter: Age (day) Value: 8
  misc_feature: MA Experiment 108559 PARAMETER Experiment Name: Zm_5mM_NO_P Parameter: Organism Value: Zea mays
  misc_feature: MA Experiment 108559 PARAMETER Experiment Name: Zm_5mM_NO_P Parameter: Plant Line Value: 35A19
  misc_feature: MA Experiment 108559 PARAMETER Experiment Name: Zm_5mM_NO_P Parameter: Timepoint (hr) Value: 12
  misc_feature: MA Experiment 108559 PARAMETER Experiment Name: Zm_5mM_NO_P Parameter: Tissue Value: Aerial
  misc_feature: MA Experiment 108559 PARAMETER Experiment Name: Zm_5mM_NO_P Parameter: Treatment Value: 5mM NO vs. No Treatment
  misc_feature: MA Experiment ID: 20000477 Result: Up-regulated in Transcription
  misc_feature: MA Experiment 20000477 PARAMETER Experiment Name: Zm_5mM_SA_P Parameter: Age (day) Value: 10
  misc_feature: MA Experiment 20000477 PARAMETER Experiment Name: Zm_5mM_SA_P Parameter: Organism Value: Zea mays
  misc_feature: MA Experiment 20000477 PARAMETER Experiment Name: Zm_5mM_SA_P Parameter: Plant Line Value: 35A19
  misc_feature: MA Experiment 20000477 PARAMETER Experiment Name: Zm_5mM_SA_P Parameter: Timepoint (hr) Value: 48
  misc_feature: MA Experiment 20000477 PARAMETER Experiment Name: Zm_5mM_SA_P Parameter: Tissue Value: Aerial
  misc_feature: MA Experiment 20000477 PARAMETER Experiment Name: Zm_5mM_SA_P Parameter: Treatment Value: 5mM SA vs. No Treatment
  misc_feature: MA Experiment ID: 20000478 Result: Up-regulated in Transcription
  misc_feature: MA Experiment 20000478 PARAMETER Experiment Name: Zm_5mM_SA_P Parameter: Age (day) Value: 11
  misc_feature: MA Experiment 20000478 PARAMETER Experiment Name: Zm_5mM_SA_P Parameter: Organism Value: Zea mays
  misc_feature: MA Experiment 20000478 PARAMETER Experiment Name: Zm_5mM_SA_P Parameter: Plant Line Value: 35A19
  misc_feature: MA Experiment 20000478 PARAMETER Experiment Name: Zm_5mM_SA_P Parameter: Timepoint (hr) Value: 72
  misc_feature: MA Experiment 20000478 PARAMETER Experiment Name: Zm_5mM_SA_P Parameter: Tissue Value: Aerial
  misc_feature: MA Experiment 20000478 PARAMETER Experiment Name: Zm_5mM_SA_P Parameter: Treatment Value: 5mM SA vs. No Treatment
  misc_feature: MA Experiment ID: 20000487 Result: Up-regulated in Transcription
  misc_feature: MA Experiment 20000487 PARAMETER Experiment Name: Zm_50mM_NH4NO3_L_to_H_P Parameter: Organism Value: Zea mays
  misc_feature: MA Experiment 20000487 PARAMETER Experiment Name: Zm_50mM_NH4NO3_L_to_H_P Parameter: Timepoint (hr) Value: 4
  misc_feature: MA Experiment 20000487 PARAMETER Experiment Name: Zm_50mM_NH4NO3_L_to_H_P Parameter: Tissue Value: Leaves
  misc_feature: MA Experiment 20000487 PARAMETER Experiment Name: Zm_50mM_NH4NO3_L_to_H_P Parameter: Treatment Value: 50mM NH4NO3 vs. 100mM Mannitol
gcatctccctttaccattgtctcccccctcgtccgtcctcctcgccgccgcagaccaccgccgccgccgccgctgccgctgcgaacccttgtgaatcttcgttgtccgggctgtggggggcaggcatggcgctccggaggctgctgcaggggagcgtcctgccgcggataatcggcagggatttggcaccggccgtggcgccgttttcaacggagtctggggagaccattcgtgccacgctctttcccggcgatggcatcgggccagagatcgctgagtctgtcaagcaggtattcaatgttgcaggggtaccaattgaatgggaagaacactatgtcagtacagaagttgatcccagaacagagagttttttgacttgggaaagcctggagtcagtgcgtagaaataaagttggcttgaaaggacctatggctacacctattggaaagggccatcgatctttgaatcttacattaaggaaagaacttgggctctatgccaatgtcagaccttgcaacagcctcccaggttacaagaccagatacgatgatgttaaccttgtaacaattcgtgaaaatactgaaggagaatatagtggtcttgagcatcaggttgtgagaggtgttgtggaaagtttgaaaattattacacgccaagcaagtttgagagtggcagagtatgctttccattatgccaaggccaatggccgggaaagagtctctgcgatccacaaagccaatattatgaggaagacagatggtcttttcctcaagtgttgccgtgaagtggctgaaaagtaccctgaaattcaatacgaggaggtcatcattgacaattgctgtatgacgcttgtgaagaatcctggtctttttgacgtattagtgatgccaaatctctatggtgacattattagtgatctatgtgctggtttgatcgggggcttgggcctaacacccagttgcaatattggtgaaggtggcattttctggcagaagctgttcatggttctgctcctgatattgctggcaagaacctcgcgaacccgactgctcttatgctgagtgctgtcatgttgttgcgccacatgcaattcaacgacaaagcagaccggatccacaacgccatcctccagaccatcgccgaggggaagtacaggactgctgatcttggtggaaaggcatcgacatcagagtttacaaacgcagtctgtgatcacatctgagaaacggatgtgattcttccttctgattgttttgtcatcctaatattttttgtcacatatgagaggagctttagctttaagaggttaactggcagcacctcgaacttctttggggtgtttaacacggtttgagaccgtcaaataattttgtcacatttcttgctgttcagaaattctttcaacattggaatggagccaagaattgtctgtaataatcaacatcagcattataacagtatgtagggtttatcttattc

SEQ ID NO: 8385 - protein, 352 aa, Zea mays subsp. mays
  peptide (1)..(352): Ceres Seq. ID no. 12343691
  misc_feature (77)..(327): Pfam Name: Isocitrate/isopropylmalate dehydrogenase Pfam Description: Isocitrate/isopropylmalate dehydrogenase
  misc_feature (68)..(327): Homolog of NCBI NO: 7427677 NR Description: 3-isopropylmalate dehydrogenase (EC 1.1.1.85)
  misc_feature (45)..(327): Homolog of NCBI NO: 21536667 NR Description: putative (NAD+) isocitrate dehydrogenase
  misc_feature (42)..(327): Homolog of NCBI NO: 34903262 NR Description: unnamed protein product [Oryza sativa (japonica group)] >gi|6539562|dbj|BAA88179.1| unnamed protein product
  misc_feature (40)..(327): Homolog of NCBI NO: 11251553 NR Description: 3-isopropylmalate dehydrogenase-like protein -
  misc_feature (78)..(327): Homolog of NCBI NO: 28974492 NR Description: NAD-dependent isocitrate dehydrogenase alpha
  misc_feature (68)..(327): Homolog of NCBI NO: 266463 NR Description: 3-isopropylmalate dehydrogenase, chloroplast
  misc_feature (40)..(327): Homolog of NCBI NO: 18414179 NR Description: putative protein; protein id: At5g03290.1, by cDNA: gi_15724319, supported by cDNA: gi_20466713 [Arabidopsis >gi|15724320|gb|AAL06553.1|AF412100_1 W25EPL23M/W25EPL23M
  misc_feature (68)..(327): Homolog of NCBI NO: 7431333 NR Description: probable isocitrate dehydrogenase (NAD) (EC
  misc_feature (45)..(327): Homolog of NCBI NO: 30681023 NR Description: isocitrate dehydrogenase [NAD+], putative thaliana] >gi|6681337|gb|AAF23254.1|AC015985_12 putative dehydrogenase (NAD+) [Arabidopsis thaliana]
  misc_feature (43)..(332): Homolog of NCBI NO: 31206479 NR Description: ENSANGP00000023556 [Anopheles gambiae]
ISLYHCLPPRPSSSPPQTTAAAAAAAANPCESSLSGLWGAGMALRRLLQGSVLPRIIGRDLAPAVAPFSTESGETIRATLFPGDGIGPEIAESVKQVFNVAGVPIEWEEHYVSTEVDPRTESFLTWESLESVRRNKVGLKGPMATPIGKGHRSLNLTLRKELGLYANVRPCNSLPGYKTRYDDVNLVTIRENTEGEYSGLEHQVVRGVVESLKIITRQASLRVAEYAFHYAKANGRERVSAIHKANIMRKTDGLFLKCCREVAEKYPEIQYEEVIIDNCCMTLVKNPGLFDVLVMPNLYGDIISDLCAGLIGGLGLTPSCNIGEGGIFWQKLFMVLLLILLARTSRTRLLLC

SEQ ID NO: 8386 - protein, 311 aa, Zea mays subsp. mays
  peptide (1)..(311): Ceres Seq. ID no. 12343692
  misc_feature (36)..(286): Pfam Name: Isocitrate/isopropylmalate dehydrogenase Pfam Description: Isocitrate/isopropylmalate dehydrogenase
  misc_feature (1)..(286): Homolog of NCBI NO: 34903262 NR Description: unnamed protein product [Oryza sativa (japonica group)] >gi|6539562|dbj|BAA88179.1| unnamed protein product
  misc_feature (27)..(286): Homolog of NCBI NO: 7431333 NR Description: probable isocitrate dehydrogenase (NAD) (EC
  misc_feature (1)..(286): Homolog of NCBI NO: 11251553 NR Description: 3-isopropylmalate dehydrogenase-like protein -
  misc_feature (1)..(286): Homolog of NCBI NO: 18414179 NR Description: putative protein; protein id: At5g03290.1, by cDNA: gi_15724319, supported by cDNA: gi_20466713 [Arabidopsis >gi|15724320|gb|AAL06553.1|AF412100_1 W25EPL23M/W25EPL23M
  misc_feature (37)..(286): Homolog of NCBI NO: 28974492 NR Description: NAD-dependent isocitrate dehydrogenase alpha
  misc_feature (27)..(286): Homolog of NCBI NO: 266463 NR Description: 3-isopropylmalate dehydrogenase, chloroplast
  misc_feature (27)..(286): Homolog of NCBI NO: 7427677 NR Description: 3-isopropylmalate dehydrogenase (EC 1.1.1.85)
  misc_feature (4)..(286): Homolog of NCBI NO: 21536667 NR Description: putative (NAD+) isocitrate dehydrogenase
  misc_feature (4)..(286): Homolog of NCBI NO: 30681023 NR Description: isocitrate dehydrogenase [NAD+], putative thaliana] >gi|6681337|gb|AAF23254.1|AC015985_12 putative dehydrogenase (NAD+) [Arabidopsis thaliana]
  misc_feature (2)..(291): Homolog of NCBI NO: 31206479 NR Description: ENSANGP00000023556 [Anopheles gambiae]
MALRRLLQGSVLPRIIGRDLAPAVAPFSTESGETIRATLFPGDGIGPEIAESVKQVFNVAGVPIEWEEHYVSTEVDPRTESFLTWESLESVRRNKVGLKGPMATPIGKGHRSLNLTLRKELGLYANVRPCNSLPGYKTRYDDVNLVTIRENTEGEYSGLEHQVVRGVVESLKIITRQASLRVAEYAFHYAKANGRERVSAIHKANIMRKTDGLFLKCCREVAEKYPEIQYEEVIIDNCCMTLVKNPGLFDVLVMPNLYGDIISDLCAGLIGGLGLTPSCNIGEGGIFWQKLFMVLLLILLARTSRTRLLLC

SEQ ID NO: 8387 - protein, 210 aa, Zea mays subsp. mays
  peptide (1)..(210): Ceres Seq. ID no. 12343693
  misc_feature (1)..(185): Pfam Name: Isocitrate/isopropylmalate dehydrogenase Pfam Description: Isocitrate/isopropylmalate dehydrogenase
  misc_feature (1)..(185): Homolog of NCBI NO: 34903262 NR Description: unnamed protein product [Oryza sativa (japonica group)] >gi|6539562|dbj|BAA88179.1| unnamed protein product
  misc_feature (1)..(185): Homolog of NCBI NO: 7431333 NR Description: probable isocitrate dehydrogenase (NAD) (EC
  misc_feature (1)..(185): Homolog of NCBI NO: 11251553 NR Description: 3-isopropylmalate dehydrogenase-like protein -
  misc_feature (1)..(185): Homolog of NCBI NO: 18414179 NR Description: putative protein; protein id: At5g03290.1, by cDNA: gi_15724319, supported by cDNA: gi_20466713 [Arabidopsis >gi|15724320|gb|AAL06553.1|AF412100_1 W25EPL23M/W25EPL23M
  misc_feature (1)..(185): Homolog of NCBI NO: 28974492 NR Description: NAD-dependent isocitrate dehydrogenase alpha
  misc_feature (1)..(185): Homolog of NCBI NO: 266463 NR Description: 3-isopropylmalate dehydrogenase, chloroplast
  misc_feature (1)..(185): Homolog of NCBI NO: 7427677 NR Description: 3-isopropylmalate dehydrogenase (EC 1.1.1.85)
  misc_feature (1)..(185): Homolog of NCBI NO: 21536667 NR Description: putative (NAD+) isocitrate dehydrogenase
  misc_feature (1)..(185): Homolog of NCBI NO: 30681023 NR Description: isocitrate dehydrogenase [NAD+], putative thaliana] >gi|6681337|gb|AAF23254.1|AC015985_12 putative dehydrogenase (NAD+) [Arabidopsis thaliana]
  misc_feature (1)..(190): Homolog of NCBI NO: 31206479 NR Description: ENSANGP00000023556 [Anopheles gambiae]
MATPIGKGHRSLNLTLRKELGLYANVRPCNSLPGYKTRYDDVNLVTIRENTEGEYSGLEHQVVRGVVESLKIITRQASLRVAEYAFHYAKANGRERVSAIHKANIMRKTDGLFLKCCREVAEKYPEIQYEEVIIDNCCMTLVKNPGLFDVLVMPNLYGDIISDLCAGLIGGLGLTPSCNIGEGGIFWQKLFMVLLLILLARTSRTRLLLC

SEQ ID NO: 8388 - DNA, 1221 bp, Zea mays subsp. mays
  misc_feature (1)..(1221): Ceres Seq. ID no. 12413244
  misc_feature: MA Experiment ID: 108528 Result: Down-regulated in Transcription
  misc_feature: MA Experiment 108528 PARAMETER Experiment Name: Zm_Imbibed_Seeds_P Parameter: Age (day) Value: 5 vs. 2
  misc_feature: MA Experiment 108528 PARAMETER Experiment Name: Zm_Imbibed_Seeds_P Parameter: Organism Value: Zea mays
  misc_feature: MA Experiment 108528 PARAMETER Experiment Name: Zm_Imbibed_Seeds_P Parameter: Plant Line Value: 35A19
  misc_feature: MA Experiment 108528 PARAMETER Experiment Name: Zm_Imbibed_Seeds_P Parameter: Tissue Value: Aerial vs. Embryo
  misc_feature: MA Experiment ID: 108530 Result: Down-regulated in Transcription
  misc_feature: MA Experiment 108530 PARAMETER Experiment Name: Zm_Imbibed_Seeds_P Parameter: Age (day) Value: 6 vs. 2
  misc_feature: MA Experiment 108530 PARAMETER Experiment Name: Zm_Imbibed_Seeds_P Parameter: Organism Value: Zea mays
  misc_feature: MA Experiment 108530 PARAMETER Experiment Name: Zm_Imbibed_Seeds_P Parameter: Plant Line Value: 35A19
  misc_feature: MA Experiment 108530 PARAMETER Experiment Name: Zm_Imbibed_Seeds_P Parameter: Tissue Value: Aerial vs. Embryo
  misc_feature: MA Experiment ID: 108543 Result: Up-regulated in Transcription
  misc_feature: MA Experiment ID: 108556 Result: Down-regulated in Transcription
  misc_feature: MA Experiment 108556 PARAMETER Experiment Name: Zm_Drought_P Parameter: Age (day) Value: 9
  misc_feature: MA Experiment 108556 PARAMETER Experiment Name: Zm_Drought_P Parameter: Organism Value: Zea mays
  misc_feature: MA Experiment 108556 PARAMETER Experiment Name: Zm_Drought_P Parameter: Plant Line Value: 35A19
  misc_feature: MA Experiment 108556 PARAMETER Experiment Name: Zm_Drought_P Parameter: Timepoint (hr) Value: 24
  misc_feature: MA Experiment 108556 PARAMETER Experiment Name: Zm_Drought_P Parameter: Tissue Value: Aerial
  misc_feature: MA Experiment 108556 PARAMETER Experiment Name: Zm_Drought_P Parameter: Treatment Value: Drought vs. No Drought
  misc_feature: MA Experiment ID: 108597 Result: Down-regulated in Transcription
  misc_feature: MA Experiment 108597 PARAMETER Experiment Name: Zm_100uM_ABA_P Parameter: Age (day) Value: 9
  misc_feature: MA Experiment 108597 PARAMETER Experiment Name: Zm_100uM_ABA_P Parameter: Organism Value: Zea mays
  misc_feature: MA Experiment 108597 PARAMETER Experiment Name: Zm_100uM_ABA_P Parameter: Plant Line Value: 35A19
  misc_feature: MA Experiment 108597 PARAMETER Experiment Name: Zm_100uM_ABA_P Parameter: Timepoint (hr) Value: 24
  misc_feature: MA Experiment 108597 PARAMETER Experiment Name: Zm_100uM_ABA_P Parameter: Tissue Value: Aerial
  misc_feature: MA Experiment 108597 PARAMETER Experiment Name: Zm_100uM_ABA_P Parameter: Treatment Value: 100uM ABA vs. No Treatment
  misc_feature: MA Experiment ID: 20000478 Result: Down-regulated in Transcription
  misc_feature: MA Experiment 20000478 PARAMETER Experiment Name: Zm_5mM_SA_P Parameter: Age (day) Value: 11
  misc_feature: MA Experiment 20000478 PARAMETER Experiment Name: Zm_5mM_SA_P Parameter: Organism Value: Zea mays
  misc_feature: MA Experiment 20000478 PARAMETER Experiment Name: Zm_5mM_SA_P Parameter: Plant Line Value: 35A19
  misc_feature: MA Experiment 20000478 PARAMETER Experiment Name: Zm_5mM_SA_P Parameter: Timepoint (hr) Value: 72
  misc_feature: MA Experiment 20000478 PARAMETER Experiment Name: Zm_5mM_SA_P Parameter: Tissue Value: Aerial
  misc_feature: MA Experiment 20000478 PARAMETER Experiment Name: Zm_5mM_SA_P Parameter: Treatment Value: 5mM SA vs. No Treatment
  misc_feature: MA Experiment ID: 20000479 Result: Down-regulated in Transcription
  misc_feature: MA Experiment 20000479 PARAMETER Experiment Name: Zm_Drought_P Parameter: Age (day) Value: 10
  misc_feature: MA Experiment 20000479 PARAMETER Experiment Name: Zm_Drought_P Parameter: Organism Value: Zea mays
  misc_feature: MA Experiment 20000479 PARAMETER Experiment Name: Zm_Drought_P Parameter: Plant Line Value: 35A19
  misc_feature: MA Experiment 20000479 PARAMETER Experiment Name: Zm_Drought_P Parameter: Timepoint (hr) Value: 48
  misc_feature: MA Experiment 20000479 PARAMETER Experiment Name: Zm_Drought_P Parameter: Tissue Value: Aerial
  misc_feature: MA Experiment 20000479 PARAMETER Experiment Name: Zm_Drought_P Parameter: Treatment Value: Drought vs. No Drought
  misc_feature: MA Experiment ID: 20000480 Result: Down-regulated in Transcription
  misc_feature: MA Experiment 20000480 PARAMETER Experiment Name: Zm_Drought_P Parameter: Age (day) Value: 11
  misc_feature: MA Experiment 20000480 PARAMETER Experiment Name: Zm_Drought_P Parameter: Organism Value: Zea mays
  misc_feature: MA Experiment 20000480 PARAMETER Experiment Name: Zm_Drought_P Parameter: Plant Line Value: 35A19
  misc_feature: MA Experiment 20000480 PARAMETER Experiment Name: Zm_Drought_P Parameter: Timepoint (hr) Value: 72
  misc_feature: MA Experiment 20000480 PARAMETER Experiment Name: Zm_Drought_P Parameter: Tissue Value: Aerial
  misc_feature: MA Experiment 20000480 PARAMETER Experiment Name: Zm_Drought_P Parameter: Treatment Value: Drought vs. No Drought
  misc_feature: MA Experiment ID: 20000534 Result: Down-regulated in Transcription
  misc_feature: MA Experiment 20000534 PARAMETER Experiment Name: Zm_Hybrid_Pollen_P Parameter: Age (day) Value: 8
  misc_feature: MA Experiment 20000534 PARAMETER Experiment Name: Zm_Hybrid_Pollen_P Parameter: Organism Value: Zea mays
  misc_feature: MA Experiment 20000534 PARAMETER Experiment Name: Zm_Hybrid_Pollen_P Parameter: Plant Line Value: 35A19
  misc_feature: MA Experiment 20000534 PARAMETER Experiment Name: Zm_Hybrid_Pollen_P Parameter: Tissue Value: Pollen vs. Aerial
  misc_feature: MA Experiment ID: 20000629 Result: Up-regulated in Transcription
  misc_feature: MA Experiment 20000629 PARAMETER Experiment Name: Zm_Herbicide-Treatments_P Parameter: Timepoint (hr) Value: 12
  misc_feature: MA Experiment 20000629 PARAMETER Experiment Name: Zm_Herbicide-Treatments_P Parameter: Tissue Value: Aerial
  misc_feature: MA Experiment 20000629 PARAMETER Experiment Name: Zm_Herbicide-Treatments_P Parameter: Treatment Value: Trimec vs. No Treatment
gtcctctcttcttccaccaccacctcctactccgctgcaaccccaaatctctccttcctcgcatacgcgcgcagcggaggagctgagaccaacgaagaagaagaagaacaaccgagcaagcacaagcttagctagcgtgtaggtgtccaaggcgacgacggccgccgcgccaggctagccaaccagctgctcatcgctcctagctgcggagccgatatggctggcgccgacgtcgacgtcgggacggagctccgtctcggcctgccgggaggaggcgccgatgcggccaaggctgccaagaggggcttcgaggacaccatcgacctcaagctgaagctgcccaccgccggcatggaggaagctgccgccgccgccgccgccgccgccaagcccgagccggcagccgagaaggccaagaggcccgccgaggcgccggccgctgatgccgagaagccacccgcacccaaggcacaagctgtgggttggccaccagtccggtcataccgcaggaacgtcatgaccgtccagtctgtgaagagcaagaaggaagaggagcctgagaagcagcagtccgctgccaacgccggcggcaacggctccgccttcgtgaaggtcagcatggacggcgcgccctacctgcgcaaggtggacctgaagatgtacaacagcntacacggagctctccgttgctctgaagaagatgttcagcaccttcaccacatccgggaacaacatgaatgagggaaaactggttgatccggtcagcggtgctgatgtggtcactacttacgaagacaaggatggcgactggatgctcgttggcgacgtcccgtgggagatgtttgtcgagtcatgcaggcgtctgaggatcatgaagagttctgaagccataggtcttgcaccaagaacgaaggacaagtgcaagaacaggagctgaagaagatacagcgttaaagacgctgcccattgtgtcaaaagaatggtgcccttgcagtgtgctgcggtttttctagaaatataatgcgttttaattactagttggagggagacctgtcttgttcaatttgttcatggaccagaagcaataatctatctgtgtgtagctggattggtgttatgcgatgtcccctaccgtgtcccagaatctacttggtgattttatcccagtgttgttaatcaagcttgtgtgattgttaagtaaagggcatcaatgagactatt

SEQ ID NO: 8389 - protein, 174 aa, Zea mays subsp. mays
  peptide (1)..(174): Ceres Seq. ID no. 12413245
  misc_feature (10)..(151): Pfam Name: AUX/IAA family Pfam Description: AUX/IAA family
  misc_feature (1)..(151): Homolog of NCBI NO: 17154533 NR Description: putative IAA1 protein [Oryza sativa (indica
  misc_feature (1)..(151): Homolog of NCBI NO: 30962267 NR Description: Aux/IAA protein [Oryza sativa (indica
  misc_feature (1)..(151): Homolog of NCBI NO: 40539038 NR Description: putative auxin-responsive protein (with
  misc_feature (10)..(151): Homolog of NCBI NO: 20385508 NR Description: auxin-regulated protein [Populus tremula x
  misc_feature (10)..(151): Homolog of NCBI NO: 114734 NR Description: AUXIN-INDUCED PROTEIN AUX28 >gi|81759|pir||A28993
  misc_feature (10)..(151): Homolog of NCBI NO: 21593352 NR Description: indoleacetic acid (IAA)-inducible gene (IAA7)
  misc_feature (10)..(151): Homolog of NCBI NO: 15228943 NR Description: indoleacetic acid (IAA)-inducible gene (IAA7); id: At3g23050.1, supported by cDNA: 38286., supported by cDNA:
  misc_feature (10)..(151): Homolog of NCBI NO: 15229343 NR Description: auxin-induced protein; protein id: At3g04730.1, by cDNA: 32727., supported by cDNA: gi_12083209, supported by
  misc_feature (33)..(151): Homolog of NCBI NO: 4887022 NR Description: Nt-iaa4.1 deduced protein [Nicotiana tabacum]
  misc_feature (1)..(151): Homolog of NCBI NO: 34904314 NR Description: unnamed protein product [Oryza sativa (japonica group)] >gi|7340910|dbj|BAA92982.1| unnamed protein product
  misc_feature (152)..(152): Xaa is any aa, unknown or other
MAGADVDVGTELRLGLPGGGADAAKAAKRGFEDTIDLKLKLPTAGMEEAAAAAAAAAKPEPAAEKAKRPAEAPAADAEKPPAPKAQAVGWPPVRSYRRNVMTVQSVKSKKEEEPEKQQSAANAGGNGSAFVKVSMDGAPYLRKVDLKMYNSXHGALRCSEEDVQHLHHIREQHE

SEQ ID NO: 8390 - protein, 129 aa, Zea mays subsp. mays
  peptide (1)..(129): Ceres Seq. ID no. 12413246
  misc_feature (1)..(106): Pfam Name: AUX/IAA family Pfam Description: AUX/IAA family
  misc_feature (1)..(106): Homolog of NCBI NO: 17154533 NR Description: putative IAA1 protein [Oryza sativa (indica
  misc_feature (1)..(106): Homolog of NCBI NO: 30962267 NR Description: Aux/IAA protein [Oryza sativa (indica
  misc_feature (1)..(106): Homolog of NCBI NO: 40539038 NR Description: putative auxin-responsive protein (with
  misc_feature (1)..(106): Homolog of NCBI NO: 20385508 NR Description: auxin-regulated protein [Populus tremula x
  misc_feature (1)..(106): Homolog of NCBI NO: 114734 NR Description: AUXIN-INDUCED PROTEIN AUX28 >gi|81759|pir||A28993
  misc_feature (1)..(106): Homolog of NCBI NO: 21593352 NR Description: indoleacetic acid (IAA)-inducible gene (IAA7)
  misc_feature (1)..(106): Homolog of NCBI NO: 15228943 NR Description: indoleacetic acid (IAA)-inducible gene (IAA7); id: At3g23050.1, supported by cDNA: 38286., supported by cDNA:
  misc_feature (1)..(106): Homolog of NCBI NO: 15229343 NR Description: auxin-induced protein; protein id: At3g04730.1, by cDNA: 32727., supported by cDNA: gi_12083209, supported by
  misc_feature (1)..(106): Homolog of NCBI NO: 4887022 NR Description: Nt-iaa4.1 deduced protein [Nicotiana tabacum]
  misc_feature (1)..(106): Homolog of NCBI NO: 34904314 NR Description: unnamed protein product [Oryza sativa (japonica group)] >gi|7340910|dbj|BAA92982.1| unnamed protein product
  misc_feature (107)..(107): Xaa is any aa, unknown or other
MEEAAAAAAAAAKPEPAAEKAKRPAEAPAADAEKPPAPKAQAVGWPPVRSYRRNVMTVQSVKSKKEEEPEKQQSAANAGGNGSAFVKVSMDGAPYLRKVDLKMYNSXHGALRCSEEDVQHLHHIREQHE

SEQ ID NO: 8391 - DNA, 782 bp, Zea mays subsp. mays
  misc_feature (1)..(782): Ceres Seq. ID no. 12412537
  misc_feature: MA Experiment ID: 108504 Result: Down-regulated in Transcription
  misc_feature: MA Experiment 108504 PARAMETER Experiment Name: Zm_Drought_P Parameter: Age (day) Value: 8
  misc_feature: MA Experiment 108504 PARAMETER Experiment Name: Zm_Drought_P Parameter: Organism Value: Zea mays
  misc_feature: MA Experiment 108504 PARAMETER Experiment Name: Zm_Drought_P Parameter: Plant Line Value: 35A19
  misc_feature: MA Experiment 108504 PARAMETER Experiment Name: Zm_Drought_P Parameter: Timepoint (hr) Value: 12
  misc_feature: MA Experiment 108504 PARAMETER Experiment Name: Zm_Drought_P Parameter: Tissue Value: Aerial
  misc_feature: MA Experiment 108504 PARAMETER Experiment Name: Zm_Drought_P Parameter: Treatment Value: Drought vs. No Drought
  misc_feature: MA Experiment ID: 108522 Result: Down-regulated in Transcription
  misc_feature: MA Experiment 108522 PARAMETER Experiment Name: Zm_42deg_Heat_P Parameter: Age (day) Value: 8
  misc_feature: MA Experiment 108522 PARAMETER Experiment Name: Zm_42deg_Heat_P Parameter: Organism Value: Zea mays
  misc_feature: MA Experiment 108522 PARAMETER Experiment Name: Zm_42deg_Heat_P Parameter: Plant Line Value: 35A19
  misc_feature: MA Experiment 108522 PARAMETER Experiment Name: Zm_42deg_Heat_P Parameter: Temperature (deg C) Value: 42 vs. 22
  misc_feature: MA Experiment 108522 PARAMETER Experiment Name: Zm_42deg_Heat_P Parameter: Timepoint (hr) Value: 1
  misc_feature: MA Experiment 108522 PARAMETER Experiment Name: Zm_42deg_Heat_P Parameter: Tissue Value: Aerial
  misc_feature: MA Experiment ID: 108523 Result: Down-regulated in Transcription
  misc_feature: MA Experiment 108523 PARAMETER Experiment Name: Zm_42deg_Heat_P Parameter: Age (day) Value: 8
  misc_feature: MA Experiment 108523 PARAMETER Experiment Name: Zm_42deg_Heat_P Parameter: Organism Value: Zea mays
  misc_feature: MA Experiment 108523 PARAMETER Experiment Name: Zm_42deg_Heat_P Parameter: Plant Line Value: 35A19
  misc_feature: MA Experiment 108523 PARAMETER Experiment Name: Zm_42deg_Heat_P Parameter: Temperature (deg C) Value: 42 vs. 22
  misc_feature: MA Experiment 108523 PARAMETER Experiment Name: Zm_42deg_Heat_P Parameter: Timepoint (hr) Value: 6
  misc_feature: MA Experiment 108523 PARAMETER Experiment Name: Zm_42deg_Heat_P Parameter: Tissue Value: Aerial
  misc_feature: MA Experiment ID: 108527 Result: Down-regulated in Transcription
  misc_feature: MA Experiment 108527 PARAMETER Experiment Name: Zm_5mM_NO_P Parameter: Age (day) Value: 8
  misc_feature: MA Experiment 108527 PARAMETER Experiment Name: Zm_5mM_NO_P Parameter: Organism Value: Zea mays
  misc_feature: MA Experiment 108527 PARAMETER Experiment Name: Zm_5mM_NO_P Parameter: Plant Line Value: 35A19
  misc_feature: MA Experiment 108527 PARAMETER Experiment Name: Zm_5mM_NO_P Parameter: Timepoint (hr) Value: 6
  misc_feature: MA Experiment 108527 PARAMETER Experiment Name: Zm_5mM_NO_P Parameter: Tissue Value: Aerial
  misc_feature: MA Experiment 108527 PARAMETER Experiment Name: Zm_5mM_NO_P Parameter: Treatment Value: 5mM NO vs. No Treatment
  misc_feature: MA Experiment ID: 108535 Result: Up-regulated in Transcription
  misc_feature: MA Experiment 108535 PARAMETER Experiment Name: Zm_Meristem_P Parameter: Age (day) Value: 8
  misc_feature: MA Experiment 108535 PARAMETER Experiment Name: Zm_Meristem_P Parameter: Organism Value: Zea mays
  misc_feature: MA Experiment 108535 PARAMETER Experiment Name: Zm_Meristem_P Parameter: Plant Line Value: 35A19
  misc_feature: MA Experiment 108535 PARAMETER Experiment Name: Zm_Meristem_P Parameter: Tissue Value: Root Meristem vs. Above Root Meristem
  misc_feature: MA Experiment ID: 108540 Result: Down-regulated in Transcription
  misc_feature: MA Experiment 108540 PARAMETER Experiment Name: Zm_20percent_PEG_P Parameter: Age (day) Value: 8
  misc_feature: MA Experiment 108540 PARAMETER Experiment Name: Zm_20percent_PEG_P Parameter: Organism Value: Zea mays
  misc_feature: MA Experiment 108540 PARAMETER Experiment Name: Zm_20percent_PEG_P Parameter: Plant Line Value: 35A19
  misc_feature: MA Experiment 108540 PARAMETER Experiment Name: Zm_20percent_PEG_P Parameter: Timepoint (hr) Value: 6
  misc_feature: MA Experiment 108540 PARAMETER Experiment Name: Zm_20percent_PEG_P Parameter: Tissue Value: Aerial
  misc_feature: MA Experiment 108540 PARAMETER Experiment Name: Zm_20percent_PEG_P Parameter: Treatment Value: 20percent PEG vs. No Treatment
  misc_feature: MA Experiment ID: 108542 Result: Down-regulated in Transcription
  misc_feature: MA Experiment 108542 PARAMETER Experiment Name: Zm_150mM_NaCl_P Parameter: Age (day) Value: 8
  misc_feature: MA Experiment 108542 PARAMETER Experiment Name: Zm_150mM_NaCl_P Parameter: Organism Value: Zea mays
  misc_feature: MA Experiment 108542 PARAMETER Experiment Name: Zm_150mM_NaCl_P Parameter: Plant Line Value: 35A19
  misc_feature: MA Experiment 108542 PARAMETER Experiment Name: Zm_150mM_NaCl_P Parameter: Timepoint (hr) Value: 6
  misc_feature: MA Experiment 108542 PARAMETER Experiment Name: Zm_150mM_NaCl_P Parameter: Tissue Value: Aerial
  misc_feature: MA Experiment 108542 PARAMETER Experiment Name: Zm_150mM_NaCl_P Parameter: Treatment Value: 150mM NaCl vs. No Treatment
  misc_feature: MA Experiment ID: 108544 Result: Down-regulated in Transcription
  misc_feature: MA Experiment ID: 108559 Result: Down-regulated in Transcription
  misc_feature: MA Experiment 108559 PARAMETER Experiment Name: Zm_5mM_NO_P Parameter: Age (day) Value: 8
  misc_feature: MA Experiment 108559 PARAMETER Experiment Name: Zm_5mM_NO_P Parameter: Organism Value: Zea mays
  misc_feature: MA Experiment 108559 PARAMETER Experiment Name: Zm_5mM_NO_P Parameter: Plant Line Value: 35A19
  misc_feature: MA Experiment 108559 PARAMETER Experiment Name: Zm_5mM_NO_P Parameter: Timepoint (hr) Value: 12
  misc_feature: MA Experiment 108559 PARAMETER Experiment Name: Zm_5mM_NO_P Parameter: Tissue Value: Aerial
  misc_feature: MA Experiment 108559 PARAMETER Experiment Name: Zm_5mM_NO_P Parameter: Treatment Value: 5mM NO vs. No Treatment
  misc_feature: MA Experiment ID: 108597 Result: Down-regulated in Transcription
  misc_feature: MA Experiment 108597 PARAMETER Experiment Name: Zm_100uM_ABA_P Parameter: Age (day) Value: 9
  misc_feature: MA Experiment 108597 PARAMETER Experiment Name: Zm_100uM_ABA_P Parameter: Organism Value: Zea mays
  misc_feature: MA Experiment 108597 PARAMETER Experiment Name: Zm_100uM_ABA_P Parameter: Plant Line Value: 35A19
  misc_feature: MA Experiment 108597 PARAMETER Experiment Name: Zm_100uM_ABA_P Parameter: Timepoint (hr) Value: 24
  misc_feature: MA Experiment 108597 PARAMETER Experiment Name: Zm_100uM_ABA_P Parameter: Tissue Value: Aerial
  misc_feature: MA Experiment 108597 PARAMETER Experiment Name: Zm_100uM_ABA_P Parameter: Treatment Value: 100uM ABA vs. No Treatment
  misc_feature: MA Experiment ID: 108689 Result: Down-regulated in Transcription
  misc_feature: MA Experiment 108689 PARAMETER Experiment Name: Zm_Drought_Roots_P Parameter: Age (day) Value: 9
  misc_feature: MA Experiment 108689 PARAMETER Experiment Name: Zm_Drought_Roots_P Parameter: Organism Value: Zea mays
  misc_feature: MA Experiment 108689 PARAMETER Experiment Name: Zm_Drought_Roots_P Parameter: Plant Line Value: 35A19
  misc_feature: MA Experiment 108689 PARAMETER Experiment Name: Zm_Drought_Roots_P Parameter: Timepoint (hr) Value: 24
  misc_feature: MA Experiment 108689 PARAMETER Experiment Name: Zm_Drought_Roots_P Parameter: Tissue Value: Roots
  misc_feature: MA Experiment 108689 PARAMETER Experiment Name: Zm_Drought_Roots_P Parameter: Treatment Value: Drought vs. No Drought
  misc_feature: MA Experiment ID: 20000477 Result: Down-regulated in Transcription
  misc_feature: MA Experiment 20000477 PARAMETER Experiment Name: Zm_5mM_SA_P Parameter: Age (day) Value: 10
  misc_feature: MA Experiment 20000477 PARAMETER Experiment Name: Zm_5mM_SA_P Parameter: Organism Value: Zea mays
  misc_feature: MA Experiment 20000477 PARAMETER Experiment Name: Zm_5mM_SA_P Parameter: Plant Line Value: 35A19
  misc_feature: MA Experiment 20000477 PARAMETER Experiment Name: Zm_5mM_SA_P Parameter: Timepoint (hr) Value: 48
  misc_feature: MA Experiment 20000477 PARAMETER Experiment Name: Zm_5mM_SA_P Parameter: Tissue Value: Aerial
  misc_feature: MA Experiment 20000477 PARAMETER Experiment Name: Zm_5mM_SA_P Parameter: Treatment Value: 5mM SA vs. No Treatment
  misc_feature: MA Experiment ID: 20000478 Result: Down-regulated in Transcription
  misc_feature: MA Experiment 20000478 PARAMETER Experiment Name: Zm_5mM_SA_P Parameter: Age (day) Value: 11
  misc_feature: MA Experiment 20000478 PARAMETER Experiment Name: Zm_5mM_SA_P Parameter: Organism Value: Zea mays
  misc_feature: MA Experiment 20000478 PARAMETER Experiment Name: Zm_5mM_SA_P Parameter: Plant Line Value: 35A19
  misc_feature: MA Experiment 20000478 PARAMETER Experiment Name: Zm_5mM_SA_P Parameter: Timepoint (hr) Value: 72
  misc_feature: MA Experiment 20000478 PARAMETER Experiment Name: Zm_5mM_SA_P Parameter: Tissue Value: Aerial
  misc_feature: MA Experiment 20000478 PARAMETER Experiment Name: Zm_5mM_SA_P Parameter: Treatment Value: 5mM SA vs. No Treatment
  misc_feature: MA Experiment ID: 20000479 Result: Down-regulated in Transcription
  misc_feature: MA Experiment 20000479 PARAMETER Experiment Name: Zm_Drought_P Parameter: Age (day) Value: 10
  misc_feature: MA Experiment 20000479 PARAMETER Experiment Name: Zm_Drought_P Parameter: Organism Value: Zea mays
  misc_feature: MA Experiment 20000479 PARAMETER Experiment Name: Zm_Drought_P Parameter: Plant Line Value: 35A19
  misc_feature: MA Experiment 20000479 PARAMETER Experiment Name: Zm_Drought_P Parameter: Timepoint (hr) Value: 48
  misc_feature: MA Experiment 20000479 PARAMETER Experiment Name: Zm_Drought_P Parameter: Tissue Value: Aerial
  misc_feature: MA Experiment 20000479 PARAMETER Experiment Name: Zm_Drought_P Parameter: Treatment Value: Drought vs. No Drought
  misc_feature: MA Experiment ID: 20000480 Result: Down-regulated in Transcription
  misc_feature: MA Experiment 20000480 PARAMETER Experiment Name: Zm_Drought_P Parameter: Age (day) Value: 11
  misc_feature: MA Experiment 20000480 PARAMETER Experiment Name: Zm_Drought_P Parameter: Organism Value: Zea mays
  misc_feature: MA Experiment 20000480 PARAMETER Experiment Name: Zm_Drought_P Parameter: Plant Line Value: 35A19
  misc_feature: MA Experiment 20000480 PARAMETER Experiment Name: Zm_Drought_P Parameter: Timepoint (hr) Value: 72
  misc_feature: MA Experiment 20000480 PARAMETER Experiment Name: Zm_Drought_P Parameter: Tissue Value: Aerial
  misc_feature: MA Experiment 20000480 PARAMETER Experiment Name: Zm_Drought_P Parameter: Treatment Value: Drought vs. No Drought
  misc_feature: MA Experiment ID: 20000487 Result: Down-regulated in Transcription
  misc_feature: MA Experiment 20000487 PARAMETER Experiment Name: Zm_50mM_NH4NO3_L_to_H_P Parameter: Organism Value: Zea mays
  misc_feature: MA Experiment 20000487 PARAMETER Experiment Name: Zm_50mM_NH4NO3_L_to_H_P Parameter: Timepoint (hr) Value: 4
  misc_feature: MA Experiment 20000487 PARAMETER Experiment Name: Zm_50mM_NH4NO3_L_to_H_P Parameter: Tissue Value: Leaves
  misc_feature: MA Experiment 20000487 PARAMETER Experiment Name: Zm_50mM_NH4NO3_L_to_H_P Parameter: Treatment Value: 50mM NH4NO3 vs. 100mM Mannitol
  misc_feature: MA Experiment ID: 20000492 Result: Up-regulated in Transcription
  misc_feature: MA Experiment 20000492 PARAMETER Experiment Name: Zm_Hybrid_Seed_Dev_P Parameter: DAP Value: 12
  misc_feature: MA Experiment 20000492 PARAMETER Experiment Name: Zm_Hybrid_Seed_Dev_P Parameter: Organism Value: Zea mays
  misc_feature: MA Experiment 20000492 PARAMETER Experiment Name: Zm_Hybrid_Seed_Dev_P Parameter: Plant Line Value: 35A19
  misc_feature: MA Experiment 20000492 PARAMETER Experiment Name: Zm_Hybrid_Seed_Dev_P Parameter: Tissue Value: Fert Kernel vs. Unfert Floret
  misc_feature: MA Experiment ID: 20000632 Result: Down-regulated in Transcription
  misc_feature: MA Experiment 20000632 PARAMETER Experiment Name: Zm_Herbicide-Treatments_P Parameter: Timepoint (hr) Value: 4
  misc_feature: MA Experiment 20000632 PARAMETER Experiment Name: Zm_Herbicide-Treatments_P Parameter: Tissue Value: Aerial
  misc_feature: MA Experiment 20000632 PARAMETER Experiment Name: Zm_Herbicide-Treatments_P Parameter: Treatment Value: Glean vs. No Treatment
  misc_feature: MA Experiment ID: 20000633 Result: Down-regulated in Transcription
  misc_feature: MA Experiment 20000633 PARAMETER Experiment Name: Zm_Herbicide-Treatments_P Parameter: Timepoint (hr) Value: 4
  misc_feature: MA Experiment 20000633 PARAMETER Experiment Name: Zm_Herbicide-Treatments_P Parameter: Tissue Value: Aerial
  misc_feature: MA Experiment 20000633 PARAMETER Experiment Name: Zm_Herbicide-Treatments_P Parameter: Treatment Value: Trimec vs. No Treatment
actcagcccactacctttcagatttttcctcatctgccgccgcctgcacccaacaagcctctcgacgctagtcatggccgcttccaacggcgccgccgcggtcgacgagaccgtcgccgccaccgactccgtgcaggagcctccccagaagatctccaagatctctcccctgctcaaggtgaagaagctctccgagaaggccgtgctgccgtcccgcggctccgctctcgccgccggctacgacctctcgagcgccgaggagatggtggtgccggcgcgtggcaaggcgctcgtgccgaccgacctcagcgtcgccatcccgcacggaacctacgcgcgcatcgcgcccaggtcggggctggcgctgaagcactccatcgacgtgggcgccggcgtgatcgacgcggactaccgagggccccgtcggcgtcatcctcttcaaccactccgacgccgacttcgccgtgaagcccggcgacaggatcgcgcagatgatcatcgaggtgatcgcgacgcccgaggtcgcggaggtggaggacctcgacgccaccgtccgtggggacggagggttcgggtccaccggcgtctgaagggattcggtgtctaggttaggatggcgatgcaagccttggtgtcttttgttggctctaagaaatcgtgatgttcaccatcactatcctgctatcgataattagtattgagattagtacgtaggttgcgtagttagctcgatgcacgtactattgtcgagaactcgctattctgtgatgttgaaaatgtct

SEQ ID NO: 8392 - protein, 201 aa, Zea mays subsp. mays
  peptide (1)..(201): Ceres Seq. ID no. 12412538
  misc_feature (65)..(139): Pfam Name: dUTPase Pfam Description: dUTPase
  misc_feature (3)..(140): Homolog of NCBI NO: 31126720 NR Description: putative deoxyuridine triphosphatase [Oryza
  misc_feature (41)..(139): Homolog of NCBI NO: 38566986 NR Description: probable dUTP pyrophosphatase [Neurospora crassa]
  misc_feature (28)..(139): Homolog of NCBI NO: 40746988 NR Description: hypothetical protein AN0271.2 [Aspergillus
  misc_feature (60)..(139): Homolog of NCBI NO: 19114785 NR Description: deoxyuridine 5'-triphosphate nucleotidohydrolase
  misc_feature (40)..(139): Homolog of NCBI NO: 38047903 NR Description: similar to Drosophila melanogaster BcDNA:LD08534
  misc_feature (40)..(139): Homolog of NCBI NO: 19921126 NR Description: CG4584-PA [Drosophila melanogaster]
  misc_feature (37)..(139): Homolog of NCBI NO: 31235968 NR Description: ENSANGP00000012604 [Anopheles gambiae]
  misc_feature (57)..(139): Homolog of NCBI NO: 24583610 NR Description: CG4584-PB [Drosophila melanogaster]
  misc_feature (49)..(139): Homolog of NCBI NO: 1169437 NR Description: Deoxyuridine 5'-triphosphate nucleotidohydrolase (dUTP pyrophosphatase) >gi|2118161|pir||S51498 dUTP diphosphatase
  misc_feature (4)..(139): Homolog of NCBI NO: 16758374 NR Description: Deoxyuridinetriphosphatase (dUTPase); dUTPase
LSPLPFRFFLICRRLHPTSLSTLVMAASNGAAAVDETVAATDSVQEPPQKISKISPLLKVKKLSEKAVLPSRGSALAAGYDLSSAEEMVVPARGKALVPTDLSVAIPHGTYARIAPRSGLALKHSIDVGAGVIDADYRGPRRRHPLQPLRRRLRREARRQDRADDHRGDRDARGRGGGGPRRHRPWGRRVRVHRRLKGFGV

SEQ ID NO: 8393 - protein, 177 aa, Zea mays subsp. mays
  peptide (1)..(177): Ceres Seq. ID no. 12412539
  misc_feature (41)..(115): Pfam Name: dUTPase Pfam Description: dUTPase
  misc_feature (1)..(116): Homolog of NCBI NO: 31126720 NR Description: putative deoxyuridine triphosphatase [Oryza
  misc_feature (17)..(115): Homolog of NCBI NO: 38566986 NR Description: probable dUTP pyrophosphatase [Neurospora crassa]
  misc_feature (4)..(115): Homolog of NCBI NO: 40746988 NR Description: hypothetical protein AN0271.2 [Aspergillus
  misc_feature (36)..(115): Homolog of NCBI NO: 19114785 NR Description: deoxyuridine 5'-triphosphate nucleotidohydrolase
  misc_feature (16)..(115): Homolog of NCBI NO: 38047903 NR Description: similar to Drosophila melanogaster BcDNA:LD08534
  misc_feature (16)..(115): Homolog of NCBI NO: 19921126 NR Description: CG4584-PA [Drosophila melanogaster]
  misc_feature (13)..(115): Homolog of NCBI NO: 31235968 NR Description: ENSANGP00000012604 [Anopheles gambiae]
  misc_feature (33)..(115): Homolog of NCBI NO: 24583610 NR Description: CG4584-PB [Drosophila melanogaster]
  misc_feature (25)..(115): Homolog of NCBI NO: 1169437 NR Description: Deoxyuridine 5'-triphosphate nucleotidohydrolase (dUTP pyrophosphatase) >gi|2118161|pir||S51498 dUTP diphosphatase
  misc_feature (1)..(115): Homolog of NCBI NO: 16758374 NR Description: Deoxyuridinetriphosphatase (dUTPase); dUTPase
MAASNGAAAVDETVAATDSVQEPPQKISKISPLLKVKKLSEKAVLPSRGSALAAGYDLSSAEEMVVPARGKALVPTDLSVAIPHGTYARIAPRSGLALKHSIDVGAGVIDADYRGPRRRHPLQPLRRRLRREARRQDRADDHRGDRDARGRGGGGPRRHRPWGRRVRVHRRLKGFGV

SEQ ID NO: 8394 - protein, 155 aa, Zea mays subsp. mays
  peptide (1)..(155): Ceres Seq. ID no. 12412540
TQPTTFQIFPHLPPPAPNKPLDASHGRFQRRRRGRRDRRRHRLRAGASPEDLQDLSPAQGEEALREGRAAVPRLRSRRRLRPLERRGDGGAGAWQGARADRPQRRHPARNLRAHRAQVGAGAEALHRRGRRRDRRGLPRAPSASSSSTTPTPTSP

SEQ ID NO: 8395 - DNA, 1038 bp, Zea mays subsp. mays
  misc_feature (1)..(1038): Ceres Seq. ID no. 12412533
  misc_feature: MA Experiment ID: 108536 Result: Up-regulated in Transcription
  misc_feature: MA Experiment 108536 PARAMETER Experiment Name: Zm_Meristem_P Parameter: Age (day) Value: 8
  misc_feature: MA Experiment 108536 PARAMETER Experiment Name: Zm_Meristem_P Parameter: Organism Value: Zea mays
  misc_feature: MA Experiment 108536 PARAMETER Experiment Name: Zm_Meristem_P Parameter: Plant Line Value: 35A19
  misc_feature: MA Experiment 108536 PARAMETER Experiment Name: Zm_Meristem_P Parameter: Tissue Value: Shoot Meristem vs. Above Shoot Meristem
  misc_feature: MA Experiment ID: 108687 Result: Down-regulated in Transcription
  misc_feature: MA Experiment 108687 PARAMETER Experiment Name: Zm_Embryos-Flowers__P Parameter: Tissue Value: Embryo vs. Aerial+
  misc_feature: MA Experiment ID: 20000535 Result: Up-regulated in Transcription
  misc_feature: MA Experiment 20000535 PARAMETER Experiment Name: Zm_Hybrid_Seed_Dev_P Parameter: DAP Value: 30 vs. 12
  misc_feature: MA Experiment 20000535 PARAMETER Experiment Name: Zm_Hybrid_Seed_Dev_P Parameter: Organism Value: Zea mays
  misc_feature: MA Experiment 20000535 PARAMETER Experiment Name: Zm_Hybrid_Seed_Dev_P Parameter: Plant Line Value: 35A19
  misc_feature: MA Experiment 20000535 PARAMETER Experiment Name: Zm_Hybrid_Seed_Dev_P Parameter: Tissue Value: Embryo vs. Unfert Floret
agttgcctttaagctcgcacgcgaaccgtcccacactctgcgcaagccactgccgctgccgctgccgccgccgccgccgccttcagtctccgtctccaccggtgccctcgtctcccagccgctgccgccgccgccgccgccccgtgagagccggcgcagcaatccggttgcttggggacgcagcgaggatgggcagcaccagcgcgttcgtcatcaggtggatcaacttcttcaccatgatactggcgctactggtggtgggcttcgggttctggatgagcacccacgacgacgagtgcaggcggaccttgaccgtccccgtcatcgccctcggtggagtgatcttcctcatatcgctcgtcggattccttggtgcctggaagaacatctcctgcttgctctggacatatctgatcatgctgttcgtggtcttggtggcaatcatggtgttcacggtgctcgcgtttatcataacaaactccggaagtggccatactgttcctggggctaggtataaagagtaccgtctccaggactacagctcctggtttgtcaaacagctcgatgacacggagaaatgggctcgcctgaaaagctgcctggtgaagatagatgactgcaatagcctgtcgagaagatacaagaccgcgagagaatacaagctcgcggacctcactcccatggagtcgggttgctgccgcccgccagcagagtgcgggttcccagctctgaacgcgtcctatttcgatctgagctatcacccggcgagcgccaacgccgactgcaaactgtacaggaacgcgcgctctgtccggtgctacgactgcggcggcggcggctggagggactgatgtgtgggcccatcctggcttcggccgagttatcttatctatctatagtatcgtgttaccgttcgcttctgtcaccgtgttagtgtccgttctacctttggattaggtgttggtacccctgttgttccctttggttgctcccgctatgaaacgagacgagagaagaatgagcaaggtttttgttcgc

SEQ ID NO: 8396 - protein, 282 aa, Zea mays subsp. mays
  peptide (1)..(282): Ceres Seq. ID no. 12412534
  misc_feature (66)..(275): Pfam Name: Tetraspanin family Pfam Description: Tetraspanin family
  misc_feature (63)..(275): Homolog of NCBI NO: 37535820 NR Description: putative senescence-associated protein [Oryza
  misc_feature (63)..(275): Homolog of NCBI NO: 30696823 NR Description: senescence-associated protein family [Arabidopsis
  misc_feature (136)..(275): Homolog of NCBI NO: 25404415 NR Description: hypothetical protein F9N12.12 [imported] -
  misc_feature (74)..(275): Homolog of NCBI NO: 29367553 NR Description: senescence-associated protein-like protein [Oryza
  misc_feature (74)..(275): Homolog of NCBI NO: 3551954 NR Description: senescence-associated protein 5 [Hemerocallis
  misc_feature (63)..(275): Homolog of NCBI NO: 20197174 NR Description: hypothetical protein [Arabidopsis thaliana]
  misc_feature (66)..(275): Homolog of NCBI NO: 15231187 NR Description: putative protein; protein id: At3g45600.1, by cDNA: 11427., supported by cDNA: gi_14423445 [Arabidopsis
  misc_feature (70)..(275): Homolog of NCBI NO: 15237490 NR Description: senescence-associated protein 5-like protein; id: At5g46700.1, supported by cDNA: gi_17979385 [Arabidopsis
  misc_feature (70)..(275): Homolog of NCBI NO: 17979386 NR Description: putative senescence-associated protein 5
  misc_feature (74)..(275): Homolog of NCBI NO: 15234374 NR Description: senescence-associated protein -like; protein id: supported by cDNA: 39831., supported by cDNA: gi_17065395, by cDNA: gi_20148628 [Arabidopsis thaliana]
LPLSSHANRPTLCASHCRCRCRRRRRLQSPSPPVPSSPSRCRRRRRPVRAGAAIRLLGDAARMGSTSAFVIRWINFFTMILALLVVGFGFWMSTHDDECRRTLTVPVIALGGVIFLISLVGFLGAWKNISCLLWTYLIMLFVVLVAIMVFTVLAFIITNSGSGHTVPGARYKEYRLQDYSSWFVKQLDDTEKWARLKSCLVKIDDCNSLSRRYKTAREYKLADLTPMESGCCRPPAECGFPALNASYFDLSYHPASANADCKLYRNARSVRCYDCGGGGWRD

SEQ ID NO: 8397 - protein, 220 aa, Zea mays subsp. mays
  peptide (1)..(220): Ceres Seq. ID no. 12412535
  misc_feature (4)..(213): Pfam Name: Tetraspanin family Pfam Description: Tetraspanin family
  misc_feature (1)..(213): Homolog of NCBI NO: 37535820 NR Description: putative senescence-associated protein [Oryza
  misc_feature (1)..(213): Homolog of NCBI NO: 30696823 NR Description: senescence-associated protein family [Arabidopsis
  misc_feature (74)..(213): Homolog of NCBI NO: 25404415 NR Description: hypothetical protein F9N12.12 [imported] -
  misc_feature (12)..(213): Homolog of NCBI NO: 29367553 NR Description: senescence-associated protein-like protein [Oryza
  misc_feature (12)..(213): Homolog of NCBI NO: 3551954 NR Description: senescence-associated protein 5 [Hemerocallis
  misc_feature (1)..(213): Homolog of NCBI NO: 20197174 NR Description: hypothetical protein [Arabidopsis thaliana]
  misc_feature (4)..(213): Homolog of NCBI NO: 15231187 NR Description: putative protein; protein id: At3g45600.1, by cDNA: 11427., supported by cDNA: gi_14423445 [Arabidopsis
  misc_feature (8)..(213): Homolog of NCBI NO: 15237490 NR Description: senescence-associated protein 5-like protein; id: At5g46700.1, supported by cDNA: gi_17979385 [Arabidopsis
  misc_feature (8)..(213): Homolog of NCBI NO: 17979386 NR Description: putative senescence-associated protein 5
  misc_feature (12)..(213): Homolog of NCBI NO: 15234374 NR Description: senescence-associated protein -like; protein id: supported by cDNA: 39831., supported by cDNA: gi_17065395, by cDNA: gi_20148628 [Arabidopsis thaliana]
MGSTSAFVIRWINFFTMILALLVVGFGFWMSTHDDECRRTLTVPVIALGGVIFLISLVGFLGAWKNISCLLWTYLIMLFVVLVAIMVFTVLAFIITNSGSGHTVPGARYKEYRLQDYSSWFVKQLDDTEKWARLKSCLVKIDDCNSLSRRYKTAREYKLADLTPMESGCCRPPAECGFPALNASYFDLSYHPASANADCKLYRNARSVRCYDCGGGGWRD

SEQ ID NO: 8398 - protein, 204 aa, Zea mays subsp. mays
  peptide (1)..(204): Ceres Seq. ID no. 12412536
  misc_feature (1)..(197): Pfam Name: Tetraspanin family Pfam Description: Tetraspanin family
  misc_feature (1)..(197): Homolog of NCBI NO: 37535820 NR Description: putative senescence-associated protein [Oryza
  misc_feature (1)..(197): Homolog of NCBI NO: 30696823 NR Description: senescence-associated protein family [Arabidopsis
  misc_feature (58)..(197): Homolog of NCBI NO: 25404415 NR Description: hypothetical protein F9N12.12 [imported] -
  misc_feature (1)..(197): Homolog of NCBI NO: 29367553 NR Description: senescence-associated protein-like protein [Oryza
  misc_feature (1)..(197): Homolog of NCBI NO: 3551954 NR Description: senescence-associated protein 5 [Hemerocallis
  misc_feature (1)..(197): Homolog of NCBI NO: 20197174 NR Description: hypothetical protein [Arabidopsis thaliana]
  misc_feature (1)..(197): Homolog of NCBI NO: 15231187 NR Description: putative protein; protein id: At3g45600.1, by cDNA: 11427., supported by cDNA: gi_14423445 [Arabidopsis
  misc_feature (1)..(197): Homolog of NCBI NO: 15237490 NR Description: senescence-associated protein 5-like protein; id: At5g46700.1, supported by cDNA: gi_17979385 [Arabidopsis
  misc_feature (1)..(197): Homolog of NCBI NO: 17979386 NR Description: putative senescence-associated protein 5
  misc_feature (1)..(197): Homolog of NCBI NO: 15234374 NR Description: senescence-associated protein -like; protein id: supported by cDNA: 39831., supported by cDNA: gi_17065395, by cDNA: gi_20148628 [Arabidopsis thaliana]
MILALLVVGFGFWMSTHDDECRRTLTVPVIALGGVIFLISLVGFLGAWKNISCLLWTYLIMLFVVLVAIMVFTVLAFIITNSGSGHTVPGARYKEYRLQDYSSWFVKQLDDTEKWARLKSCLVKIDDCNSLSRRYKTAREYKLADLTPMESGCCRPPAECGFPALNASYFDLSYHPASANADCKLYRNARSVRCYDCGGGGWRD

SEQ ID NO: 8399 - DNA, 862 bp, Zea mays subsp. mays
  misc_feature (1)..(862): Ceres Seq. ID no. 12401768
  misc_feature: MA Experiment ID: 108527 Result: Up-regulated in Transcription
  misc_feature: MA Experiment 108527 PARAMETER Experiment Name: Zm_5mM_NO_P Parameter: Age (day) Value: 8
  misc_feature: MA Experiment 108527 PARAMETER Experiment Name: Zm_5mM_NO_P Parameter: Organism Value: Zea mays
  misc_feature: MA Experiment 108527 PARAMETER Experiment Name: Zm_5mM_NO_P Parameter: Plant Line Value: 35A19
  misc_feature: MA Experiment 108527 PARAMETER Experiment Name: Zm_5mM_NO_P Parameter: Timepoint (hr) Value: 6
  misc_feature: MA Experiment 108527 PARAMETER Experiment Name: Zm_5mM_NO_P Parameter: Tissue Value: Aerial
  misc_feature: MA Experiment 108527 PARAMETER Experiment Name: Zm_5mM_NO_P Parameter: Treatment Value: 5mM NO vs. No Treatment
gcacgagaccattacctagaacatcctaatcgaaaaatctgagatacagacagattaatcaacgcccgcacctcctatgggcacgaccggcgacgctccggctccggcgggggatccgcaggaccgccaccgtacccaccccccggcggcgaagcagcggacgacgctggtgttcacgtacgggacgctgaagcgcggcttctccaaccaccgcctcctggaggagctcttcgcgagcggggacgcgtcgctggtgggccccgcggtgacgtcggcgcggctgccgctggtgtgcgggccgtaccgggtgccgttcctgctgaacctccccggcgccggcgccggggcgcaccgcgtgcgcggggaggcgtacgcggtgacggcccgcgggcttgcgcggctggacgagctggagggcgtggagacggggcactacgagcggctggccgtggccgtggacctcgagggcggcggcggcggcggcggcggcgcggtggatgcgatcgcctacttcgcgcaccggagctacgccaacgacatgtggcggcgcagcggggagaagggcgtccccgagtacacccacggcgtggcagccgggtatgtccggcgcaaggaccggccgcaggggcagacgttcctggagcagatccggatcttcaattcgtctcctcccaatccgcttaataatccctcctagctcgcgctgcctcaactccttcaattcagtttctccgatccgtgtcatacatgatccatataatattatgggatgtatgtggtcagatcgagaaggtgtgttatgtttaatctagacatggtctatattttatttaattatgtcaaataaattttatatcttcgc

SEQ ID NO: 8400 - protein, 206 aa, Zea mays subsp. mays
  peptide (1)..(206): Ceres Seq. ID no. 12401769
  misc_feature (39)..(149): Pfam Name: Uncharacterised protein family (UPF0131) Pfam Description: Uncharacterised protein family (UPF0131)
  misc_feature (1)..(197): Homolog of NCBI NO: 29126342 NR Description: unknown protein [Oryza sativa (japonica
  misc_feature (18)..(198): Homolog of NCBI NO: 18396380 NR Description: expressed protein; protein id: At3g02910.1, by cDNA: 269248., supported by cDNA: gi_17381235 [Arabidopsis >gi|17381236|gb|AAL36037.1| AT3g02910/F13E7_14 [Arabidopsis
  misc_feature (18)..(198): Homolog of NCBI NO: 21555032 NR Description: unknown [Arabidopsis thaliana]
  misc_feature (29)..(198): Homolog of NCBI NO: 11387354 NR Description: Hypothetical protein At3g02910
  misc_feature (31)..(197): Homolog of NCBI NO: 15237492 NR Description: unknown protein; protein id: At5g46720.1 thaliana] >gi|9758508|dbj|BAB08916.1| gene_id:MZA15.13~unknown [Arabidopsis thaliana] >gi|27754302|gb|AAO22604.1| unknown
  misc_feature (24)..(129): Homolog of NCBI NO: 13279332 NR Description: Unknown (protein for IMAGE:2822295) [Homo sapiens]
  misc_feature (31)..(129): Homolog of NCBI NO: 33875960 NR Description: LOC87769 protein [Homo sapiens]
MGTTGDAPAPAGDPQDRHRTHPPAAKQRTTLVFTYGTLKRGFSNHRLLEELFASGDASLVGPAVTSARLPLVCGPYRVPFLLNLPGAGAGAHRVRGEAYAVTARGLARLDELEGVETGHYERLAVAVDLEGGGGGGGGAVDAIAYFAHRSYANDMWRRSGEKGVPEYTHGVAAGYVRRKDRPQGQTFLEQIRIFNSSPPNPLNNPS

SEQ ID NO: 8401 - protein, 104 aa, Zea mays subsp. mays
  peptide (1)..(104): Ceres Seq. ID no. 12401770
MRSPTSRTGATPTTCGGAAGRRASPSTPTAWQPGMSGARTGRRGRRSWSRSGSSIRLLPIRLIIPPSSRCLNSFNSVSPIRVIHDPYNIMGCMWSDREGVLCLI

SEQ ID NO: 8402 - DNA, 1189 bp, Zea mays subsp. mays
  misc_feature (1)..(1189): Ceres Seq. ID no. 12401601
  misc_feature: MA Experiment ID: 108544 Result: Down-regulated in Transcription
  misc_feature: MA Experiment ID: 108556 Result: Down-regulated in Transcription
  misc_feature: MA Experiment 108556 PARAMETER Experiment Name: Zm_Drought_P Parameter: Age (day) Value: 9
  misc_feature: MA Experiment 108556 PARAMETER Experiment Name: Zm_Drought_P Parameter: Organism Value: Zea mays
  misc_feature: MA Experiment 108556 PARAMETER Experiment Name: Zm_Drought_P Parameter: Plant Line Value: 35A19
  misc_feature: MA Experiment 108556 PARAMETER Experiment Name: Zm_Drought_P Parameter: Timepoint (hr) Value: 24
  misc_feature: MA Experiment 108556 PARAMETER Experiment Name: Zm_Drought_P Parameter: Tissue Value: Aerial
  misc_feature: MA Experiment 108556 PARAMETER Experiment Name: Zm_Drought_P Parameter: Treatment Value: Drought vs. No Drought
  misc_feature: MA Experiment ID: 20000534 Result: Down-regulated in Transcription
  misc_feature: MA Experiment 20000534 PARAMETER Experiment Name: Zm_Hybrid_Pollen_P Parameter: Age (day) Value: 8
  misc_feature: MA Experiment 20000534 PARAMETER Experiment Name: Zm_Hybrid_Pollen_P Parameter: Organism Value: Zea mays
  misc_feature: MA Experiment 20000534 PARAMETER Experiment Name: Zm_Hybrid_Pollen_P Parameter: Plant Line Value: 35A19
  misc_feature: MA Experiment 20000534 PARAMETER Experiment Name: Zm_Hybrid_Pollen_P Parameter: Tissue Value: Pollen vs. Aerial
acgagaaacaccccacgtctcaagctgcccctttctcaccgccgcggccgccacgcgcagcagcaaccgagcaggagcgcagccagcaagctcaggcccgagccctactgcaaccgccgctgctaccgcactgaacaccatggccgacccggcggagcaccgtccagcggaggaggacgaggaagccgcggcggccggcgaggatgaggacaccggcgctcaggtcgcgcccatcgtgaagctggaggaggtcgccgttaccaccggagaggaggacgaggacgtacttgtcgacatgaaggcgaagctctaccggttcgacaaggaggcgaaccagtggaaagaacgtggcacaggcactgtgaagctgcttaagcacaaggagaccgccaaggtccgcctcgtcatgcgtcaggcgaagacgcttaagatctgtgctaaccatcttgtggtggcgacgactaagatgcaggagcacgcagggagcgacaagtcgtgcgtgtggcacgcgctggacttcgccgacggtgagctcaaggaggagatgtttgctatccgttttggatctgtcgagaattgcaagaagttcaaggacactgttgaagagatagctgaagagcaaggaaagaccgaggtgaaagaaaacgaggaagtctccattgccgccgcagatttggtacagaagttaacagtgacagaggctagcaaggagggagatgcagaggaagaggaggctcctgcatctgaccataagaaggatgctaaagggtaaagattgaaggcaaacaaggccaaatgattatgattccattcatttcgttgtcaaggttcatcttccccacaaattttcattacaaagtttcattgcattttctcctgagatgatttgtgtgtgtgtgtgtgtgtgtgtgtgttgggtgaaatctgagttgtcagtcatctacatgtctttcttggttgttagacttattctcagtcgcctgtttatctgggatggctaggtacatcatgtttgtacaattatttggggttgattttggaatggctctaaagctcgagatgagatagatggtatcatggtagttattagtgatgatttcttttcgcttcttgttcgttcgttctgaaataatatgggatgctttgttatacttgttgatccattattagcttgatgcatcgttgatcc

SEQ ID NO: 8403 - protein, 256 aa, Zea mays subsp. mays
  peptide (1)..(256): Ceres Seq. ID no. 12401602
  misc_feature (85)..(205): Pfam Name: RanBP1 domain Pfam Description: RanBP1 domain
  misc_feature (31)..(209): Homolog of NCBI NO: 6320205 NR Description: Yeast Ran Binder #1; suppressor of FUS1; homolog
  misc_feature (45)..(255): Homolog of NCBI NO: 14091665 NR Description: Ran binding protein-1 [Lycopersicon esculentum]
  misc_feature (51)..(256): Homolog of NCBI NO: 15222310 NR Description: Ran-binding protein (atranbp1a); protein id: supported by cDNA: gi_13877580, supported by cDNA: gi_15294205,
  misc_feature (51)..(255): Homolog of NCBI NO: 2058282 NR Description: atranbp1a [Arabidopsis thaliana]
  misc_feature (47)..(255): Homolog of NCBI NO: 8843780 NR Description: contains similarity to small GTPase Ran binding
  misc_feature (47)..(255): Homolog of NCBI NO: 30697102 NR Description: Ran binding protein 1 homolog - like [Arabidopsis >gi|1732511|gb|AAB38776.1| Ran binding protein 1 homolog
  misc_feature (53)..(254): Homolog of NCBI NO: 2058284 NR Description: atranbp1b [Arabidopsis thaliana]
  misc_feature (52)..(254): Homolog of NCBI NO: 20260400 NR Description: Ran binding protein [Arabidopsis thaliana]
  misc_feature (53)..(254): Homolog of NCBI NO: 15227700 NR Description: Ran binding protein (AtRanBP1b); protein id: supported by cDNA: gi_20260399 [Arabidopsis thaliana]
  misc_feature (51)..(256): Homolog of NCBI NO: 5106769 NR Description: Ran-binding protein siRanBP [Arabidopsis thaliana]
RETPHVSSCPFLTAAAATRSSNRAGAQPASSGPSPTATAAATALNTMADPAEHRPAEEDEEAAAAGEDEDTGAQVAPIVKLEEVAVTTGEEDEDVLVDMKAKLYRFDKEANQWKERGTGTVKLLKHKETAKVRLVMRQAKTLKICANHLVVATTKMQEHAGSDKSCVWHALDFADGELKEEMFAIRFGSVENCKKFKDTVEEIAEEQGKTEVKENEEVSIAAADLVQKLTVTEASKEGDAEEEEAPASDHKKDAKG

SEQ ID NO: 8404 - protein, 210 aa, Zea mays subsp. mays; identical to SEQ ID NO: 7811
  peptide (1)..(210): Ceres Seq. ID no. 12401603
  misc_feature (39)..(159): Pfam Name: RanBP1 domain Pfam Description: RanBP1 domain
  misc_feature (1)..(209): Homolog of NCBI NO: 14091665 NR Description: Ran binding protein-1 [Lycopersicon esculentum]
  misc_feature (5)..(210): Homolog of NCBI NO: 15222310 NR Description: Ran-binding protein (atranbp1a); protein id: supported by cDNA: gi_13877580, supported by cDNA: gi_15294205,
  misc_feature (5)..(209): Homolog of NCBI NO: 2058282 NR Description: atranbp1a [Arabidopsis thaliana]
  misc_feature (1)..(209): Homolog of NCBI NO: 8843780 NR Description: contains similarity to small GTPase Ran binding
  misc_feature (1)..(209): Homolog of NCBI NO: 30697102 NR Description: Ran binding protein 1 homolog - like [Arabidopsis >gi|1732511|gb|AAB38776.1| Ran binding protein 1 homolog
  misc_feature (7)..(208): Homolog of NCBI NO: 2058284 NR Description: atranbp1b [Arabidopsis thaliana]
  misc_feature (6)..(208): Homolog of NCBI NO: 20260400 NR Description: Ran binding protein [Arabidopsis thaliana]
  misc_feature (7)..(208): Homolog of NCBI NO: 15227700 NR Description: Ran binding protein (AtRanBP1b); protein id: supported by cDNA: gi_20260399 [Arabidopsis thaliana]
  misc_feature (5)..(210): Homolog of NCBI NO: 5106769 NR Description: Ran-binding protein siRanBP [Arabidopsis thaliana]
  misc_feature (1)..(163): Homolog of NCBI NO: 6320205 NR Description: Yeast Ran Binder #1; suppressor of FUS1; homolog

SEQ ID NO: 8405 - protein, 158 aa, Zea mays subsp. mays; identical to SEQ ID NO: 7812
  peptide (1)..(158): Ceres Seq. ID no. 12401604
  misc_feature (1)..(107): Pfam Name: RanBP1 domain Pfam Description: RanBP1 domain
  misc_feature (1)..(157): Homolog of NCBI NO: 14091665 NR Description: Ran binding protein-1 [Lycopersicon esculentum]
  misc_feature (1)..(158): Homolog of NCBI NO: 15222310 NR Description: Ran-binding protein (atranbp1a); protein id: supported by cDNA: gi_13877580, supported by cDNA: gi_15294205,
  misc_feature (1)..(157): Homolog of NCBI NO: 2058282 NR Description: atranbp1a [Arabidopsis thaliana]
  misc_feature (1)..(157): Homolog of NCBI NO: 8843780 NR Description: contains similarity to small GTPase Ran binding
  misc_feature (1)..(157): Homolog of NCBI NO: 30697102 NR Description: Ran binding protein 1 homolog - like [Arabidopsis >gi|1732511|gb|AAB38776.1| Ran binding protein 1 homolog
  misc_feature (1)..(156): Homolog of NCBI NO: 2058284 NR Description: atranbp1b [Arabidopsis thaliana]
  misc_feature (1)..(156): Homolog of NCBI NO: 20260400 NR Description: Ran binding protein [Arabidopsis thaliana]
  misc_feature (1)..(156): Homolog of NCBI NO: 15227700 NR Description: Ran binding protein (AtRanBP1b); protein id: supported by cDNA: gi_20260399 [Arabidopsis thaliana]
  misc_feature (1)..(158): Homolog of NCBI NO: 5106769 NR Description: Ran-binding protein siRanBP [Arabidopsis thaliana]
  misc_feature (1)..(111): Homolog of NCBI NO: 6320205 NR Description: Yeast Ran Binder #1; suppressor of FUS1; homolog

SEQ ID NO: 8406 - DNA, 1628 bp, Zea mays subsp. mays
  misc_feature (1)..(1628): Ceres Seq. ID no. 12405418
  misc_feature: MA Experiment ID: 108535 Result: Up-regulated in Transcription
  misc_feature: MA Experiment 108535 PARAMETER Experiment Name: Zm_Meristem_P Parameter: Age (day) Value: 8
  misc_feature: MA Experiment 108535 PARAMETER Experiment Name: Zm_Meristem_P Parameter: Organism Value: Zea mays
  misc_feature: MA Experiment 108535 PARAMETER Experiment Name: Zm_Meristem_P Parameter: Plant Line Value: 35A19
  misc_feature: MA Experiment 108535 PARAMETER Experiment Name: Zm_Meristem_P Parameter: Tissue Value: Root Meristem vs. Above Root Meristem
  misc_feature: MA Experiment ID: 108544 Result: Down-regulated in Transcription
  misc_feature: MA Experiment ID: 20000108 Result: Up-regulated in Transcription
  misc_feature: MA Experiment 20000108 PARAMETER Experiment Name: Zm_Root-Tips_P Parameter: Age (day) Value: 12
  misc_feature: MA Experiment 20000108 PARAMETER Experiment Name: Zm_Root-Tips_P Parameter: Organism Value: Zea mays
  misc_feature: MA Experiment 20000108 PARAMETER Experiment Name: Zm_Root-Tips_P Parameter: Tissue Value: Root tips vs. Root mid region    35
  misc_feature: MA Experiment 20000108 PARAMETER Experiment Name: Zm_Root-Tips_P Parameter: Tissue Value: Root tips vs. Root mid region   Sequence Listing-Misc Features (4)
  misc_feature: MA Experiment ID: 20001606 Result: Up-regulated in Transcription
  misc_feature: MA Experiment 20001606 PARAMETER Experiment Name: Zm_50ppm_KNO3_L-to-H_P Parameter: Age (day) Value: 19
  misc_feature: MA Experiment 20001606 PARAMETER Experiment Name: Zm_50ppm_KNO3_L-to-H_P Parameter: Organism Value: Zea mays
  misc_feature: MA Experiment 20001606 PARAMETER Experiment Name: Zm_50ppm_KNO3_L-to-H_P Parameter: Plant Line Value: 35A19
  misc_feature: MA Experiment 20001606 PARAMETER Experiment Name: Zm_50ppm_KNO3_L-to-H_P Parameter: Timepoint (hr) Value: 8
  misc_feature: MA Experiment 20001606 PARAMETER Experiment Name: Zm_50ppm_KNO3_L-to-H_P Parameter: Tissue Value: Shoots
  misc_feature: MA Experiment 20001606 PARAMETER Experiment Name: Zm_50ppm_KNO3_L-to-H_P Parameter: Treatment Value: 50ppm KNO3 vs. 50ppm KCl
ccctcctccccgcgccgccataccctccaacccgagaggaaccctaacaccaaaacgcccccggaggcagctaggagagctcgaatcaccagccatgtcggagcacgacctcacggcgctgatggcggcgcagctggaccgccacctggtgttccccctgctggagttcctccaggagcggcagctctactcggagtcggagatcctggaggccaagatccgcctcctcagcggcaccaacatggtcgactacgccatggacatccacaagtccctctacggcaccgacgacgtgcccgaggacatggtgaagcgccgcgccgaggtcgtctccaggctcaggtcgctcgaggaggccgcagccccgctcgtcgccttcctccagaacccgcagctcgtgcaggagttcaggcccgacaaacagtacaacatccacatgctccaggagcgataccagattggtcctgaccagattgaagctctgtatcagtatgccaaatttcagtttgagtgcggtaactactcaggggctgctgattacctgtaccagtatcgtgctttgtgcacaaacagtgagcgaaatgtgagtgccctctggggaaagctggcagcagaaatcctaatgcagaactgggacgtagctttggaggaactcaaccgcttgaaggaaataattgattcaaagaacttctcatcacctctgaatcagctccagaacaggatatggctgatgcattgggctctgttcatcttctttaaccatgaaaatggtagaaatgggatcattgatctgttcttccaggacaggtacttgaatgctatacagacaaatgcacaccatcttattaggtatctagctactgcagttgttgtcaacaaaaggagaaggaatatgcttaaagagttgattaaggtcattcaacaggagcaccatagctacaaggatcccgtaactgaatttctggaatgcttatatgttaactatgattttgatggtgctcaacagaaactcatagagtgtgagcaggttatactcaatgatccattcctgggaaagcgcattgaagagggaaattttgtcagtgttcctttgagagatgagttccttgagaatgctaggctgtttattttcgagacatactgccgtatccatcggtgcatcgatatcagcatgctttctcagaagttgaacatgagctacgatgaggccgagttgtggatcatgaatttggttagaagctcaaaactggatgccaggatcgattcagtatcaggaactctcatcatgacaaccaatcacgtcaatgtccatgagcagattgttgagagcttgaagggccttaatatgaggacctacatgctcgcaaagaacatcgttgagccagctcagcaggcaactcggtgaggatagcagacttcacagttttgagacgccaaggactagtttagagacaactgtaaacttttcgagctctattgtgtggcattggatttcaacacatggaaggtggcttgccgtttgatacagcttggaatattatgctgacattttcaatattttgtaatcggaatttcgtaacagtggatccttctcaatgtattgctattattttatgctgacattttct

SEQ ID NO: 8407 - protein, 467 aa, Zea mays subsp. mays
  peptide (1)..(467): Ceres Seq. ID no. 12405419
  misc_feature (315)..(431): Pfam Name: PCI domain Pfam Description: PCI domain
  misc_feature (32)..(465): Homolog of NCBI NO: 34900328 NR Description: putative translation initiation factor 3 [Oryza
  misc_feature (35)..(467): Homolog of NCBI NO: 18410687 NR Description: translation initiation factor 3 -like protein; id: At3g57290.1, supported by cDNA: gi_12407657, supported by gi_14532577, supported by cDNA: gi_19310714, supported by cDNA:
  misc_feature (35)..(467): Homolog of NCBI NO: 7689381 NR Description: eIF3e [Arabidopsis thaliana]
  misc_feature (32)..(462): Homolog of NCBI NO: 34394686 NR Description: putative eukaryotic initiation factor 3E [Oryza
  misc_feature (143)..(467): Homolog of NCBI NO: 34900030 NR Description: putative eIF3e [Oryza sativa (japonica
  misc_feature (32)..(467): Homolog of NCBI NO: 4503521 NR Description: murine mammary tumor integration site 6 (oncogene eukaryotic translation initiation factor 3, subunit 6 (48kD)
  misc_feature (32)..(467): Homolog of NCBI NO: 34866211 NR Description: similar to Eukaryotic translation initiation
  misc_feature (32)..(467): Homolog of NCBI NO: 38494387 NR Description: Murine mammary tumor integration site 6 [Silurana
  misc_feature (32)..(467): Homolog of NCBI NO: 17389740 NR Description: eukaryotic translation initiation factor 3,
  misc_feature (32)..(458): Homolog of NCBI NO: 12847562 NR Description: unnamed protein product [Mus musculus]
PPPRAAIPSNPRGTLTPKRPRRQLGELESPAMSEHDLTALMAAQLDRHLVFPLLEFLQERQLYSESEILEAKIRLLSGTNMVDYAMDIHKSLYGTDDVPEDMVKRRAEVVSRLRSLEEAAAPLVAFLQNPQLVQEFRPDKQYNIHMLQERYQIGPDQIEALYQYAKFQFECGNYSGAADYLYQYRALCTNSERNVSALWGKLAAEILMQNWDVALEELNRLKEIIDSKNFSSPLNQLQNRIWLMHWALFIFFNHENGRNGIIDLFFQDRYLNAIQTNAHHLIRYLATAVVVNKRRRNMLKELIKVIQQEHHSYKDPVTEFLECLYVNYDFDGAQQKLIECEQVILNDPFLGKRIEEGNFVSVPLRDEFLENARLFIFETYCRIHRCIDISMLSQKLNMSYDEAELWIMNLVRSSKLDARIDSVSGTLIMTTNHVNVHEQIVESLKGLNMRTYMLAKNIVEPAQQATR

SEQ ID NO: 8408 - protein, 436 aa, Zea mays subsp. mays
  peptide (1)..(436): Ceres Seq. ID no. 12405420
  misc_feature (284)..(400): Pfam Name: PCI domain Pfam Description: PCI domain
  misc_feature (1)..(434): Homolog of NCBI NO: 34900328 NR Description: putative translation initiation factor 3 [Oryza
  misc_feature (4)..(436): Homolog of NCBI NO: 18410687 NR Description: translation initiation factor 3 -like protein; id: At3g57290.1, supported by cDNA: gi_12407657, supported by gi_14532577, supported by cDNA: gi_19310714, supported by cDNA:
  misc_feature (4)..(436): Homolog of NCBI NO: 7689381 NR Description: eIF3e [Arabidopsis thaliana]
  misc_feature (1)..(431): Homolog of NCBI NO: 34394686 NR Description: putative eukaryotic initiation factor 3E [Oryza
  misc_feature (112)..(436): Homolog of NCBI NO: 34900030 NR Description: putative eIF3e [Oryza sativa (japonica
  misc_feature (1)..(436): Homolog of NCBI NO: 4503521 NR Description: murine mammary tumor integration site 6 (oncogene eukaryotic translation initiation factor 3, subunit 6 (48kD)
  misc_feature (1)..(436): Homolog of NCBI NO: 34866211 NR Description: similar to Eukaryotic translation initiation
  misc_feature (1)..(436): Homolog of NCBI NO: 38494387 NR Description: Murine mammary tumor integration site 6 [Silurana
  misc_feature (1)..(436): Homolog of NCBI NO: 17389740 NR Description: eukaryotic translation initiation factor 3,
  misc_feature (1)..(427): Homolog of NCBI NO: 12847562 NR Description: unnamed protein product [Mus musculus]
MSEHDLTALMAAQLDRHLVFPLLEFLQERQLYSESEILEAKIRLLSGTNMVDYAMDIHKSLYGTDDVPEDMVKRRAEVVSRLRSLEEAAAPLVAFLQNPQLVQEFRPDKQYNIHMLQERYQIGPDQIEALYQYAKFQFECGNYSGAADYLYQYRALCTNSERNVSALWGKLAAEILMQNWDVALEELNRLKEIIDSKNFSSPLNQLQNRIWLMHWALFIFFNHENGRNGIIDLFFQDRYLNAIQTNAHHLIRYLATAVVVNKRRRNMLKELIKVIQQEHHSYKDPVTEFLECLYVNYDFDGAQQKLIECEQVILNDPFLGKRIEEGNFVSVPLRDEFLENARLFIFETYCRIHRCIDISMLSQKLNMSYDEAELWIMNLVRSSKLDARIDSVSGTLIMTTNHVNVHEQIVESLKGLNMRTYMLAKNIVEPAQQATR

SEQ ID NO: 8409 - protein, 427 aa, Zea mays subsp. mays
  peptide (1)..(427): Ceres Seq. ID no. 12405421
  misc_feature (275)..(391): Pfam Name: PCI domain Pfam Description: PCI domain
  misc_feature (1)..(425): Homolog of NCBI NO: 34900328 NR Description: putative translation initiation factor 3 [Oryza
  misc_feature (1)..(427): Homolog of NCBI NO: 18410687 NR Description: translation initiation factor 3 -like protein; id: At3g57290.1, supported by cDNA: gi_12407657, supported by gi_14532577, supported by cDNA: gi_19310714, supported by cDNA:
  misc_feature (1)..(427): Homolog of NCBI NO: 7689381 NR Description: eIF3e [Arabidopsis thaliana]
  misc_feature (1)..(422): Homolog of NCBI NO: 34394686 NR Description: putative eukaryotic initiation factor 3E [Oryza
  misc_feature (103)..(427): Homolog of NCBI NO: 34900030 NR Description: putative eIF3e [Oryza sativa (japonica
  misc_feature (1)..(427): Homolog of NCBI NO: 4503521 NR Description: murine mammary tumor integration site 6 (oncogene eukaryotic translation initiation factor 3, subunit 6 (48kD)
  misc_feature (1)..(427): Homolog of NCBI NO: 34866211 NR Description: similar to Eukaryotic translation initiation
  misc_feature (1)..(427): Homolog of NCBI NO: 38494387 NR Description: Murine mammary tumor integration site 6 [Silurana
  misc_feature (1)..(427): Homolog of NCBI NO: 17389740 NR Description: eukaryotic translation initiation factor 3,
  misc_feature (1)..(418): Homolog of NCBI NO: 12847562 NR Description: unnamed protein product [Mus musculus]
MAAQLDRHLVFPLLEFLQERQLYSESEILEAKIRLLSGTNMVDYAMDIHKSLYGTDDVPEDMVKRRAEVVSRLRSLEEAAAPLVAFLQNPQLVQEFRPDKQYNIHMLQERYQIGPDQIEALYQYAKFQFECGNYSGAADYLYQYRALCTNSERNVSALWGKLAAEILMQNWDVALEELNRLKEIIDSKNFSSPLNQLQNRIWLMHWALFIFFNHENGRNGIIDLFFQDRYLNAIQTNAHHLIRYLATAVVVNKRRRNMLKELIKVIQQEHHSYKDPVTEFLECLYVNYDFDGAQQKLIECEQVILNDPFLGKRIEEGNFVSVPLRDEFLENARLFIFETYCRIHRCIDISMLSQKLNMSYDEAELWIMNLVRSSKLDARIDSVSGTLIMTTNHVNVHEQIVESLKGLNMRTYMLAKNIVEPAQQATR

SEQ ID NO: 8410 - DNA, 1193 bp, Zea mays subsp. mays
  misc_feature (1)..(1193): Ceres Seq. ID no. 13498586
  misc_feature: MA Experiment ID: 108543 Result: Up-regulated in Transcription
  misc_feature: MA Experiment ID: 20000477 Result: Up-regulated in Transcription
  misc_feature: MA Experiment 20000477 PARAMETER Experiment Name: Zm_5mM_SA_P Parameter: Age (day) Value: 10
  misc_feature: MA Experiment 20000477 PARAMETER Experiment Name: Zm_5mM_SA_P Parameter: Organism Value: Zea mays
  misc_feature: MA Experiment 20000477 PARAMETER Experiment Name: Zm_5mM_SA_P Parameter: Plant Line Value: 35A19
  misc_feature: MA Experiment 20000477 PARAMETER Experiment Name: Zm_5mM_SA_P Parameter: Timepoint (hr) Value: 48
  misc_feature: MA Experiment 20000477 PARAMETER Experiment Name: Zm_5mM_SA_P Parameter: Tissue Value: Aerial
  misc_feature: MA Experiment 20000477 PARAMETER Experiment Name: Zm_5mM_SA_P Parameter: Treatment Value: 5mM SA vs. No Treatment
  misc_feature: MA Experiment ID: 20000492 Result: Down-regulated in Transcription
  misc_feature: MA Experiment 20000492 PARAMETER Experiment Name: Zm_Hybrid_Seed_Dev_P Parameter: DAP Value: 12
  misc_feature: MA Experiment 20000492 PARAMETER Experiment Name: Zm_Hybrid_Seed_Dev_P Parameter: Organism Value: Zea mays
  misc_feature: MA Experiment 20000492 PARAMETER Experiment Name: Zm_Hybrid_Seed_Dev_P Parameter: Plant Line Value: 35A19
  misc_feature: MA Experiment 20000492 PARAMETER Experiment Name: Zm_Hybrid_Seed_Dev_P Parameter: Tissue Value: Fert Kernel vs. Unfert Floret
gctttacaactccccaccccatcccatccacacacacttcacccagcgcggcggccgccggccgccggcaatggaggccgtggcgcgcagcggcactacctttggcggttcgtgcggagacagagtggtacaacgaggttgtcctcagcgccgtggcgccaggcgactggtggcgcggcctgccgcacccggtgcagtcatggatgcgcaactgcgtcggcggttacctcctctatttcatctctggtttcctctggtgcttcgtcatctactactggaagcgccacgcctacatccccaaagatgccatccccacaaatgaagctatgaagaagcaaatagttgtagcatcgaaggctatgcctttttactgcgctcttccaactttatctgaatatatgattgagagcggatggactcggtgctacttcaatatcagcgaaattggtttttctatgtacctctgttatatggctatgtatctcatctttgtggagtttggaatttactggatgcacagggagttgcatgacataaaaccattatacaaatatctgcatgcaacccaccatatttacaacaaggagaataccttgtctccatttgctggacttgcatttcatccactggatggtattctgcaagcaataccgcatgtgttcgcgctcttcctctttccaacacacttcaggacacatattgcactcttgttcctagaggctgtgtggacaacaaacatccacgactgcattcatggcaagatatggccagtcatgggcgctggatatcacaccattcaccatacgacttaccgccacaactatggccactacaccatctggatggactggatgtttggtacgctcaatgagccagaagatatcctcaagaaggcttgagtttctcggagctgtggtatccctatggtgctggtgctggaactgctcgatctgttcccagtgtttctaatccgttgagcctgttcagcactgtctgtttatgtaggcatcagtgtgttaattagtttgctaggttcatatggctttgtgcttattctgtaatttagtgatgtttgtctcatgacgcaacggagttcaggacgaataaaactttgctagacacattctggattccagttgcttgtacaatgttgcaactcaactgtcaatataggatgtaaaacggattccttc

SEQ ID NO: 8411 - protein, 298 aa, Zea mays subsp. mays
  peptide (1)..(298): Ceres Seq. ID no. 13498587
  misc_feature (39)..(202): Homolog of NCBI NO: 34895618 NR Description: putative sterol-C5(6)-desaturase [Oryza sativa
  misc_feature (237)..(297): Homolog of NCBI NO: 34895618 NR Description: putative sterol-C5(6)-desaturase [Oryza sativa
  misc_feature (39)..(297): Homolog of NCBI NO: 4426627 NR Description: sterol-C5(6)-desaturase homolog [Nicotiana
  misc_feature (39)..(297): Homolog of NCBI NO: 33301670 NR Description: Delta-7-sterol-C5(6)-desaturase (Delta-7-C-5
  misc_feature (39)..(291): Homolog of NCBI NO: 5031219 NR Description: delta7 sterol C-5 desaturase [Arabidopsis
  misc_feature (39)..(291): Homolog of NCBI NO: 15232935 NR Description: delta 7-sterol-C5-desaturase (STE1) [Arabidopsis
  misc_feature (39)..(291): Homolog of NCBI NO: 21594971 NR Description: sterol-C5-desaturase [Arabidopsis thaliana]
  misc_feature (39)..(291): Homolog of NCBI NO: 2129741 NR Description: C-5 sterol desaturase (EC 1.-.-.-) - Arabidopsis
  misc_feature (39)..(291): Homolog of NCBI NO: 15232937 NR Description: delta 7-sterol-C5-desaturase, putative
  misc_feature (72)..(291): Homolog of NCBI NO: 25742651 NR Description: sterol-C5-desaturase (fungal ERG3,
FTTPHPIPSTHTSPSAAAAGRRQWRPWRAAALPLAVRAETEWYNEVVLSAVAPGDWWRGLPHPVQSWMRNCVGGYLLYFISGFLWCFVIYYWKRHAYIPKDAIPTNEAMKKQIVVASKAMPFYCALPTLSEYMIESGWTRCYFNISEIGFSMYLCYMAMYLIFVEFGIYWMHRELHDIKPLYKYLHATHHIYNKENTLSPFAGLAFHPLDGILQAIPHVFALFLFPTHFRTHIALLFLEAVWTTNIHDCIHGKIWPVMGAGYHTIHHTTYRHNYGHYTIWMDWMFGTLNEPEDILKKA

SEQ ID NO: 8412 - protein, 231 aa, Zea mays subsp. mays
  peptide (1)..(231): Ceres Seq. ID no. 13498588
  misc_feature (1)..(135): Homolog of NCBI NO: 34895618 NR Description: putative sterol-C5(6)-desaturase [Oryza sativa
  misc_feature (170)..(230): Homolog of NCBI NO: 34895618 NR Description: putative sterol-C5(6)-desaturase [Oryza sativa
  misc_feature (1)..(230): Homolog of NCBI NO: 4426627 NR Description: sterol-C5(6)-desaturase homolog [Nicotiana
  misc_feature (1)..(230): Homolog of NCBI NO: 33301670 NR Description: Delta-7-sterol-C5(6)-desaturase (Delta-7-C-5
  misc_feature (1)..(224): Homolog of NCBI NO: 5031219 NR Description: delta7 sterol C-5 desaturase [Arabidopsis
  misc_feature (1)..(224): Homolog of NCBI NO: 15232935 NR Description: delta 7-sterol-C5-desaturase (STE1) [Arabidopsis
  misc_feature (1)..(224): Homolog of NCBI NO: 21594971 NR Description: sterol-C5-desaturase [Arabidopsis thaliana]
  misc_feature (1)..(224): Homolog of NCBI NO: 2129741 NR Description: C-5 sterol desaturase (EC 1.-.-.-) - Arabidopsis
  misc_feature (1)..(224): Homolog of NCBI NO: 15232937 NR Description: delta 7-sterol-C5-desaturase, putative
  misc_feature (5)..(224): Homolog of NCBI NO: 25742651 NR Description: sterol-C5-desaturase (fungal ERG3,
MRNCVGGYLLYFISGFLWCFVIYYWKRHAYIPKDAIPTNEAMKKQIVVASKAMPFYCALPTLSEYMIESGWTRCYFNISEIGFSMYLCYMAMYLIFVEFGIYWMHRELHDIKPLYKYLHATHHIYNKENTLSPFAGLAFHPLDGILQAIPHVFALFLFPTHFRTHIALLFLEAVWTTNIHDCIHGKIWPVMGAGYHTIHHTTYRHNYGHYTIWMDWMFGTLNEPEDILKKA

SEQ ID NO: 8413 - protein, 190 aa, Zea mays subsp. mays
  peptide (1)..(190): Ceres Seq. ID no. 13498589
  misc_feature (1)..(94): Homolog of NCBI NO: 34895618 NR Description: putative sterol-C5(6)-desaturase [Oryza sativa
  misc_feature (129)..(189): Homolog of NCBI NO: 34895618 NR Description: putative sterol-C5(6)-desaturase [Oryza sativa
  misc_feature (1)..(189): Homolog of NCBI NO: 4426627 NR Description: sterol-C5(6)-desaturase homolog [Nicotiana
  misc_feature (1)..(189): Homolog of NCBI NO: 33301670 NR Description: Delta-7-sterol-C5(6)-desaturase (Delta-7-C-5
  misc_feature (1)..(183): Homolog of NCBI NO: 5031219 NR Description: delta7 sterol C-5 desaturase [Arabidopsis
  misc_feature (1)..(183): Homolog of NCBI NO: 15232935 NR Description: delta 7-sterol-C5-desaturase (STE1) [Arabidopsis
  misc_feature (1)..(183): Homolog of NCBI NO: 21594971 NR Description: sterol-C5-desaturase [Arabidopsis thaliana]
  misc_feature (1)..(183): Homolog of NCBI NO: 2129741 NR Description: C-5 sterol desaturase (EC 1.-.-.-) - Arabidopsis
  misc_feature (1)..(183): Homolog of NCBI NO: 15232937 NR Description: delta 7-sterol-C5-desaturase, putative
  misc_feature (1)..(183): Homolog of NCBI NO: 25742651 NR Description: sterol-C5-desaturase (fungal ERG3,
MKKQIVVASKAMPFYCALPTLSEYMIESGWTRCYFNISEIGFSMYLCYMAMYLIFVEFGIYWMHRELHDIKPLYKYLHATHHIYNKENTLSPFAGLAFHPLDGILQAIPHVFALFLFPTHFRTHIALLFLEAVWTTNIHDCIHGKIWPVMGAGYHTIHHTTYRHNYGHYTIWMDWMFGTLNEPEDILKKA

SEQ ID NO: 8414 - DNA, 1201 bp, Zea mays subsp. mays; identical to SEQ ID NO: 7324
  misc_feature (1)..(1201): Ceres Seq. ID no. 13492541
  misc_feature: MA Experiment ID: 108535 Result: Down-regulated in Transcription
  misc_feature: MA Experiment 108535 PARAMETER Experiment Name: Zm_Meristem_P Parameter: Age (day) Value: 8
  misc_feature: MA Experiment 108535 PARAMETER Experiment Name: Zm_Meristem_P Parameter: Organism Value: Zea mays
  misc_feature: MA Experiment 108535 PARAMETER Experiment Name: Zm_Meristem_P Parameter: Plant Line Value: 35A19
  misc_feature: MA Experiment 108535 PARAMETER Experiment Name: Zm_Meristem_P Parameter: Tissue Value: Root Meristem vs. Above Root Meristem
  misc_feature: MA Experiment ID: 108536 Result: Down-regulated in Transcription
  misc_feature: MA Experiment 108536 PARAMETER Experiment Name: Zm_Meristem_P Parameter: Age (day) Value: 8
  misc_feature: MA Experiment 108536 PARAMETER Experiment Name: Zm_Meristem_P Parameter: Organism Value: Zea mays
  misc_feature: MA Experiment 108536 PARAMETER Experiment Name: Zm_Meristem_P Parameter: Plant Line Value: 35A19
  misc_feature: MA Experiment 108536 PARAMETER Experiment Name: Zm_Meristem_P Parameter: Tissue Value: Shoot Meristem vs. Above Shoot Meristem
  misc_feature: MA Experiment ID: 20000534 Result: Up-regulated in Transcription
  misc_feature: MA Experiment 20000534 PARAMETER Experiment Name: Zm_Hybrid_Pollen_P Parameter: Age (day) Value: 8
  misc_feature: MA Experiment 20000534 PARAMETER Experiment Name: Zm_Hybrid_Pollen_P Parameter: Organism Value: Zea mays
  misc_feature: MA Experiment 20000534 PARAMETER Experiment Name: Zm_Hybrid_Pollen_P Parameter: Plant Line Value: 35A19
  misc_feature: MA Experiment 20000534 PARAMETER Experiment Name: Zm_Hybrid_Pollen_P Parameter: Tissue Value: Pollen vs. Aerial

SEQ ID NO: 8415 - protein, 317 aa, Zea mays subsp. mays; identical to SEQ ID NO: 7325
  peptide (1)..(317): Ceres Seq. ID no. 13492542
  misc_feature (82)..(220): Pfam Name: alpha/beta hydrolase fold Pfam Description: alpha/beta hydrolase fold
  misc_feature (82)..(220): Pfam Name: alpha/beta hydrolase fold Pfam Description: alpha/beta hydrolase fold
  misc_feature (1)..(220): Homolog of NCBI NO: 24059850 NR Description: hydrolase-like protein [Oryza sativa (japonica
  misc_feature (220)..(317): Homolog of NCBI NO: 24059850 NR Description: hydrolase-like protein [Oryza sativa (japonica
  misc_feature (5)..(310): Homolog of NCBI NO: 27436745 NR Description: Hypothetical protein [Oryza sativa (japonica
  misc_feature (3)..(314): Homolog of NCBI NO: 27436746 NR Description: Unknown protein [Oryza sativa (japonica
  misc_feature (54)..(313): Homolog of NCBI NO: 34896168 NR Description: contains ESTs
  misc_feature (220)..(317): Homolog of NCBI NO: 24059850 NR Description: hydrolase-like protein [Oryza sativa (japonica
  misc_feature (3)..(314): Homolog of NCBI NO: 27436746 NR Description: Unknown protein [Oryza sativa (japonica
  misc_feature (6)..(317): Homolog of NCBI NO: 18411865 NR Description: hydrolase, alpha/beta fold family [Arabidopsis >gi|19699019|gb|AAL91245.1| unknown protein [Arabidopsis >gi|25084092|gb|AAN72173.1| unknown protein [Arabidopsis
  misc_feature (6)..(314): Homolog of NCBI NO: 37533664 NR Description: putative hydrolase [Oryza sativa (japonica >gi|19920100|gb|AAM08532.1| Putative hydrolase [Oryza sativa]
  misc_feature (57)..(309): Homolog of NCBI NO: 21592805 NR Description: unknown [Arabidopsis thaliana]
  misc_feature (43)..(315): Homolog of NCBI NO: 22326938 NR Description: hydrolase, alpha/beta fold family [Arabidopsis >gi|29294062|gb|AAO73899.1| hydrolase, alpha/beta fold family
  misc_feature (6)..(309): Homolog of NCBI NO: 30689631 NR Description: hydrolase, alpha/beta fold family [Arabidopsis
  misc_feature (54)..(313): Homolog of NCBI NO: 34896168 NR Description: contains ESTs
  misc_feature (5)..(310): Homolog of NCBI NO: 27436745 NR Description: Hypothetical protein [Oryza sativa (japonica
  misc_feature (1)..(220): Homolog of NCBI NO: 24059850 NR Description: hydrolase-like protein [Oryza sativa (japonica
  misc_feature (6)..(309): Homolog of NCBI NO: 30689631 NR Description: hydrolase, alpha/beta fold family [Arabidopsis
  misc_feature (43)..(315): Homolog of NCBI NO: 22326938 NR Description: hydrolase, alpha/beta fold family [Arabidopsis >gi|29294062|gb|AAO73899.1| hydrolase, alpha/beta fold family
  misc_feature (57)..(309): Homolog of NCBI NO: 21592805 NR Description: unknown [Arabidopsis thaliana]
  misc_feature (6)..(314): Homolog of NCBI NO: 37533664 NR Description: putative hydrolase [Oryza sativa (japonica >gi|19920100|gb|AAM08532.1| Putative hydrolase [Oryza sativa]
  misc_feature (6)..(317): Homolog of NCBI NO: 18411865 NR Description: hydrolase, alpha/beta fold family [Arabidopsis >gi|19699019|gb|AAL91245.1| unknown protein [Arabidopsis >gi|25084092|gb|AAN72173.1| unknown protein [Arabidopsis

SEQ ID NO: 8416 - protein, 311 aa, Zea mays subsp. mays; identical to SEQ ID NO: 7326
  peptide (1)..(311): Ceres Seq. ID no. 13492543
  misc_feature (111)..(220): Pfam Name: Protein of unknown function (DUF390) Pfam Description: Protein of unknown function (DUF390)
  misc_feature (111)..(220): Pfam Name: Protein of unknown function (DUF390) Pfam Description: Protein of unknown function (DUF390)
  misc_feature (18)..(311): Homolog of NCBI NO: 29247944 NR Description: GLP_26_54603_52153 [Giardia lamblia ATCC 50803]
  misc_feature (1)..(307): Homolog of NCBI NO: 33865132 NR Description: possible N-terminal part of IF-2 [Synechococcus
  misc_feature (17)..(311): Homolog of NCBI NO: 23018055 NR Description: hypothetical protein [Thermobifida fusca]
  misc_feature (55)..(259): Homolog of NCBI NO: 23105938 NR Description: hypothetical protein [Azotobacter vinelandii]
  misc_feature (11)..(296): Homolog of NCBI NO: 25989119 NR Description: unknown [Streptomyces aureofaciens]
  misc_feature (161)..(311): Homolog of NCBI NO: 5032119 NR Description: Ser/Arg-related nuclear matrix protein (plenty of
  misc_feature (12)..(298): Homolog of NCBI NO: 14018072 NR Description: hypothetical protein [Oryza sativa]
  misc_feature (51)..(247): Homolog of NCBI NO: 7494125 NR Description: myosin-IA - Acanthamoeba castellanii
  misc_feature (40)..(311): Homolog of NCBI NO: 23105951 NR Description: hypothetical protein [Azotobacter vinelandii]
  misc_feature (44)..(272): Homolog of NCBI NO: 538695 NR Description: hypothetical protein (sdsB region) - Pseudomonas
  misc_feature (1)..(307): Homolog of NCBI NO: 33865132 NR Description: possible N-terminal part of IF-2 [Synechococcus
  misc_feature (17)..(311): Homolog of NCBI NO: 23018055 NR Description: hypothetical protein [Thermobifida fusca]
  misc_feature (55)..(259): Homolog of NCBI NO: 23105938 NR Description: hypothetical protein [Azotobacter vinelandii]
  misc_feature (11)..(296): Homolog of NCBI NO: 25989119 NR Description: unknown [Streptomyces aureofaciens]
  misc_feature (161)..(311): Homolog of NCBI NO: 5032119 NR Description: Ser/Arg-related nuclear matrix protein (plenty of
  misc_feature (12)..(298): Homolog of NCBI NO: 14018072 NR Description: hypothetical protein [Oryza sativa]
  misc_feature (18)..(311): Homolog of NCBI NO: 29247944 NR Description: GLP_26_54603_52153 [Giardia lamblia ATCC 50803]
  misc_feature (51)..(247): Homolog of NCBI NO: 7494125 NR Description: myosin-IA - Acanthamoeba castellanii
  misc_feature (40)..(311): Homolog of NCBI NO: 23105951 NR Description: hypothetical protein [Azotobacter vinelandii]
  misc_feature (44)..(272): Homolog of NCBI NO: 538695 NR Description: hypothetical protein (sdsB region) - Pseudomonas

SEQ ID NO: 8417 - protein, 187 aa, Zea mays subsp. mays; identical to SEQ ID NO: 7327
  peptide (1)..(187): Ceres Seq. ID no. 13492544
  misc_feature (5)..(142): Homolog of NCBI NO: 5032119 NR Description: Ser/Arg-related nuclear matrix protein (plenty of
  misc_feature (4)..(187): Homolog of NCBI NO: 9845307 NR Description: pr5 [Rat cytomegalovirus]
  misc_feature (2)..(187): Homolog of NCBI NO: 27375632 NR Description: blr0521 [Bradyrhizobium japonicum]
  misc_feature (5)..(142): Homolog of NCBI NO: 5032119 NR Description: Ser/Arg-related nuclear matrix protein (plenty of
  misc_feature (4)..(187): Homolog of NCBI NO: 9845307 NR Description: pr5 [Rat cytomegalovirus]
  misc_feature (2)..(187): Homolog of NCBI NO: 27375632 NR Description: blr0521 [Bradyrhizobium japonicum]

SEQ ID NO: 8418 - DNA, 1606 bp, Zea mays subsp. mays
  misc_feature (1)..(1606): Ceres Seq. ID no. 12344912
  misc_feature: MA Experiment ID: 108504 Result: Up-regulated in Transcription
  misc_feature: MA Experiment 108504 PARAMETER Experiment Name: Zm_Drought_P Parameter: Age (day) Value: 8
  misc_feature: MA Experiment 108504 PARAMETER Experiment Name: Zm_Drought_P Parameter: Organism Value: Zea mays
  misc_feature: MA Experiment 108504 PARAMETER Experiment Name: Zm_Drought_P Parameter: Plant Line Value: 35A19
  misc_feature: MA Experiment 108504 PARAMETER Experiment Name: Zm_Drought_P Parameter: Timepoint (hr) Value: 12
  misc_feature: MA Experiment 108504 PARAMETER Experiment Name: Zm_Drought_P Parameter: Tissue Value: Aerial
  misc_feature: MA Experiment 108504 PARAMETER Experiment Name: Zm_Drought_P Parameter: Treatment Value: Drought vs. No Drought
  misc_feature: MA Experiment ID: 108527 Result: Up-regulated in Transcription
  misc_feature: MA Experiment 108527 PARAMETER Experiment Name: Zm_5mM_NO_P Parameter: Age (day) Value: 8
  misc_feature: MA Experiment 108527 PARAMETER Experiment Name: Zm_5mM_NO_P Parameter: Organism Value: Zea mays
  misc_feature: MA Experiment 108527 PARAMETER Experiment Name: Zm_5mM_NO_P Parameter: Plant Line Value: 35A19
  misc_feature: MA Experiment 108527 PARAMETER Experiment Name: Zm_5mM_NO_P Parameter: Timepoint (hr) Value: 6
  misc_feature: MA Experiment 108527 PARAMETER Experiment Name: Zm_5mM_NO_P Parameter: Tissue Value: Aerial
  misc_feature: MA Experiment 108527 PARAMETER Experiment Name: Zm_5mM_NO_P Parameter: Treatment Value: 5mM NO vs. No Treatment
  misc_feature: MA Experiment ID: 108528 Result: Down-regulated in Transcription
  misc_feature: MA Experiment 108528 PARAMETER Experiment Name: Zm_Imbibed_Seeds_P Parameter: Age (day) Value: 5 vs. 2
  misc_feature: MA Experiment 108528 PARAMETER Experiment Name: Zm_Imbibed_Seeds_P Parameter: Organism Value: Zea mays
  misc_feature: MA Experiment 108528 PARAMETER Experiment Name: Zm_Imbibed_Seeds_P Parameter: Plant Line Value: 35A19
  misc_feature: MA Experiment 108528 PARAMETER Experiment Name: Zm_Imbibed_Seeds_P Parameter: Tissue Value: Aerial vs. Embryo
  misc_feature: MA Experiment ID: 108529 Result: Down-regulated in Transcription
  misc_feature: MA Experiment 108529 PARAMETER Experiment Name: Zm_Imbibed_Seeds_P Parameter: Age (day) Value: 5 vs. 2
  misc_feature: MA Experiment 108529 PARAMETER Experiment Name: Zm_Imbibed_Seeds_P Parameter: Organism Value: Zea mays
  misc_feature: MA Experiment 108529 PARAMETER Experiment Name: Zm_Imbibed_Seeds_P Parameter: Plant Line Value: 35A19
  misc_feature: MA Experiment 108529 PARAMETER Experiment Name: Zm_Imbibed_Seeds_P Parameter: Tissue Value: Roots vs. Embryo
  misc_feature: MA Experiment ID: 108530 Result: Down-regulated in Transcription
  misc_feature: MA Experiment 108530 PARAMETER Experiment Name: Zm_Imbibed_Seeds_P Parameter: Age (day) Value: 6 vs. 2
  misc_feature: MA Experiment 108530 PARAMETER Experiment Name: Zm_Imbibed_Seeds_P Parameter: Organism Value: Zea mays
  misc_feature: MA Experiment 108530 PARAMETER Experiment Name: Zm_Imbibed_Seeds_P Parameter: Plant Line Value: 35A19
  misc_feature: MA Experiment 108530 PARAMETER Experiment Name: Zm_Imbibed_Seeds_P Parameter: Tissue Value: Aerial vs. Embryo
  misc_feature: MA Experiment ID: 108535 Result: Down-regulated in Transcription
  misc_feature: MA Experiment 108535 PARAMETER Experiment Name: Zm_Meristem_P Parameter: Age (day) Value: 8
  misc_feature: MA Experiment 108535 PARAMETER Experiment Name: Zm_Meristem_P Parameter: Organism Value: Zea mays
  misc_feature: MA Experiment 108535 PARAMETER Experiment Name: Zm_Meristem_P Parameter: Plant Line Value: 35A19
  misc_feature: MA Experiment 108535 PARAMETER Experiment Name: Zm_Meristem_P Parameter: Tissue Value: Root Meristem vs. Above Root Meristem
  misc_feature: MA Experiment ID: 108540 Result: Up-regulated in Transcription
  misc_feature: MA Experiment 108540 PARAMETER Experiment Name: Zm_20percent_PEG_P Parameter: Age (day) Value: 8
  misc_feature: MA Experiment 108540 PARAMETER Experiment Name: Zm_20percent_PEG_P Parameter: Organism Value: Zea mays
  misc_feature: MA Experiment 108540 PARAMETER Experiment Name: Zm_20percent_PEG_P Parameter: Plant Line Value: 35A19
  misc_feature: MA Experiment 108540 PARAMETER Experiment Name: Zm_20percent_PEG_P Parameter: Timepoint (hr) Value: 6
  misc_feature: MA Experiment 108540 PARAMETER Experiment Name: Zm_20percent_PEG_P Parameter: Tissue Value: Aerial
  misc_feature: MA Experiment 108540 PARAMETER Experiment Name: Zm_20percent_PEG_P Parameter: Treatment Value: 20percent PEG vs. No Treatment
  misc_feature: MA Experiment ID: 108544 Result: Up-regulated in Transcription
  misc_feature: MA Experiment ID: 108556 Result: Up-regulated in Transcription
  misc_feature: MA Experiment 108556 PARAMETER Experiment Name: Zm_Drought_P Parameter: Age (day) Value: 9
  misc_feature: MA Experiment 108556 PARAMETER Experiment Name: Zm_Drought_P Parameter: Organism Value: Zea mays
  misc_feature: MA Experiment 108556 PARAMETER Experiment Name: Zm_Drought_P Parameter: Plant Line Value: 35A19
  misc_feature: MA Experiment 108556 PARAMETER Experiment Name: Zm_Drought_P Parameter: Timepoint (hr) Value: 24
  misc_feature: MA Experiment 108556 PARAMETER Experiment Name: Zm_Drought_P Parameter: Tissue Value: Aerial
  misc_feature: MA Experiment 108556 PARAMETER Experiment Name: Zm_Drought_P Parameter: Treatment Value: Drought vs. No Drought
  misc_feature: MA Experiment ID: 108597 Result: Up-regulated in Transcription
  misc_feature: MA Experiment 108597 PARAMETER Experiment Name: Zm_100uM_ABA_P Parameter: Age (day) Value: 9
  misc_feature: MA Experiment 108597 PARAMETER Experiment Name: Zm_100uM_ABA_P Parameter: Organism Value: Zea mays
  misc_feature: MA Experiment 108597 PARAMETER Experiment Name: Zm_100uM_ABA_P Parameter: Plant Line Value: 35A19
  misc_feature: MA Experiment 108597 PARAMETER Experiment Name: Zm_100uM_ABA_P Parameter: Timepoint (hr) Value: 24
  misc_feature: MA Experiment 108597 PARAMETER Experiment Name: Zm_100uM_ABA_P Parameter: Tissue Value: Aerial
  misc_feature: MA Experiment 108597 PARAMETER Experiment Name: Zm_100uM_ABA_P Parameter: Treatment Value: 100uM ABA vs. No Treatment
  misc_feature: MA Experiment ID: 20000478 Result: Up-regulated in Transcription
  misc_feature: MA Experiment 20000478 PARAMETER Experiment Name: Zm_5mM_SA_P Parameter: Age (day) Value: 11
  misc_feature: MA Experiment 20000478 PARAMETER Experiment Name: Zm_5mM_SA_P Parameter: Organism Value: Zea mays
  misc_feature: MA Experiment 20000478 PARAMETER Experiment Name: Zm_5mM_SA_P Parameter: Plant Line Value: 35A19
  misc_feature: MA Experiment 20000478 PARAMETER Experiment Name: Zm_5mM_SA_P Parameter: Timepoint (hr) Value: 72
  misc_feature: MA Experiment 20000478 PARAMETER Experiment Name: Zm_5mM_SA_P Parameter: Tissue Value: Aerial
  misc_feature: MA Experiment 20000478 PARAMETER Experiment Name: Zm_5mM_SA_P Parameter: Treatment Value: 5mM SA vs. No Treatment
  misc_feature: MA Experiment ID: 20000480 Result: Up-regulated in Transcription
  misc_feature: MA Experiment 20000480 PARAMETER Experiment Name: Zm_Drought_P Parameter: Age (day) Value: 11
  misc_feature: MA Experiment 20000480 PARAMETER Experiment Name: Zm_Drought_P Parameter: Organism Value: Zea mays
  misc_feature: MA Experiment 20000480 PARAMETER Experiment Name: Zm_Drought_P Parameter: Plant Line Value: 35A19
  misc_feature: MA Experiment 20000480 PARAMETER Experiment Name: Zm_Drought_P Parameter: Timepoint (hr) Value: 72
  misc_feature: MA Experiment 20000480 PARAMETER Experiment Name: Zm_Drought_P Parameter: Tissue Value: Aerial
  misc_feature: MA Experiment 20000480 PARAMETER Experiment Name: Zm_Drought_P Parameter: Treatment Value: Drought vs. No Drought
actccgtactcggcgctcctcccccgtcgccgccggaaatcaggaagcccaagtgctctcttgggtgcgctcgtcgccggtggcagtgagccagtgatgcatcttcatctccggcttccttattaggatcagcccgtcgatcgatcatggcgtcgtcgagctcggctgctactactagtggtgacagtcagggtctcaaggctcgagatgcctgcatcgtcggcgtcgcccgcacgcccatcggcgcacttctcgggtcgctgtcgtccctccccgccaccaagctcggctccatcgccatccagggtgctctcaagagggcgaaggtcgacccggcgctcgtgcaggaggttttcatgggcaacgtcctcagcgccaaccttggccaggctccggcaaggcaggcagcccttggcgccggcttgcccaactccgtgccatgtaccaccgtcaacaaagtttgttcctcgggaatgaaggctgtcatgtttgcggctcaaagtattcagctggggatcaacgatgttgtggtcgccggtggcatggaaagcatgtcgaatgccccaaaatatgtggctgaagcaagacgaggatcacggttcggacatgatgtccttgttgatgggatgctcaaggatggcctgtgggatgtctataacgatttcccgatgggaatgtgtgctgaattgtgttcagaccagcactcaatctcaagggaggagcaggattcgtatgctatcctcagcaatgaacgtggcatagcagctcaggacagcggtgcattttcttgggagattgttcctgttgaaatttcttctggtagagggaaaccaccagttgttgttgacaaggatgagagtcttgcaaagtttgatccagtaaagctgaagaaacttgggccaacttttaagacgaatggttctgtaacggctggcaattcttctagtataagtgatggcgctgctgcaattgtccttgtcagtggagagaaagccaagaatcttggccttgaagttattgcaaggattacagggtatgctgatgctgcacaggcacctgagctgtttacgacagctccagcccttgccattccaaaggctatatcaaatgcagctcttcaaacttcacagatagattattatgaagtaaatgaggctttctctgttgttgctatagctaatcagaggcttcttggtatcccttccggaaagctaaacttaagtggtggtgctgtttccctgggccatcctatcggttgcagtggtgcacggataattgtcactttgcttgggattcttagacagaaaaatggaaaatttggtgttgctggagtttgcaatggcggcggcggcgcttcagccctcgttttggagctcatgcaaccctcttcgcatatccattcatcattgtgaagttggtgcgagcaaattagcaagacaaaatttgtaaaatgtgctgtatctgtcgtgctgctcagcacagggcattatcttgtactcccttatatgggaaaatatagacgtatatatacccatggaaataacagaggcccggaagaataatgtacagacactgatacagccactgaaagaagacatgggtagtg

SEQ ID NO: 8419 - protein, 421 aa, Zea mays subsp. mays
  peptide (1)..(421): Ceres Seq. ID no. 12344913
  misc_feature (20)..(281): Pfam Name: Thiolase, N-terminal domain Pfam Description: Thiolase, N-terminal domain
  misc_feature (13)..(421): Homolog of NCBI NO: 34894172 NR Description: putative acetoacyl-CoA-thiolase [Oryza sativa
  misc_feature (1)..(411): Homolog of NCBI NO: 8777413 NR Description: acetyl-CoA C-acetyltransferase [Arabidopsis
  misc_feature (11)..(411): Homolog of NCBI NO: 16417944 NR Description: acetyl Co-A acetyltransferase [Hevea brasiliensis]
  misc_feature (14)..(411): Homolog of NCBI NO: 30695411 NR Description: acetyl-CoA C-acetyltransferase A thiolase), putative [Arabidopsis thaliana]
  misc_feature (21)..(411): Homolog of NCBI NO: 30695409 NR Description: acetyl-CoA C-acetyltransferase A thiolase), putative [Arabidopsis thaliana]
  misc_feature (7)..(421): Homolog of NCBI NO: 15238793 NR Description: acetoacyl-CoA-thiolase; protein id: At5g47720.1,
  misc_feature (7)..(411): Homolog of NCBI NO: 30695277 NR Description: acetyl-CoA C-acetyltransferase
  misc_feature (11)..(411): Homolog of NCBI NO: 7433657 NR Description: acetyl-CoA C-acetyltransferase (EC 2.3.1.9),
  misc_feature (24)..(409): Homolog of NCBI NO: 19113478 NR Description: acetyl-coa acetyltransferase (EC 2.3.1.9)
  misc_feature (24)..(409): Homolog of NCBI NO: 11257345 NR Description: probable acetyl-CoA C-acetyltransferase (EC - fission yeast (Schizosaccharomyces pombe)
MASSSSAATTSGDSQGLKARDACIVGVARTPIGALLGSLSSLPATKLGSIAIQGALKRAKVDPALVQEVFMGNVLSANLGQAPARQAALGAGLPNSVPCTTVNKVCSSGMKAVMFAAQSIQLGINDVVVAGGMESMSNAPKYVAEARRGSRFGHDVLVDGMLKDGLWDVYNDFPMGMCAELCSDQHSISREEQDSYAILSNERGIAAQDSGAFSWEIVPVEISSGRGKPPVVVDKDESLAKFDPVKLKKLGPTFKTNGSVTAGNSSSISDGAAAIVLVSGEKAKNLGLEVIARITGYADAAQAPELFTTAPALAIPKAISNAALQTSQIDYYEVNEAFSVVAIANQRLLGIPSGKLNLSGGAVSLGHPIGCSGARIIVTLLGILRQKNGKFGVAGVCNGGGGASALVLELMQPSSHIHSSL

SEQ ID NO: 8420 - protein, 351 aa, Zea mays subsp. mays
  peptide (1)..(351): Ceres Seq. ID no. 12344914
  misc_feature (1)..(211): Pfam Name: Thiolase, N-terminal domain Pfam Description: Thiolase, N-terminal domain
  misc_feature (1)..(351): Homolog of NCBI NO: 34894172 NR Description: putative acetoacyl-CoA-thiolase [Oryza sativa
  misc_feature (1)..(341): Homolog of NCBI NO: 8777413 NR Description: acetyl-CoA C-acetyltransferase [Arabidopsis
  misc_feature (1)..(341): Homolog of NCBI NO: 16417944 NR Description: acetyl Co-A acetyltransferase [Hevea brasiliensis]
  misc_feature (1)..(341): Homolog of NCBI NO: 30695411 NR Description: acetyl-CoA C-acetyltransferase A thiolase), putative [Arabidopsis thaliana]
  misc_feature (1)..(341): Homolog of NCBI NO: 30695409 NR Description: acetyl-CoA C-acetyltransferase A thiolase), putative [Arabidopsis thaliana]
  misc_feature (1)..(351): Homolog of NCBI NO: 15238793 NR Description: acetoacyl-CoA-thiolase; protein id: At5g47720.1,
  misc_feature (1)..(341): Homolog of NCBI NO: 30695277 NR Description: acetyl-CoA C-acetyltransferase
  misc_feature (1)..(341): Homolog of NCBI NO: 7433657 NR Description: acetyl-CoA C-acetyltransferase (EC 2.3.1.9),
  misc_feature (1)..(339): Homolog of NCBI NO: 19113478 NR Description: acetyl-coa acetyltransferase (EC 2.3.1.9)
  misc_feature (1)..(339): Homolog of NCBI NO: 11257345 NR Description: probable acetyl-CoA C-acetyltransferase (EC - fission yeast (Schizosaccharomyces pombe)
MGNVLSANLGQAPARQAALGAGLPNSVPCTTVNKVCSSGMKAVMFAAQSIQLGINDVVVAGGMESMSNAPKYVAEARRGSRFGHDVLVDGMLKDGLWDVYNDFPMGMCAELCSDQHSISREEQDSYAILSNERGIAAQDSGAFSWEIVPVEISSGRGKPPVVVDKDESLAKFDPVKLKKLGPTFKTNGSVTAGNSSSISDGAAAIVLVSGEKAKNLGLEVIARITGYADAAQAPELFTTAPALAIPKAISNAALQTSQIDYYEVNEAFSVVAIANQRLLGIPSGKLNLSGGAVSLGHPIGCSGARIIVTLLGILRQKNGKFGVAGVCNGGGGASALVLELMQPSSHIHSSL

SEQ ID NO: 8421 - protein, 312 aa, Zea mays subsp. mays
  peptide (1)..(312): Ceres Seq. ID no. 12344915
  misc_feature (1)..(172): Pfam Name: Thiolase, N-terminal domain Pfam Description: Thiolase, N-terminal domain
  misc_feature (1)..(312): Homolog of NCBI NO: 34894172 NR Description: putative acetoacyl-CoA-thiolase [Oryza sativa
  misc_feature (1)..(302): Homolog of NCBI NO: 8777413 NR Description: acetyl-CoA C-acetyltransferase [Arabidopsis
  misc_feature (1)..(302): Homolog of NCBI NO: 16417944 NR Description: acetyl Co-A acetyltransferase [Hevea brasiliensis]
  misc_feature (1)..(302): Homolog of NCBI NO: 30695411 NR Description: acetyl-CoA C-acetyltransferase A thiolase), putative [Arabidopsis thaliana]
  misc_feature (1)..(302): Homolog of NCBI NO: 30695409 NR Description: acetyl-CoA C-acetyltransferase A thiolase), putative [Arabidopsis thaliana]
  misc_feature (1)..(312): Homolog of NCBI NO: 15238793 NR Description: acetoacyl-CoA-thiolase; protein id: At5g47720.1,
  misc_feature (1)..(302): Homolog of NCBI NO: 30695277 NR Description: acetyl-CoA C-acetyltransferase
  misc_feature (1)..(302): Homolog of NCBI NO: 7433657 NR Description: acetyl-CoA C-acetyltransferase (EC 2.3.1.9),
  misc_feature (1)..(300): Homolog of NCBI NO: 19113478 NR Description: acetyl-coa acetyltransferase (EC 2.3.1.9)
  misc_feature (1)..(300): Homolog of NCBI NO: 11257345 NR Description: probable acetyl-CoA C-acetyltransferase (EC - fission yeast (Schizosaccharomyces pombe)
MKAVMFAAQSIQLGINDVVVAGGMESMSNAPKYVAEARRGSRFGHDVLVDGMLKDGLWDVYNDFPMGMCAELCSDQHSISREEQDSYAILSNERGIAAQDSGAFSWEIVPVEISSGRGKPPVVVDKDESLAKFDPVKLKKLGPTFKTNGSVTAGNSSSISDGAAAIVLVSGEKAKNLGLEVIARITGYADAAQAPELFTTAPALAIPKAISNAALQTSQIDYYEVNEAFSVVAIANQRLLGIPSGKLNLSGGAVSLGHPIGCSGARIIVTLLGILRQKNGKFGVAGVCNGGGGASALVLELMQPSSHIHSSL

SEQ ID NO: 8422 - DNA, 1171 bp, Zea mays subsp. mays
  misc_feature (1)..(1171): Ceres Seq. ID no. 12405407
  misc_feature: MA Experiment ID: 108504 Result: Up-regulated in Transcription
  misc_feature: MA Experiment 108504 PARAMETER Experiment Name: Zm_Drought_P Parameter: Age (day) Value: 8
  misc_feature: MA Experiment 108504 PARAMETER Experiment Name: Zm_Drought_P Parameter: Organism Value: Zea mays
  misc_feature: MA Experiment 108504 PARAMETER Experiment Name: Zm_Drought_P Parameter: Plant Line Value: 35A19
  misc_feature: MA Experiment 108504 PARAMETER Experiment Name: Zm_Drought_P Parameter: Timepoint (hr) Value: 12
  misc_feature: MA Experiment 108504 PARAMETER Experiment Name: Zm_Drought_P Parameter: Tissue Value: Aerial
  misc_feature: MA Experiment 108504 PARAMETER Experiment Name: Zm_Drought_P Parameter: Treatment Value: Drought vs. No Drought
  misc_feature: MA Experiment ID: 108528 Result: Up-regulated in Transcription
  misc_feature: MA Experiment 108528 PARAMETER Experiment Name: Zm_Imbibed_Seeds_P Parameter: Age (day) Value: 5 vs. 2
  misc_feature: MA Experiment 108528 PARAMETER Experiment Name: Zm_Imbibed_Seeds_P Parameter: Organism Value: Zea mays
  misc_feature: MA Experiment 108528 PARAMETER Experiment Name: Zm_Imbibed_Seeds_P Parameter: Plant Line Value: 35A19
  misc_feature: MA Experiment 108528 PARAMETER Experiment Name: Zm_Imbibed_Seeds_P Parameter: Tissue Value: Aerial vs. Embryo
  misc_feature: MA Experiment ID: 108540 Result: Up-regulated in Transcription
  misc_feature: MA Experiment 108540 PARAMETER Experiment Name: Zm_20percent_PEG_P Parameter: Age (day) Value: 8
  misc_feature: MA Experiment 108540 PARAMETER Experiment Name: Zm_20percent_PEG_P Parameter: Organism Value: Zea mays
  misc_feature: MA Experiment 108540 PARAMETER Experiment Name: Zm_20percent_PEG_P Parameter: Plant Line Value: 35A19
  misc_feature: MA Experiment 108540 PARAMETER Experiment Name: Zm_20percent_PEG_P Parameter: Timepoint (hr) Value: 6
  misc_feature: MA Experiment 108540 PARAMETER Experiment Name: Zm_20percent_PEG_P Parameter: Tissue Value: Aerial
  misc_feature: MA Experiment 108540 PARAMETER Experiment Name: Zm_20percent_PEG_P Parameter: Treatment Value: 20percent PEG vs. No Treatment
  misc_feature: MA Experiment ID: 108543 Result: Down-regulated in Transcription
  misc_feature: MA Experiment ID: 108544 Result: Up-regulated in Transcription
  misc_feature: MA Experiment ID: 108556 Result: Up-regulated in Transcription
  misc_feature: MA Experiment 108556 PARAMETER Experiment Name: Zm_Drought_P Parameter: Age (day) Value: 9
  misc_feature: MA Experiment 108556 PARAMETER Experiment Name: Zm_Drought_P Parameter: Organism Value: Zea mays
  misc_feature: MA Experiment 108556 PARAMETER Experiment Name: Zm_Drought_P Parameter: Plant Line Value: 35A19
  misc_feature: MA Experiment 108556 PARAMETER Experiment Name: Zm_Drought_P Parameter: Timepoint (hr) Value: 24
  misc_feature: MA Experiment 108556 PARAMETER Experiment Name: Zm_Drought_P Parameter: Tissue Value: Aerial
  misc_feature: MA Experiment 108556 PARAMETER Experiment Name: Zm_Drought_P Parameter: Treatment Value: Drought vs. No Drought
  misc_feature: MA Experiment ID: 108559 Result: Up-regulated in Transcription
  misc_feature: MA Experiment 108559 PARAMETER Experiment Name: Zm_5mM_NO_P Parameter: Age (day) Value: 8
  misc_feature: MA Experiment 108559 PARAMETER Experiment Name: Zm_5mM_NO_P Parameter: Organism Value: Zea mays
  misc_feature: MA Experiment 108559 PARAMETER Experiment Name: Zm_5mM_NO_P Parameter: Plant Line Value: 35A19
  misc_feature: MA Experiment 108559 PARAMETER Experiment Name: Zm_5mM_NO_P Parameter: Timepoint (hr) Value: 12
  misc_feature: MA Experiment 108559 PARAMETER Experiment Name: Zm_5mM_NO_P Parameter: Tissue Value: Aerial
  misc_feature: MA Experiment 108559 PARAMETER Experiment Name: Zm_5mM_NO_P Parameter: Treatment Value: 5mM NO vs. No Treatment
  misc_feature: MA Experiment ID: 108687 Result: Down-regulated in Transcription
  misc_feature: MA Experiment 108687 PARAMETER Experiment Name: Zm_Embryos-Flowers__P Parameter: Tissue Value: Embryo vs. Aerial+
  misc_feature: MA Experiment ID: 20000108 Result: Down-regulated in Transcription
  misc_feature: MA Experiment 20000108 PARAMETER Experiment Name: Zm_Root-Tips_P Parameter: Age (day) Value: 12
  misc_feature: MA Experiment 20000108 PARAMETER Experiment Name: Zm_Root-Tips_P Parameter: Organism Value: Zea mays
  misc_feature: MA Experiment 20000108 PARAMETER Experiment Name: Zm_Root-Tips_P Parameter: Tissue Value: Root tips vs. Root mid region    35
  misc_feature: MA Experiment 20000108 PARAMETER Experiment Name: Zm_Root-Tips_P Parameter: Tissue Value: Root tips vs. Root mid region   Sequence Listing-Misc Features (4)
  misc_feature: MA Experiment ID: 20000477 Result: Up-regulated in Transcription
  misc_feature: MA Experiment 20000477 PARAMETER Experiment Name: Zm_5mM_SA_P Parameter: Age (day) Value: 10
  misc_feature: MA Experiment 20000477 PARAMETER Experiment Name: Zm_5mM_SA_P Parameter: Organism Value: Zea mays
  misc_feature: MA Experiment 20000477 PARAMETER Experiment Name: Zm_5mM_SA_P Parameter: Plant Line Value: 35A19
  misc_feature: MA Experiment 20000477 PARAMETER Experiment Name: Zm_5mM_SA_P Parameter: Timepoint (hr) Value: 48
  misc_feature: MA Experiment 20000477 PARAMETER Experiment Name: Zm_5mM_SA_P Parameter: Tissue Value: Aerial
  misc_feature: MA Experiment 20000477 PARAMETER Experiment Name: Zm_5mM_SA_P Parameter: Treatment Value: 5mM SA vs. No Treatment
  misc_feature: MA Experiment ID: 20000478 Result: Up-regulated in Transcription
  misc_feature: MA Experiment 20000478 PARAMETER Experiment Name: Zm_5mM_SA_P Parameter: Age (day) Value: 11
  misc_feature: MA Experiment 20000478 PARAMETER Experiment Name: Zm_5mM_SA_P Parameter: Organism Value: Zea mays
  misc_feature: MA Experiment 20000478 PARAMETER Experiment Name: Zm_5mM_SA_P Parameter: Plant Line Value: 35A19
  misc_feature: MA Experiment 20000478 PARAMETER Experiment Name: Zm_5mM_SA_P Parameter: Timepoint (hr) Value: 72
  misc_feature: MA Experiment 20000478 PARAMETER Experiment Name: Zm_5mM_SA_P Parameter: Tissue Value: Aerial
  misc_feature: MA Experiment 20000478 PARAMETER Experiment Name: Zm_5mM_SA_P Parameter: Treatment Value: 5mM SA vs. No Treatment
  misc_feature: MA Experiment ID: 20000479 Result: Up-regulated in Transcription
  misc_feature: MA Experiment 20000479 PARAMETER Experiment Name: Zm_Drought_P Parameter: Age (day) Value: 10
  misc_feature: MA Experiment 20000479 PARAMETER Experiment Name: Zm_Drought_P Parameter: Organism Value: Zea mays
  misc_feature: MA Experiment 20000479 PARAMETER Experiment Name: Zm_Drought_P Parameter: Plant Line Value: 35A19
  misc_feature: MA Experiment 20000479 PARAMETER Experiment Name: Zm_Drought_P Parameter: Timepoint (hr) Value: 48
  misc_feature: MA Experiment 20000479 PARAMETER Experiment Name: Zm_Drought_P Parameter: Tissue Value: Aerial
  misc_feature: MA Experiment 20000479 PARAMETER Experiment Name: Zm_Drought_P Parameter: Treatment Value: Drought vs. No Drought
  misc_feature: MA Experiment ID: 20000480 Result: Up-regulated in Transcription
  misc_feature: MA Experiment 20000480 PARAMETER Experiment Name: Zm_Drought_P Parameter: Age (day) Value: 11
  misc_feature: MA Experiment 20000480 PARAMETER Experiment Name: Zm_Drought_P Parameter: Organism Value: Zea mays
  misc_feature: MA Experiment 20000480 PARAMETER Experiment Name: Zm_Drought_P Parameter: Plant Line Value: 35A19
  misc_feature: MA Experiment 20000480 PARAMETER Experiment Name: Zm_Drought_P Parameter: Timepoint (hr) Value: 72
  misc_feature: MA Experiment 20000480 PARAMETER Experiment Name: Zm_Drought_P Parameter: Tissue Value: Aerial
  misc_feature: MA Experiment 20000480 PARAMETER Experiment Name: Zm_Drought_P Parameter: Treatment Value: Drought vs. No Drought
  misc_feature: MA Experiment ID: 20000487 Result: Up-regulated in Transcription
  misc_feature: MA Experiment 20000487 PARAMETER Experiment Name: Zm_50mM_NH4NO3_L_to_H_P Parameter: Organism Value: Zea mays
  misc_feature: MA Experiment 20000487 PARAMETER Experiment Name: Zm_50mM_NH4NO3_L_to_H_P Parameter: Timepoint (hr) Value: 4
  misc_feature: MA Experiment 20000487 PARAMETER Experiment Name: Zm_50mM_NH4NO3_L_to_H_P Parameter: Tissue Value: Leaves
  misc_feature: MA Experiment 20000487 PARAMETER Experiment Name: Zm_50mM_NH4NO3_L_to_H_P Parameter: Treatment Value: 50mM NH4NO3 vs. 100mM Mannitol
  misc_feature: MA Experiment ID: 20000488 Result: Up-regulated in Transcription
  misc_feature: MA Experiment 20000488 PARAMETER Experiment Name: Zm_50mM_NH4NO3_L_to_H_P Parameter: Organism Value: Zea mays
  misc_feature: MA Experiment 20000488 PARAMETER Experiment Name: Zm_50mM_NH4NO3_L_to_H_P Parameter: Timepoint (hr) Value: 8
  misc_feature: MA Experiment 20000488 PARAMETER Experiment Name: Zm_50mM_NH4NO3_L_to_H_P Parameter: Tissue Value: Leaves
  misc_feature: MA Experiment 20000488 PARAMETER Experiment Name: Zm_50mM_NH4NO3_L_to_H_P Parameter: Treatment Value: 50mM NH4NO3 vs. 100mM Mannitol
  misc_feature: MA Experiment ID: 20000534 Result: Down-regulated in Transcription
  misc_feature: MA Experiment 20000534 PARAMETER Experiment Name: Zm_Hybrid_Pollen_P Parameter: Age (day) Value: 8
  misc_feature: MA Experiment 20000534 PARAMETER Experiment Name: Zm_Hybrid_Pollen_P Parameter: Organism Value: Zea mays
  misc_feature: MA Experiment 20000534 PARAMETER Experiment Name: Zm_Hybrid_Pollen_P Parameter: Plant Line Value: 35A19
  misc_feature: MA Experiment 20000534 PARAMETER Experiment Name: Zm_Hybrid_Pollen_P Parameter: Tissue Value: Pollen vs. Aerial
  misc_feature: MA Experiment ID: 20000535 Result: Down-regulated in Transcription
  misc_feature: MA Experiment 20000535 PARAMETER Experiment Name: Zm_Hybrid_Seed_Dev_P Parameter: DAP Value: 30 vs. 12
  misc_feature: MA Experiment 20000535 PARAMETER Experiment Name: Zm_Hybrid_Seed_Dev_P Parameter: Organism Value: Zea mays
  misc_feature: MA Experiment 20000535 PARAMETER Experiment Name: Zm_Hybrid_Seed_Dev_P Parameter: Plant Line Value: 35A19
  misc_feature: MA Experiment 20000535 PARAMETER Experiment Name: Zm_Hybrid_Seed_Dev_P Parameter: Tissue Value: Embryo vs. Unfert Floret
  misc_feature: MA Experiment ID: 20000629 Result: Down-regulated in Transcription
  misc_feature: MA Experiment 20000629 PARAMETER Experiment Name: Zm_Herbicide-Treatments_P Parameter: Timepoint (hr) Value: 12
  misc_feature: MA Experiment 20000629 PARAMETER Experiment Name: Zm_Herbicide-Treatments_P Parameter: Tissue Value: Aerial
  misc_feature: MA Experiment 20000629 PARAMETER Experiment Name: Zm_Herbicide-Treatments_P Parameter: Treatment Value: Trimec vs. No Treatment
  misc_feature: MA Experiment ID: 20001613 Result: Up-regulated in Transcription
  misc_feature: MA Experiment 20001613 PARAMETER Experiment Name: Zm_50ppm_KNO3_L-to-H_P Parameter: Age (day) Value: 20
  misc_feature: MA Experiment 20001613 PARAMETER Experiment Name: Zm_50ppm_KNO3_L-to-H_P Parameter: Organism Value: Zea mays
  misc_feature: MA Experiment 20001613 PARAMETER Experiment Name: Zm_50ppm_KNO3_L-to-H_P Parameter: Plant Line Value: 35A19
  misc_feature: MA Experiment 20001613 PARAMETER Experiment Name: Zm_50ppm_KNO3_L-to-H_P Parameter: Timepoint (hr) Value: 24
  misc_feature: MA Experiment 20001613 PARAMETER Experiment Name: Zm_50ppm_KNO3_L-to-H_P Parameter: Tissue Value: Roots
  misc_feature: MA Experiment 20001613 PARAMETER Experiment Name: Zm_50ppm_KNO3_L-to-H_P Parameter: Treatment Value: 50ppm KNO3 vs. 50ppm KCl
agtcctctcctcccatccatctcatgcttcggtccacgcacccacccagccccaccagcggcagctccgcggcgccggcgtccagctccgacgccgcggcgatggtcgggggcggcgcggcggcgggcagcggcggcgcaccgagcggcgccaagctgctgcagatcctcaacgtgcgggtcgtgggcagcggcgaccgcgtggtggtgctgtcccacgggttcggcacggaccagtcggcgtggagccgcgtgctcccctacctcacccgcgaccaccgcgtggtgctctacgacctcgtctgcgccggcagcgtcaacccggagcacttcgacttccgccgctacgacacgctagactcgtacgtcgacgacctcctcgccatcctcgacgcgctccgcatcgcgcgctgcgccttcgtcggccactccgtctccgccatgatcggcatcctcgcctccatccgccgccccgagctcttcgccaagctcgtactcatcggcgcgtcgcccaggttcctgaacgaccacgactaccacggcgggttcgagctgccggagatccagcaggtgttcgacgcgatggcggccaactactcggcgtgggcgaccgggtacgccccgctggcggtgggcgcggacgtgccggcggcggtgcaggagttcagccgcaccctgttcaacatgcggccggacatctccctccacgtgtgccgcaccgtgttcaacaccgacctccgcggcgtgctgggcatggtgcggtccccctgcgtggtggtgcagaccacccgcgacgtctccgtcccggcctccgtcgccgcctacctcaaggcccacctcggcggccgcaccgccgtcgagttcctccagaccgagggccacctcccgcacctcagcgcccccggcctcctcgcgcaggtgctccgccgcgcgctcgcccggtactagcggagcgcctgccacctacggtcctggtggtcatcggtattttttaccgcctcgatttaccccgtgccgagaccggggacggggatcagataatgtggcgacccgcgccgtttgctgtgcgcgccatgactgtagactgtagtacgagtgtacgacttgttctggacttctggtacccgatttttttactgctttttaatggagagccgagcagtagcactggt

SEQ ID NO: 8423 - protein, 390 aa, Zea mays subsp. mays
  peptide (1)..(390): Ceres Seq. ID no. 12405408
  misc_feature (7)..(118): Pfam Name: Progesterone receptor Pfam Description: Progesterone receptor
  misc_feature (8)..(356): Homolog of NCBI NO: 22960097 NR Description: hypothetical protein [Rhodobacter sphaeroides]
  misc_feature (14)..(311): Homolog of NCBI NO: 29247944 NR Description: GLP_26_54603_52153 [Giardia lamblia ATCC 50803]
  misc_feature (2)..(320): Homolog of NCBI NO: 23018788 NR Description: hypothetical protein [Thermobifida fusca]
  misc_feature (40)..(301): Homolog of NCBI NO: 79833 NR Description: hypothetical 119.5K protein (uvrA region) -
  misc_feature (6)..(312): Homolog of NCBI NO: 23104656 NR Description: hypothetical protein [Azotobacter vinelandii]
  misc_feature (30)..(317): Homolog of NCBI NO: 29247944 NR Description: GLP_26_54603_52153 [Giardia lamblia ATCC 50803]
  misc_feature (5)..(358): Homolog of NCBI NO: 23018788 NR Description: hypothetical protein [Thermobifida fusca]
VLSSHPSHASVHAPTQPHQRQLRGAGVQLRRRGDGRGRRGGGQRRRTERRQAAADPQRAGRGQRRPRGGAVPRVRHGPVGVEPRAPLPHPRPPRGALRPRLRRQRQPGALRLPPLRHARLVRRRPPRHPRRAPHRALRLRRPLRLRHDRHPRLHPPPRALRQARTHRRVAQVPERPRLPRRVRAAGDPAGVRRDGGQLLGVGDRVRPAGGGRGRAGGGAGVQPHPVQHAAGHLPPRVPHRVQHRPPRRAGHGAVPLRGGADHPRRLRPGLRRRLPQGPPRRPHRRRVPPDRGPPPAPQRPRPPRAGAPPRARPVLAERLPPTVLVVIGIFYRLDLPRAETGDGDQIMWRPAPFAVRAMTVDCSTSVRLVLDFWYPIFLLLFNGEPSSSTG

SEQ ID NO: 8424 - protein, 314 aa, Zea mays subsp. mays
  peptide (1)..(314): Ceres Seq. ID no. 12405409
  misc_feature (92)..(309): Pfam Name: alpha/beta hydrolase fold Pfam Description: alpha/beta hydrolase fold
  misc_feature (52)..(313): Homolog of NCBI NO: 21593927 NR Description: unknown [Arabidopsis thaliana]
  misc_feature (52)..(313): Homolog of NCBI NO: 18396732 NR Description: expressed protein; protein id: At3g03990.1, by cDNA: 6052., supported by cDNA: gi_17381266, supported by gi_20453358 [Arabidopsis thaliana]
  misc_feature (172)..(309): Homolog of NCBI NO: 40736991 NR Description: putative hydrolases [Oryza sativa (japonica
  misc_feature (57)..(173): Homolog of NCBI NO: 40736991 NR Description: putative hydrolases [Oryza sativa (japonica
  misc_feature (57)..(309): Homolog of NCBI NO: 15235567 NR Description: putative protein; protein id: At4g37470.1, by cDNA: gi_15810302, supported by cDNA: gi_20259140 [Arabidopsis
  misc_feature (57)..(308): Homolog of NCBI NO: 24216360 NR Description: Predicted hydrolases or acyltransferases, hydrolase superfamily [Leptospira interrogans serovar lai str. >gi|24197640|gb|AAN50859.1|AE011521_5 Predicted hydrolases or
  misc_feature (52)..(311): Homolog of NCBI NO: 15230110 NR Description: unknown protein; protein id: At3g24420.1
  misc_feature (56)..(312): Homolog of NCBI NO: 34912326 NR Description: P0451D05.26 [Oryza sativa (japonica
  misc_feature (58)..(312): Homolog of NCBI NO: 22298700 NR Description: ORF_ID:tlr1157~hypothetical protein
  misc_feature (57)..(307): Homolog of NCBI NO: 16080463 NR Description: similar to hydrolase [Bacillus subtilis]
SSPPIHLMLRSTHPPSPTSGSSAAPASSSDAAAMVGGGAAAGSGGAPSGAKLLQILNVRVVGSGDRVVVLSHGFGTDQSAWSRVLPYLTRDHRVVLYDLVCAGSVNPEHFDFRRYDTLDSYVDDLLAILDALRIARCAFVGHSVSAMIGILASIRRPELFAKLVLIGASPRFLNDHDYHGGFELPEIQQVFDAMAANYSAWATGYAPLAVGADVPAAVQEFSRTLFNMRPDISLHVCRTVFNTDLRGVLGMVRSPCVVVQTTRDVSVPASVAAYLKAHLGGRTAVEFLQTEGHLPHLSAPGLLAQVLRRALARY

SEQ ID NO: 8425 - protein, 307 aa, Zea mays subsp. mays
  peptide (1)..(307): Ceres Seq. ID no. 12405410
  misc_feature (85)..(302): Pfam Name: alpha/beta hydrolase fold Pfam Description: alpha/beta hydrolase fold
  misc_feature (45)..(306): Homolog of NCBI NO: 21593927 NR Description: unknown [Arabidopsis thaliana]
  misc_feature (45)..(306): Homolog of NCBI NO: 18396732 NR Description: expressed protein; protein id: At3g03990.1, by cDNA: 6052., supported by cDNA: gi_17381266, supported by gi_20453358 [Arabidopsis thaliana]
  misc_feature (165)..(302): Homolog of NCBI NO: 40736991 NR Description: putative hydrolases [Oryza sativa (japonica
  misc_feature (50)..(166): Homolog of NCBI NO: 40736991 NR Description: putative hydrolases [Oryza sativa (japonica
  misc_feature (50)..(302): Homolog of NCBI NO: 15235567 NR Description: putative protein; protein id: At4g37470.1, by cDNA: gi_15810302, supported by cDNA: gi_20259140 [Arabidopsis
  misc_feature (50)..(301): Homolog of NCBI NO: 24216360 NR Description: Predicted hydrolases or acyltransferases, hydrolase superfamily [Leptospira interrogans serovar lai str. >gi|24197640|gb|AAN50859.1|AE011521_5 Predicted hydrolases or
  misc_feature (45)..(304): Homolog of NCBI NO: 15230110 NR Description: unknown protein; protein id: At3g24420.1
  misc_feature (49)..(305): Homolog of NCBI NO: 34912326 NR Description: P0451D05.26 [Oryza sativa (japonica
  misc_feature (51)..(305): Homolog of NCBI NO: 22298700 NR Description: ORF_ID:tlr1157~hypothetical protein
  misc_feature (50)..(300): Homolog of NCBI NO: 16080463 NR Description: similar to hydrolase [Bacillus subtilis]
MLRSTHPPSPTSGSSAAPASSSDAAAMVGGGAAAGSGGAPSGAKLLQILNVRVVGSGDRVVVLSHGFGTDQSAWSRVLPYLTRDHRVVLYDLVCAGSVNPEHFDFRRYDTLDSYVDDLLAILDALRIARCAFVGHSVSAMIGILASIRRPELFAKLVLIGASPRFLNDHDYHGGFELPEIQQVFDAMAANYSAWATGYAPLAVGADVPAAVQEFSRTLFNMRPDISLHVCRTVFNTDLRGVLGMVRSPCVVVQTTRDVSVPASVAAYLKAHLGGRTAVEFLQTEGHLPHLSAPGLLAQVLRRALARY

SEQ ID NO: 8426 - DNA, 1723 bp, Zea mays subsp. mays
  misc_feature (1)..(1723): Ceres Seq. ID no. 12361433
  misc_feature: MA Experiment ID: 108504 Result: Down-regulated in Transcription
  misc_feature: MA Experiment 108504 PARAMETER Experiment Name: Zm_Drought_P Parameter: Age (day) Value: 8
  misc_feature: MA Experiment 108504 PARAMETER Experiment Name: Zm_Drought_P Parameter: Organism Value: Zea mays
  misc_feature: MA Experiment 108504 PARAMETER Experiment Name: Zm_Drought_P Parameter: Plant Line Value: 35A19
  misc_feature: MA Experiment 108504 PARAMETER Experiment Name: Zm_Drought_P Parameter: Timepoint (hr) Value: 12
  misc_feature: MA Experiment 108504 PARAMETER Experiment Name: Zm_Drought_P Parameter: Tissue Value: Aerial
  misc_feature: MA Experiment 108504 PARAMETER Experiment Name: Zm_Drought_P Parameter: Treatment Value: Drought vs. No Drought
  misc_feature: MA Experiment ID: 108529 Result: Up-regulated in Transcription
  misc_feature: MA Experiment 108529 PARAMETER Experiment Name: Zm_Imbibed_Seeds_P Parameter: Age (day) Value: 5 vs. 2
  misc_feature: MA Experiment 108529 PARAMETER Experiment Name: Zm_Imbibed_Seeds_P Parameter: Organism Value: Zea mays
  misc_feature: MA Experiment 108529 PARAMETER Experiment Name: Zm_Imbibed_Seeds_P Parameter: Plant Line Value: 35A19
  misc_feature: MA Experiment 108529 PARAMETER Experiment Name: Zm_Imbibed_Seeds_P Parameter: Tissue Value: Roots vs. Embryo
  misc_feature: MA Experiment ID: 108535 Result: Down-regulated in Transcription
  misc_feature: MA Experiment 108535 PARAMETER Experiment Name: Zm_Meristem_P Parameter: Age (day) Value: 8
  misc_feature: MA Experiment 108535 PARAMETER Experiment Name: Zm_Meristem_P Parameter: Organism Value: Zea mays
  misc_feature: MA Experiment 108535 PARAMETER Experiment Name: Zm_Meristem_P Parameter: Plant Line Value: 35A19
  misc_feature: MA Experiment 108535 PARAMETER Experiment Name: Zm_Meristem_P Parameter: Tissue Value: Root Meristem vs. Above Root Meristem
  misc_feature: MA Experiment ID: 108546 Result: Up-regulated in Transcription
  misc_feature: MA Experiment 108546 PARAMETER Experiment Name: Zm_Imbibed_Seeds_P Parameter: Age (day) Value: 3 vs. 2
  misc_feature: MA Experiment 108546 PARAMETER Experiment Name: Zm_Imbibed_Seeds_P Parameter: Organism Value: Zea mays
  misc_feature: MA Experiment 108546 PARAMETER Experiment Name: Zm_Imbibed_Seeds_P Parameter: Plant Line Value: 35A19
  misc_feature: MA Experiment 108546 PARAMETER Experiment Name: Zm_Imbibed_Seeds_P Parameter: Tissue Value: Roots vs. Embryo
  misc_feature: MA Experiment ID: 108556 Result: Down-regulated in Transcription
  misc_feature: MA Experiment 108556 PARAMETER Experiment Name: Zm_Drought_P Parameter: Age (day) Value: 9
  misc_feature: MA Experiment 108556 PARAMETER Experiment Name: Zm_Drought_P Parameter: Organism Value: Zea mays
  misc_feature: MA Experiment 108556 PARAMETER Experiment Name: Zm_Drought_P Parameter: Plant Line Value: 35A19
  misc_feature: MA Experiment 108556 PARAMETER Experiment Name: Zm_Drought_P Parameter: Timepoint (hr) Value: 24
  misc_feature: MA Experiment 108556 PARAMETER Experiment Name: Zm_Drought_P Parameter: Tissue Value: Aerial
  misc_feature: MA Experiment 108556 PARAMETER Experiment Name: Zm_Drought_P Parameter: Treatment Value: Drought vs. No Drought
  misc_feature: MA Experiment ID: 20000108 Result: Down-regulated in Transcription
  misc_feature: MA Experiment 20000108 PARAMETER Experiment Name: Zm_Root-Tips_P Parameter: Age (day) Value: 12
  misc_feature: MA Experiment 20000108 PARAMETER Experiment Name: Zm_Root-Tips_P Parameter: Organism Value: Zea mays
  misc_feature: MA Experiment 20000108 PARAMETER Experiment Name: Zm_Root-Tips_P Parameter: Tissue Value: Root tips vs. Root mid region    35
  misc_feature: MA Experiment 20000108 PARAMETER Experiment Name: Zm_Root-Tips_P Parameter: Tissue Value: Root tips vs. Root mid region   Sequence Listing-Misc Features (4)
  misc_feature: MA Experiment ID: 20000535 Result: Down-regulated in Transcription
  misc_feature: MA Experiment 20000535 PARAMETER Experiment Name: Zm_Hybrid_Seed_Dev_P Parameter: DAP Value: 30 vs. 12
  misc_feature: MA Experiment 20000535 PARAMETER Experiment Name: Zm_Hybrid_Seed_Dev_P Parameter: Organism Value: Zea mays
  misc_feature: MA Experiment 20000535 PARAMETER Experiment Name: Zm_Hybrid_Seed_Dev_P Parameter: Plant Line Value: 35A19
  misc_feature: MA Experiment 20000535 PARAMETER Experiment Name: Zm_Hybrid_Seed_Dev_P Parameter: Tissue Value: Embryo vs. Unfert Floret
gcacgagaccattacctagaacatcctaatcgaaaagccctttccctcttccctcccgtcgtcttcactccgacgcctcccctgccgccaccgctattgcctattgggagggcggtccctgtcgcgcgcgacgccgaggcttcgtgacggggacacgctgctaatttgtagcgcaccacacgccggctcggcctcggttgcgcctcgcctcgcctcgccaggggattactggtgggcagcgctcgtgcttgttgtgcagccggtgtgcgtctgctcgcggcctgcggcgatggggcaggacctcgtcgagatccacccgcgcgagctccagttcacatttgaggtgaagaaacaaagttcatgtgttgtctgcctaaccaacaagtccaacgaatatgttgcttttaaggttaaaacgacatcccctaaaagatactgtgttcgaccaaataccggggttatccttccgaggaaaacatgtgaattcacagttaccatgcaagcgctccggactgctccaccagacatgcaattaaaggacaagtttttagtacagaccacagttgttccttatggcacatctgatgaagaactcgttcctgccgttttctccaaagaaactggcagatacatcgaggaaagcaaattgagagttgttcttgttagttcataccaatccctcgaagagcaacccactaatggaattcatgacactgagccagctgttgaagttcctttactgaaagagatgccaaatttagggagcgaagtaccagatgttgcaaaagaaattcctgcccctctggtacaaggtccagcaattgtgaccggaataccttcacctgtcaaagaggttccaggcctgagagaaattcctgtgccactgaacgaagcaccaactttattggcagaatttccttcccctcaaaaagatccctctgctattacagttgaacatgcctctaatgttacaattgagcatgcccctgctatttccattgaatccccacctttgaaacaaagtgttccagtttttaaggaatctcctctgaaacaaagcgttgcagtttttaaggaatctcctcctttgaaacaaagcatttcagtttttaaggaatctcctccactggaggaaactactcctaaagaagctgttatgctaagtgaccgagggcttttcaatgtgcagaatcatcaattatcccatgtaacagaagatgttcagaatatgaaatcaaagctcaacaatcttgaatcaaaattggaagaggctgaaaagatgataataaggctaagagaagagagcagaaataccacccaggagcgggatgagctacagcaagaaatggtattcctaagaaagaagggaaccgcaaggagtcaaatgggtttccccctgctctttgtggtgtacgtggcgcttcttggtacctgtatcggttacctgctccgcatatgagttccaaacttcaaaaaagttcagcagatgggatatgcttcgtatgtgggcaagacaattgaacggcagttgcactccaaaatgttgaggggtgaatttattagcattattagttcggaacttcatatggttttgcacataacagcagtgccaaactaccatctgcctgtatgtatagaacagttactttttttcgcgttttatagaacccacccaaaagatgtctgctgcctcgtagactaacctgggattcttcttccatcc

SEQ ID NO: 8427 - protein, 389 aa, Zea mays subsp. mays
  peptide (1)..(389): Ceres Seq. ID no. 12361434
  misc_feature (1)..(389): Homolog of NCBI NO: 34907216 NR Description: P0504E02.2 [Oryza sativa (japonica
  misc_feature (1)..(388): Homolog of NCBI NO: 30680831 NR Description: VAMP (vesicle-associated membrane
  misc_feature (4)..(125): Homolog of NCBI NO: 18411240 NR Description: putative proline-rich protein; protein id: supported by cDNA: 33482., supported by cDNA: gi_15292934
  misc_feature (324)..(387): Homolog of NCBI NO: 18411240 NR Description: putative proline-rich protein; protein id: supported by cDNA: 33482., supported by cDNA: gi_15292934
  misc_feature (2)..(129): Homolog of NCBI NO: 11288307 NR Description: 27k vesicle-associated membrane
  misc_feature (265)..(388): Homolog of NCBI NO: 11288307 NR Description: 27k vesicle-associated membrane
  misc_feature (4)..(125): Homolog of NCBI NO: 21592874 NR Description: putative proline-rich protein [Arabidopsis
  misc_feature (324)..(387): Homolog of NCBI NO: 21592874 NR Description: putative proline-rich protein [Arabidopsis
  misc_feature (4)..(141): Homolog of NCBI NO: 21554053 NR Description: putative VAMP-associated protein [Arabidopsis
  misc_feature (322)..(388): Homolog of NCBI NO: 21554053 NR Description: putative VAMP-associated protein [Arabidopsis
MGQDLVEIHPRELQFTFEVKKQSSCVVCLTNKSNEYVAFKVKTTSPKRYCVRPNTGVILPRKTCEFTVTMQALRTAPPDMQLKDKFLVQTTVVPYGTSDEELVPAVFSKETGRYIEESKLRVVLVSSYQSLEEQPTNGIHDTEPAVEVPLLKEMPNLGSEVPDVAKEIPAPLVQGPAIVTGIPSPVKEVPGLREIPVPLNEAPTLLAEFPSPQKDPSAITVEHASNVTIEHAPAISIESPPLKQSVPVFKESPLKQSVAVFKESPPLKQSISVFKESPPLEETTPKEAVMLSDRGLFNVQNHQLSHVTEDVQNMKSKLNNLESKLEEAEKMIIRLREESRNTTQERDELQQEMVFLRKKGTARSQMGFPLLFVVYVALLGTCIGYLLRI

SEQ ID NO: 8428 - protein, 320 aa, Zea mays subsp. mays
  peptide (1)..(320): Ceres Seq. ID no. 12361435
  misc_feature (1)..(320): Homolog of NCBI NO: 34907216 NR Description: P0504E02.2 [Oryza sativa (japonica
  misc_feature (1)..(319): Homolog of NCBI NO: 30680831 NR Description: VAMP (vesicle-associated membrane
  misc_feature (1)..(56): Homolog of NCBI NO: 18411240 NR Description: putative proline-rich protein; protein id: supported by cDNA: 33482., supported by cDNA: gi_15292934
  misc_feature (255)..(318): Homolog of NCBI NO: 18411240 NR Description: putative proline-rich protein; protein id: supported by cDNA: 33482., supported by cDNA: gi_15292934
  misc_feature (1)..(60): Homolog of NCBI NO: 11288307 NR Description: 27k vesicle-associated membrane
  misc_feature (196)..(319): Homolog of NCBI NO: 11288307 NR Description: 27k vesicle-associated membrane
  misc_feature (1)..(56): Homolog of NCBI NO: 21592874 NR Description: putative proline-rich protein [Arabidopsis
  misc_feature (255)..(318): Homolog of NCBI NO: 21592874 NR Description: putative proline-rich protein [Arabidopsis
  misc_feature (1)..(72): Homolog of NCBI NO: 21554053 NR Description: putative VAMP-associated protein [Arabidopsis
  misc_feature (253)..(319): Homolog of NCBI NO: 21554053 NR Description: putative VAMP-associated protein [Arabidopsis
MQALRTAPPDMQLKDKFLVQTTVVPYGTSDEELVPAVFSKETGRYIEESKLRVVLVSSYQSLEEQPTNGIHDTEPAVEVPLLKEMPNLGSEVPDVAKEIPAPLVQGPAIVTGIPSPVKEVPGLREIPVPLNEAPTLLAEFPSPQKDPSAITVEHASNVTIEHAPAISIESPPLKQSVPVFKESPLKQSVAVFKESPPLKQSISVFKESPPLEETTPKEAVMLSDRGLFNVQNHQLSHVTEDVQNMKSKLNNLESKLEEAEKMIIRLREESRNTTQERDELQQEMVFLRKKGTARSQMGFPLLFVVYVALLGTCIGYLLRI

SEQ ID NO: 8429 - protein, 310 aa, Zea mays subsp. mays
  peptide (1)..(310): Ceres Seq. ID no. 12361436
  misc_feature (1)..(310): Homolog of NCBI NO: 34907216 NR Description: P0504E02.2 [Oryza sativa (japonica
  misc_feature (1)..(309): Homolog of NCBI NO: 30680831 NR Description: VAMP (vesicle-associated membrane
  misc_feature (1)..(46): Homolog of NCBI NO: 18411240 NR Description: putative proline-rich protein; protein id: supported by cDNA: 33482., supported by cDNA: gi_15292934
  misc_feature (245)..(308): Homolog of NCBI NO: 18411240 NR Description: putative proline-rich protein; protein id: supported by cDNA: 33482., supported by cDNA: gi_15292934
  misc_feature (1)..(50): Homolog of NCBI NO: 11288307 NR Description: 27k vesicle-associated membrane
  misc_feature (186)..(309): Homolog of NCBI NO: 11288307 NR Description: 27k vesicle-associated membrane
  misc_feature (1)..(46): Homolog of NCBI NO: 21592874 NR Description: putative proline-rich protein [Arabidopsis
  misc_feature (245)..(308): Homolog of NCBI NO: 21592874 NR Description: putative proline-rich protein [Arabidopsis
  misc_feature (1)..(62): Homolog of NCBI NO: 21554053 NR Description: putative VAMP-associated protein [Arabidopsis
  misc_feature (243)..(309): Homolog of NCBI NO: 21554053 NR Description: putative VAMP-associated protein [Arabidopsis
MQLKDKFLVQTTVVPYGTSDEELVPAVFSKETGRYIEESKLRVVLVSSYQSLEEQPTNGIHDTEPAVEVPLLKEMPNLGSEVPDVAKEIPAPLVQGPAIVTGIPSPVKEVPGLREIPVPLNEAPTLLAEFPSPQKDPSAITVEHASNVTIEHAPAISIESPPLKQSVPVFKESPLKQSVAVFKESPPLKQSISVFKESPPLEETTPKEAVMLSDRGLFNVQNHQLSHVTEDVQNMKSKLNNLESKLEEAEKMIIRLREESRNTTQERDELQQEMVFLRKKGTARSQMGFPLLFVVYVALLGTCIGYLLRI

SEQ ID NO: 8430 - DNA, 1770 bp, Zea mays subsp. mays
  misc_feature (1)..(1770): Ceres Seq. ID no. 12405403
  misc_feature: MA Experiment ID: 20000487 Result: Up-regulated in Transcription
  misc_feature: MA Experiment 20000487 PARAMETER Experiment Name: Zm_50mM_NH4NO3_L_to_H_P Parameter: Organism Value: Zea mays
  misc_feature: MA Experiment 20000487 PARAMETER Experiment Name: Zm_50mM_NH4NO3_L_to_H_P Parameter: Timepoint (hr) Value: 4
  misc_feature: MA Experiment 20000487 PARAMETER Experiment Name: Zm_50mM_NH4NO3_L_to_H_P Parameter: Tissue Value: Leaves
  misc_feature: MA Experiment 20000487 PARAMETER Experiment Name: Zm_50mM_NH4NO3_L_to_H_P Parameter: Treatment Value: 50mM NH4NO3 vs. 100mM Mannitol
aacacctccctcttttcctcgagcggtctaaccccaaaccctaaaccatggcgccgccggccccatccgtcggtccccgcctcctactccgccgcctcctctctacggctaccgaagcggcggcggagacacctgcgcccaccgcccccagctccgccgccgccgcgaagccggcgaaacaggacccgaggctgctctaccgtcgtttgtcggcgcttggaagcgccggggaggggagcgtgtcgcgggttttgaacaagtgggtgcgggagggcggcgcgacgcgaagcgacgacctcgtcaagcatgtcaaggagctccgcaagtacaagcgtcacgcccacgccctcgagttgatggattggatggtcaatgcaaggggtatgaacatgtcacacactaaccatgcaatacgtctggaactcatctataaagtgcgtggtcttgaggcagctgagaattattttgctaaccttcctgatccagcgaaaaatcatcgaacttacggctcccttcttagttgttattgctcagcaaaaatggaagagaaagcaacaaatctctaccgccagatggatgaacttggcatctggtccagtacactacccatcaacaatcttatgtccctttacatgaagttagaccagtataggaaggttgttagtctctttgaggagatgaaactgaagaatgttaaaccgaatagcctcacatgctgcattttaatgaccagctatgcagcattgaacaagatagatgacattgaagaacttctaacaaatggtagaaaaagatgtgactcttgggtggtctgcatacagcacacttgcttctatctatgtaaatgctggacaatttggaaaagcagaatctgctctgaagaaacttgagggccttatcagtgctcatgatgacagacagccttttgatttccttctgagcctatacgcttcactaggaaatttgagcgaggtcaatagggtatggaatgtgataaagtccaaattctcgaaggtaactaacacaagctaccttggcatgcttcacgctctttacaagctcaatgatattgaccgtatgaagcagatctatatggagtgggaatctaattatgaaacctttgatgtaaagctgacgaatatgatgattcgcagccatctgaaggttggcatgaccgaggaagcagaaatgttggtggagaaggtcaaggaaaatggtgcagagtttgacaccaaaacatgtgagttgtttcttgatcactacatgggcactgaggacatgaactcagcactgaactggttagagaatatgactaaactctccaagaaagcagagaagctcgatcaggacaggatctacaagttccagaagtatttcgaagaacacaaggatgctgacggtgcagagaggttctgcaactgcctgaggacgctagggtgcattgacgggaaagcatacgagtctctcttacgcacatacttggcagccggtaagaaaagctgttcactccgccaacagataaaaaacgataaggttgagatctgctatgacattgggaagctatctcaagaggttgggcgacaaggggcgatgagatacatatttatcttcgtttttaatttgagagagattagttctgttgatcctgtacgtccatgagcatcagaaaccaaatgtcggtccaacggttgaaaatgtatcagttctttcgttgttcatgaaaaggatagctcatggctgggctggtatcgttccggcttttgcgttcct

SEQ ID NO: 8431 - protein, 292 aa, Zea mays subsp. mays
  peptide (1)..(292): Ceres Seq. ID no. 12405404
  misc_feature (1)..(230): Homolog of NCBI NO: 34905486 NR Description: P0682B08.18 [Oryza sativa (japonica
  misc_feature (10)..(269): Homolog of NCBI NO: 34905490 NR Description: P0682B08.20 [Oryza sativa (japonica
  misc_feature (3)..(252): Homolog of NCBI NO: 18411800 NR Description: expressed protein; protein id: At4g01990.1, by cDNA: gi_14517493, supported by cDNA: gi_16323353 [Arabidopsis >gi|14517494|gb|AAK62637.1| AT4g01990/T7B11_26 [Arabidopsis
  misc_feature (3)..(252): Homolog of NCBI NO: 25407143 NR Description: hypothetical protein AT4g01990 [imported] - thaliana >gi|4558568|gb|AAD22661.1|AC007138_25 hypothetical [Arabidopsis thaliana] >gi|7268583|emb|CAB80692.1| hypothetical
  misc_feature (10)..(265): Homolog of NCBI NO: 15217734 NR Description: hypothetical protein; protein id: At1g02370.1, by cDNA: gi_17529323 [Arabidopsis thaliana]
  misc_feature (10)..(265): Homolog of NCBI NO: 17529324 NR Description: unknown protein [Arabidopsis thaliana]
  misc_feature (10)..(267): Homolog of NCBI NO: 15219808 NR Description: hypothetical protein; protein id: At1g60770.1
  misc_feature (3)..(254): Homolog of NCBI NO: 15235508 NR Description: hypothetical protein; protein id: At4g02820.1, by cDNA: gi_17064737 [Arabidopsis thaliana]
  misc_feature (3)..(254): Homolog of NCBI NO: 17064738 NR Description: Unknown protein [Arabidopsis thaliana]
  misc_feature (1)..(230): Homolog of NCBI NO: 22329290 NR Description: hypothetical protein; protein id: At1g02150.1, by cDNA: gi_20453084 [Arabidopsis thaliana]
MVEKDVTLGWSAYSTLASIYVNAGQFGKAESALKKLEGLISAHDDRQPFDFLLSLYASLGNLSEVNRVWNVIKSKFSKVTNTSYLGMLHALYKLNDIDRMKQIYMEWESNYETFDVKLTNMMIRSHLKVGMTEEAEMLVEKVKENGAEFDTKTCELFLDHYMGTEDMNSALNWLENMTKLSKKAEKLDQDRIYKFQKYFEEHKDADGAERFCNCLRTLGCIDGKAYESLLRTYLAAGKKSCSLRQQIKNDKVEICYDIGKLSQEVGRQGAMRYIFIFVFNLREISSVDPVRP

SEQ ID NO: 8432 - protein, 280 aa, Zea mays subsp. mays
  peptide (1)..(280): Ceres Seq. ID no. 12405405
  misc_feature (151)..(185): Pfam Name: PPR repeat Pfam Description: PPR repeat
  misc_feature (78)..(245): Homolog of NCBI NO: 34905486 NR Description: P0682B08.18 [Oryza sativa (japonica
  misc_feature (17)..(243): Homolog of NCBI NO: 34905490 NR Description: P0682B08.20 [Oryza sativa (japonica
  misc_feature (13)..(243): Homolog of NCBI NO: 18411800 NR Description: expressed protein; protein id: At4g01990.1, by cDNA: gi_14517493, supported by cDNA: gi_16323353 [Arabidopsis >gi|14517494|gb|AAK62637.1| AT4g01990/T7B11_26 [Arabidopsis
  misc_feature (13)..(243): Homolog of NCBI NO: 25407143 NR Description: hypothetical protein AT4g01990 [imported] - thaliana >gi|4558568|gb|AAD22661.1|AC007138_25 hypothetical [Arabidopsis thaliana] >gi|7268583|emb|CAB80692.1| hypothetical
  misc_feature (19)..(243): Homolog of NCBI NO: 15217734 NR Description: hypothetical protein; protein id: At1g02370.1, by cDNA: gi_17529323 [Arabidopsis thaliana]
  misc_feature (19)..(243): Homolog of NCBI NO: 17529324 NR Description: unknown protein [Arabidopsis thaliana]
  misc_feature (50)..(264): Homolog of NCBI NO: 15219808 NR Description: hypothetical protein; protein id: At1g60770.1
  misc_feature (7)..(279): Homolog of NCBI NO: 15235508 NR Description: hypothetical protein; protein id: At4g02820.1, by cDNA: gi_17064737 [Arabidopsis thaliana]
  misc_feature (7)..(279): Homolog of NCBI NO: 17064738 NR Description: Unknown protein [Arabidopsis thaliana]
  misc_feature (50)..(240): Homolog of NCBI NO: 22329290 NR Description: hypothetical protein; protein id: At1g02150.1, by cDNA: gi_20453084 [Arabidopsis thaliana]
MAPPAPSVGPRLLLRRLLSTATEAAAETPAPTAPSSAAAAKPAKQDPRLLYRRLSALGSAGEGSVSRVLNKWVREGGATRSDDLVKHVKELRKYKRHAHALELMDWMVNARGMNMSHTNHAIRLELIYKVRGLEAAENYFANLPDPAKNHRTYGSLLSCYCSAKMEEKATNLYRQMDELGIWSSTLPINNLMSLYMKLDQYRKVVSLFEEMKLKNVKPNSLTCCILMTSYAALNKIDDIEELLTNGRKRCDSWVVCIQHTCFYLCKCWTIWKSRICSEET

SEQ ID NO: 8433 - protein, 206 aa, Zea mays subsp. mays
  peptide (1)..(206): Ceres Seq. ID no. 12405406
  misc_feature (1)..(144): Homolog of NCBI NO: 34905486 NR Description: P0682B08.18 [Oryza sativa (japonica
  misc_feature (1)..(183): Homolog of NCBI NO: 34905490 NR Description: P0682B08.20 [Oryza sativa (japonica
  misc_feature (1)..(166): Homolog of NCBI NO: 18411800 NR Description: expressed protein; protein id: At4g01990.1, by cDNA: gi_14517493, supported by cDNA: gi_16323353 [Arabidopsis >gi|14517494|gb|AAK62637.1| AT4g01990/T7B11_26 [Arabidopsis
  misc_feature (1)..(166): Homolog of NCBI NO: 25407143 NR Description: hypothetical protein AT4g01990 [imported] - thaliana >gi|4558568|gb|AAD22661.1|AC007138_25 hypothetical [Arabidopsis thaliana] >gi|7268583|emb|CAB80692.1| hypothetical
  misc_feature (1)..(179): Homolog of NCBI NO: 15217734 NR Description: hypothetical protein; protein id: At1g02370.1, by cDNA: gi_17529323 [Arabidopsis thaliana]
  misc_feature (1)..(179): Homolog of NCBI NO: 17529324 NR Description: unknown protein [Arabidopsis thaliana]
  misc_feature (1)..(181): Homolog of NCBI NO: 15219808 NR Description: hypothetical protein; protein id: At1g60770.1
  misc_feature (1)..(168): Homolog of NCBI NO: 15235508 NR Description: hypothetical protein; protein id: At4g02820.1, by cDNA: gi_17064737 [Arabidopsis thaliana]
  misc_feature (1)..(168): Homolog of NCBI NO: 17064738 NR Description: Unknown protein [Arabidopsis thaliana]
  misc_feature (1)..(144): Homolog of NCBI NO: 22329290 NR Description: hypothetical protein; protein id: At1g02150.1, by cDNA: gi_20453084 [Arabidopsis thaliana]
MLHALYKLNDIDRMKQIYMEWESNYETFDVKLTNMMIRSHLKVGMTEEAEMLVEKVKENGAEFDTKTCELFLDHYMGTEDMNSALNWLENMTKLSKKAEKLDQDRIYKFQKYFEEHKDADGAERFCNCLRTLGCIDGKAYESLLRTYLAAGKKSCSLRQQIKNDKVEICYDIGKLSQEVGRQGAMRYIFIFVFNLREISSVDPVRP

SEQ ID NO: 8434 - DNA, 1389 bp, Zea mays subsp. mays
  misc_feature (1)..(1389): Ceres Seq. ID no. 12405399
  misc_feature: MA Experiment ID: 108515 Result: Up-regulated in Transcription
  misc_feature: MA Experiment 108515 PARAMETER Experiment Name: Zm_2mM_SA_P Parameter: Age (day) Value: 8
  misc_feature: MA Experiment 108515 PARAMETER Experiment Name: Zm_2mM_SA_P Parameter: Organism Value: Zea mays
  misc_feature: MA Experiment 108515 PARAMETER Experiment Name: Zm_2mM_SA_P Parameter: Plant Line Value: 35A19
  misc_feature: MA Experiment 108515 PARAMETER Experiment Name: Zm_2mM_SA_P Parameter: Timepoint (hr) Value: 12
  misc_feature: MA Experiment 108515 PARAMETER Experiment Name: Zm_2mM_SA_P Parameter: Tissue Value: Aerial
  misc_feature: MA Experiment 108515 PARAMETER Experiment Name: Zm_2mM_SA_P Parameter: Treatment Value: 2mM SA vs. No Treatment
  misc_feature: MA Experiment ID: 108523 Result: Up-regulated in Transcription
  misc_feature: MA Experiment 108523 PARAMETER Experiment Name: Zm_42deg_Heat_P Parameter: Age (day) Value: 8
  misc_feature: MA Experiment 108523 PARAMETER Experiment Name: Zm_42deg_Heat_P Parameter: Organism Value: Zea mays
  misc_feature: MA Experiment 108523 PARAMETER Experiment Name: Zm_42deg_Heat_P Parameter: Plant Line Value: 35A19
  misc_feature: MA Experiment 108523 PARAMETER Experiment Name: Zm_42deg_Heat_P Parameter: Temperature (deg C) Value: 42 vs. 22
  misc_feature: MA Experiment 108523 PARAMETER Experiment Name: Zm_42deg_Heat_P Parameter: Timepoint (hr) Value: 6
  misc_feature: MA Experiment 108523 PARAMETER Experiment Name: Zm_42deg_Heat_P Parameter: Tissue Value: Aerial
  misc_feature: MA Experiment ID: 108527 Result: Up-regulated in Transcription
  misc_feature: MA Experiment 108527 PARAMETER Experiment Name: Zm_5mM_NO_P Parameter: Age (day) Value: 8
  misc_feature: MA Experiment 108527 PARAMETER Experiment Name: Zm_5mM_NO_P Parameter: Organism Value: Zea mays
  misc_feature: MA Experiment 108527 PARAMETER Experiment Name: Zm_5mM_NO_P Parameter: Plant Line Value: 35A19
  misc_feature: MA Experiment 108527 PARAMETER Experiment Name: Zm_5mM_NO_P Parameter: Timepoint (hr) Value: 6
  misc_feature: MA Experiment 108527 PARAMETER Experiment Name: Zm_5mM_NO_P Parameter: Tissue Value: Aerial
  misc_feature: MA Experiment 108527 PARAMETER Experiment Name: Zm_5mM_NO_P Parameter: Treatment Value: 5mM NO vs. No Treatment
  misc_feature: MA Experiment ID: 108528 Result: Down-regulated in Transcription
  misc_feature: MA Experiment 108528 PARAMETER Experiment Name: Zm_Imbibed_Seeds_P Parameter: Age (day) Value: 5 vs. 2
  misc_feature: MA Experiment 108528 PARAMETER Experiment Name: Zm_Imbibed_Seeds_P Parameter: Organism Value: Zea mays
  misc_feature: MA Experiment 108528 PARAMETER Experiment Name: Zm_Imbibed_Seeds_P Parameter: Plant Line Value: 35A19
  misc_feature: MA Experiment 108528 PARAMETER Experiment Name: Zm_Imbibed_Seeds_P Parameter: Tissue Value: Aerial vs. Embryo
  misc_feature: MA Experiment ID: 108530 Result: Down-regulated in Transcription
  misc_feature: MA Experiment 108530 PARAMETER Experiment Name: Zm_Imbibed_Seeds_P Parameter: Age (day) Value: 6 vs. 2
  misc_feature: MA Experiment 108530 PARAMETER Experiment Name: Zm_Imbibed_Seeds_P Parameter: Organism Value: Zea mays
  misc_feature: MA Experiment 108530 PARAMETER Experiment Name: Zm_Imbibed_Seeds_P Parameter: Plant Line Value: 35A19
  misc_feature: MA Experiment 108530 PARAMETER Experiment Name: Zm_Imbibed_Seeds_P Parameter: Tissue Value: Aerial vs. Embryo
  misc_feature: MA Experiment ID: 108534 Result: Down-regulated in Transcription
  misc_feature: MA Experiment 108534 PARAMETER Experiment Name: Zm_4deg_Cold_P Parameter: Age (hr) Value: 8
  misc_feature: MA Experiment 108534 PARAMETER Experiment Name: Zm_4deg_Cold_P Parameter: Organism Value: Zea mays
  misc_feature: MA Experiment 108534 PARAMETER Experiment Name: Zm_4deg_Cold_P Parameter: Plant Line Value: 35A19
  misc_feature: MA Experiment 108534 PARAMETER Experiment Name: Zm_4deg_Cold_P Parameter: Temperature (deg C) Value: 4 vs. 22
  misc_feature: MA Experiment 108534 PARAMETER Experiment Name: Zm_4deg_Cold_P Parameter: Timepoint (hr) Value: 6
  misc_feature: MA Experiment 108534 PARAMETER Experiment Name: Zm_4deg_Cold_P Parameter: Tissue Value: Aerial
  misc_feature: MA Experiment ID: 108536 Result: Up-regulated in Transcription
  misc_feature: MA Experiment 108536 PARAMETER Experiment Name: Zm_Meristem_P Parameter: Age (day) Value: 8
  misc_feature: MA Experiment 108536 PARAMETER Experiment Name: Zm_Meristem_P Parameter: Organism Value: Zea mays
  misc_feature: MA Experiment 108536 PARAMETER Experiment Name: Zm_Meristem_P Parameter: Plant Line Value: 35A19
  misc_feature: MA Experiment 108536 PARAMETER Experiment Name: Zm_Meristem_P Parameter: Tissue Value: Shoot Meristem vs. Above Shoot Meristem
  misc_feature: MA Experiment ID: 108543 Result: Down-regulated in Transcription
  misc_feature: MA Experiment ID: 108559 Result: Up-regulated in Transcription
  misc_feature: MA Experiment 108559 PARAMETER Experiment Name: Zm_5mM_NO_P Parameter: Age (day) Value: 8
  misc_feature: MA Experiment 108559 PARAMETER Experiment Name: Zm_5mM_NO_P Parameter: Organism Value: Zea mays
  misc_feature: MA Experiment 108559 PARAMETER Experiment Name: Zm_5mM_NO_P Parameter: Plant Line Value: 35A19
  misc_feature: MA Experiment 108559 PARAMETER Experiment Name: Zm_5mM_NO_P Parameter: Timepoint (hr) Value: 12
  misc_feature: MA Experiment 108559 PARAMETER Experiment Name: Zm_5mM_NO_P Parameter: Tissue Value: Aerial
  misc_feature: MA Experiment 108559 PARAMETER Experiment Name: Zm_5mM_NO_P Parameter: Treatment Value: 5mM NO vs. No Treatment
  misc_feature: MA Experiment ID: 20000477 Result: Up-regulated in Transcription
  misc_feature: MA Experiment 20000477 PARAMETER Experiment Name: Zm_5mM_SA_P Parameter: Age (day) Value: 10
  misc_feature: MA Experiment 20000477 PARAMETER Experiment Name: Zm_5mM_SA_P Parameter: Organism Value: Zea mays
  misc_feature: MA Experiment 20000477 PARAMETER Experiment Name: Zm_5mM_SA_P Parameter: Plant Line Value: 35A19
  misc_feature: MA Experiment 20000477 PARAMETER Experiment Name: Zm_5mM_SA_P Parameter: Timepoint (hr) Value: 48
  misc_feature: MA Experiment 20000477 PARAMETER Experiment Name: Zm_5mM_SA_P Parameter: Tissue Value: Aerial
  misc_feature: MA Experiment 20000477 PARAMETER Experiment Name: Zm_5mM_SA_P Parameter: Treatment Value: 5mM SA vs. No Treatment
  misc_feature: MA Experiment ID: 20000478 Result: Up-regulated in Transcription
  misc_feature: MA Experiment 20000478 PARAMETER Experiment Name: Zm_5mM_SA_P Parameter: Age (day) Value: 11
  misc_feature: MA Experiment 20000478 PARAMETER Experiment Name: Zm_5mM_SA_P Parameter: Organism Value: Zea mays
  misc_feature: MA Experiment 20000478 PARAMETER Experiment Name: Zm_5mM_SA_P Parameter: Plant Line Value: 35A19
  misc_feature: MA Experiment 20000478 PARAMETER Experiment Name: Zm_5mM_SA_P Parameter: Timepoint (hr) Value: 72
  misc_feature: MA Experiment 20000478 PARAMETER Experiment Name: Zm_5mM_SA_P Parameter: Tissue Value: Aerial
  misc_feature: MA Experiment 20000478 PARAMETER Experiment Name: Zm_5mM_SA_P Parameter: Treatment Value: 5mM SA vs. No Treatment
  misc_feature: MA Experiment ID: 20000533 Result: Up-regulated in Transcription
  misc_feature: MA Experiment 20000533 PARAMETER Experiment Name: Zm_0.001percent_MeJA_P Parameter: Age (day) Value: 11
  misc_feature: MA Experiment 20000533 PARAMETER Experiment Name: Zm_0.001percent_MeJA_P Parameter: Organism Value: Zea mays
  misc_feature: MA Experiment 20000533 PARAMETER Experiment Name: Zm_0.001percent_MeJA_P Parameter: Plant Line Value: 35A19
  misc_feature: MA Experiment 20000533 PARAMETER Experiment Name: Zm_0.001percent_MeJA_P Parameter: Timepoint (hr) Value: 72
  misc_feature: MA Experiment 20000533 PARAMETER Experiment Name: Zm_0.001percent_MeJA_P Parameter: Tissue Value: Aerial
  misc_feature: MA Experiment 20000533 PARAMETER Experiment Name: Zm_0.001percent_MeJA_P Parameter: Treatment Value: 0.001percent MeJA vs. No Treatment
  misc_feature: MA Experiment ID: 20000535 Result: Up-regulated in Transcription
  misc_feature: MA Experiment 20000535 PARAMETER Experiment Name: Zm_Hybrid_Seed_Dev_P Parameter: DAP Value: 30 vs. 12
  misc_feature: MA Experiment 20000535 PARAMETER Experiment Name: Zm_Hybrid_Seed_Dev_P Parameter: Organism Value: Zea mays
  misc_feature: MA Experiment 20000535 PARAMETER Experiment Name: Zm_Hybrid_Seed_Dev_P Parameter: Plant Line Value: 35A19
  misc_feature: MA Experiment 20000535 PARAMETER Experiment Name: Zm_Hybrid_Seed_Dev_P Parameter: Tissue Value: Embryo vs. Unfert Floret
  misc_feature: MA Experiment ID: 20000626 Result: Up-regulated in Transcription
  misc_feature: MA Experiment 20000626 PARAMETER Experiment Name: Zm_Herbicide-Treatments_P Parameter: Timepoint (hr) Value: 12
  misc_feature: MA Experiment 20000626 PARAMETER Experiment Name: Zm_Herbicide-Treatments_P Parameter: Tissue Value: Aerial
  misc_feature: MA Experiment 20000626 PARAMETER Experiment Name: Zm_Herbicide-Treatments_P Parameter: Treatment Value: Roundup vs. No Treatment
  misc_feature: MA Experiment ID: 20000627 Result: Up-regulated in Transcription
  misc_feature: MA Experiment 20000627 PARAMETER Experiment Name: Zm_Herbicide-Treatments_P Parameter: Timepoint (hr) Value: 12
  misc_feature: MA Experiment 20000627 PARAMETER Experiment Name: Zm_Herbicide-Treatments_P Parameter: Tissue Value: Aerial
  misc_feature: MA Experiment 20000627 PARAMETER Experiment Name: Zm_Herbicide-Treatments_P Parameter: Treatment Value: Finale vs. No Treatment
  misc_feature: MA Experiment ID: 20000629 Result: Up-regulated in Transcription
  misc_feature: MA Experiment 20000629 PARAMETER Experiment Name: Zm_Herbicide-Treatments_P Parameter: Timepoint (hr) Value: 12
  misc_feature: MA Experiment 20000629 PARAMETER Experiment Name: Zm_Herbicide-Treatments_P Parameter: Tissue Value: Aerial
  misc_feature: MA Experiment 20000629 PARAMETER Experiment Name: Zm_Herbicide-Treatments_P Parameter: Treatment Value: Trimec vs. No Treatment
  misc_feature: MA Experiment ID: 20000630 Result: Up-regulated in Transcription
  misc_feature: MA Experiment 20000630 PARAMETER Experiment Name: Zm_Herbicide-Treatments_P Parameter: Timepoint (hr) Value: 4
  misc_feature: MA Experiment 20000630 PARAMETER Experiment Name: Zm_Herbicide-Treatments_P Parameter: Tissue Value: Aerial
  misc_feature: MA Experiment 20000630 PARAMETER Experiment Name: Zm_Herbicide-Treatments_P Parameter: Treatment Value: Roundup vs. No Treatment
gcacgagaccattacctagaacatcctaatcgaaaagagccccacggcggccatcctctgcgcgggcgttccagagcatgtacgcgcagatggtgtgcgggctgtgccagcggcaggacgtgctgcgcgtgggcgccgtgttcgcgtcgggcctcctccgcgccatccgcttcctccagctcaactgggagcagctggcggaggacatcgaggccggctcgctgaccccgcgcgtgaccgacccgtcggtgcgcgaggcggtcgccggcatcctccgccctgaccccgcggtcgccgagctggtccgctccgagtgctccgggggcgactgggcgggcatcgtcacccgcatttggcccaacaccaagtacctggacgtgatcgtcaccggcgccatggcgcagtacatcccgacgctcaagcactacagcggcgggctcccgatggcgtgcaccatgtacgcgtcctcggagtgctacttcgggctgaacctccggcccatgtgcgacccgtcggaggtgtcctacaccctgatgcccaacatgtgctacttcgagttcctgccgatgggcggcgccgtcgacgcgagccagctggtggacctcggccgcgtggagcgcgggcgcgagtacgagctggtgatcaccacgtacgcggggctgaaccggtaccgcgtcggcgacgtgctccaggtgaccggcttccacaactcggcgccgcagttccggttcgtgcgccgcaagaacgtgctgctgtccatcgagtcggacaagacggacgaggccgagctgcagcgcgccgtggagcgcgcgtccgcgctgctccgcccgcacggcgccgccgtggtggagtacaccagccaggcctacaccaagagcatcccgggccactacgtcgtctactgggagctcctgcaggccaaggggggcgccgcggtggacggggagacgctggaagggtgctgcctcgagatggaggaggcgctgaacgcggtgtacaggcagagccgcgtggccgacggctccatcggcccgctggagatccgggtggtccggccgggcaccttcgaggagctcatggactacgccatctcccgcggcgcgtcgatcaaccagtacaaggtgccccggtgcgtgacgttcccgcccatcatcgagctcctggactcccgcgtcgtgtccagccacttgagccccgcgctgccgcactggaccgccggccagcgctccggctccggctccggctccgactagacacagcggcagggcggcgaggcgtgtccgtgtccaggcgcgcttaattagactgtggaaatcatctgctgcgtgtcgcagacgtagaagaatgcccgtgaaaacttaaatactatttgttaattttggagttttg

SEQ ID NO: 8435 - protein, 391 aa, Zea mays subsp. mays
  peptide (1)..(391): Ceres Seq. ID no. 12405400
  misc_feature (1)..(361): Pfam Name: GH3 auxin-responsive promoter Pfam Description: GH3 auxin-responsive promoter
  misc_feature (1)..(383): Homolog of NCBI NO: 15226032 NR Description: putative auxin-regulated protein; protein id:
  misc_feature (1)..(383): Homolog of NCBI NO: 4887010 NR Description: Nt-gh3 deduced protein [Nicotiana tabacum]
  misc_feature (1)..(383): Homolog of NCBI NO: 15227787 NR Description: unknown protein; protein id: At2g23170.1,
  misc_feature (1)..(379): Homolog of NCBI NO: 34909816 NR Description: putative auxin-responsive GH3 protein [Oryza
  misc_feature (1)..(383): Homolog of NCBI NO: 15235538 NR Description: auxin-responsive GH3 - like protein; protein id:
MYAQMVCGLCQRQDVLRVGAVFASGLLRAIRFLQLNWEQLAEDIEAGSLTPRVTDPSVREAVAGILRPDPAVAELVRSECSGGDWAGIVTRIWPNTKYLDVIVTGAMAQYIPTLKHYSGGLPMACTMYASSECYFGLNLRPMCDPSEVSYTLMPNMCYFEFLPMGGAVDASQLVDLGRVERGREYELVITTYAGLNRYRVGDVLQVTGFHNSAPQFRFVRRKNVLLSIESDKTDEAELQRAVERASALLRPHGAAVVEYTSQAYTKSIPGHYVVYWELLQAKGGAAVDGETLEGCCLEMEEALNAVYRQSRVADGSIGPLEIRVVRPGTFEELMDYAISRGASINQYKVPRCVTFPPIIELLDSRVVSSHLSPALPHWTAGQRSGSGSGSD

SEQ ID NO: 8436 - protein, 387 aa, Zea mays subsp. mays
  peptide (1)..(387): Ceres Seq. ID no. 12405401
  misc_feature (1)..(357): Pfam Name: GH3 auxin-responsive promoter Pfam Description: GH3 auxin-responsive promoter
  misc_feature (1)..(379): Homolog of NCBI NO: 15226032 NR Description: putative auxin-regulated protein; protein id:
  misc_feature (1)..(379): Homolog of NCBI NO: 4887010 NR Description: Nt-gh3 deduced protein [Nicotiana tabacum]
  misc_feature (1)..(379): Homolog of NCBI NO: 15227787 NR Description: unknown protein; protein id: At2g23170.1,
  misc_feature (1)..(375): Homolog of NCBI NO: 34909816 NR Description: putative auxin-responsive GH3 protein [Oryza
  misc_feature (1)..(379): Homolog of NCBI NO: 15235538 NR Description: auxin-responsive GH3 - like protein; protein id:
MVCGLCQRQDVLRVGAVFASGLLRAIRFLQLNWEQLAEDIEAGSLTPRVTDPSVREAVAGILRPDPAVAELVRSECSGGDWAGIVTRIWPNTKYLDVIVTGAMAQYIPTLKHYSGGLPMACTMYASSECYFGLNLRPMCDPSEVSYTLMPNMCYFEFLPMGGAVDASQLVDLGRVERGREYELVITTYAGLNRYRVGDVLQVTGFHNSAPQFRFVRRKNVLLSIESDKTDEAELQRAVERASALLRPHGAAVVEYTSQAYTKSIPGHYVVYWELLQAKGGAAVDGETLEGCCLEMEEALNAVYRQSRVADGSIGPLEIRVVRPGTFEELMDYAISRGASINQYKVPRCVTFPPIIELLDSRVVSSHLSPALPHWTAGQRSGSGSGSD

SEQ ID NO: 8437 - protein, 285 aa, Zea mays subsp. mays
  peptide (1)..(285): Ceres Seq. ID no. 12405402
  misc_feature (1)..(255): Pfam Name: GH3 auxin-responsive promoter Pfam Description: GH3 auxin-responsive promoter
  misc_feature (1)..(277): Homolog of NCBI NO: 15226032 NR Description: putative auxin-regulated protein; protein id:
  misc_feature (1)..(277): Homolog of NCBI NO: 4887010 NR Description: Nt-gh3 deduced protein [Nicotiana tabacum]
  misc_feature (1)..(277): Homolog of NCBI NO: 15227787 NR Description: unknown protein; protein id: At2g23170.1,
  misc_feature (1)..(273): Homolog of NCBI NO: 34909816 NR Description: putative auxin-responsive GH3 protein [Oryza
  misc_feature (1)..(277): Homolog of NCBI NO: 15235538 NR Description: auxin-responsive GH3 - like protein; protein id:
MAQYIPTLKHYSGGLPMACTMYASSECYFGLNLRPMCDPSEVSYTLMPNMCYFEFLPMGGAVDASQLVDLGRVERGREYELVITTYAGLNRYRVGDVLQVTGFHNSAPQFRFVRRKNVLLSIESDKTDEAELQRAVERASALLRPHGAAVVEYTSQAYTKSIPGHYVVYWELLQAKGGAAVDGETLEGCCLEMEEALNAVYRQSRVADGSIGPLEIRVVRPGTFEELMDYAISRGASINQYKVPRCVTFPPIIELLDSRVVSSHLSPALPHWTAGQRSGSGSGSD

SEQ ID NO: 8438 - DNA, 1343 bp, Zea mays subsp. mays
  misc_feature (1)..(1343): Ceres Seq. ID no. 12405393
  misc_feature: MA Experiment ID: 108528 Result: Down-regulated in Transcription
  misc_feature: MA Experiment 108528 PARAMETER Experiment Name: Zm_Imbibed_Seeds_P Parameter: Age (day) Value: 5 vs. 2
  misc_feature: MA Experiment 108528 PARAMETER Experiment Name: Zm_Imbibed_Seeds_P Parameter: Organism Value: Zea mays
  misc_feature: MA Experiment 108528 PARAMETER Experiment Name: Zm_Imbibed_Seeds_P Parameter: Plant Line Value: 35A19
  misc_feature: MA Experiment 108528 PARAMETER Experiment Name: Zm_Imbibed_Seeds_P Parameter: Tissue Value: Aerial vs. Embryo
  misc_feature: MA Experiment ID: 108530 Result: Down-regulated in Transcription
  misc_feature: MA Experiment 108530 PARAMETER Experiment Name: Zm_Imbibed_Seeds_P Parameter: Age (day) Value: 6 vs. 2
  misc_feature: MA Experiment 108530 PARAMETER Experiment Name: Zm_Imbibed_Seeds_P Parameter: Organism Value: Zea mays
  misc_feature: MA Experiment 108530 PARAMETER Experiment Name: Zm_Imbibed_Seeds_P Parameter: Plant Line Value: 35A19
  misc_feature: MA Experiment 108530 PARAMETER Experiment Name: Zm_Imbibed_Seeds_P Parameter: Tissue Value: Aerial vs. Embryo
  misc_feature: MA Experiment ID: 108536 Result: Down-regulated in Transcription
  misc_feature: MA Experiment 108536 PARAMETER Experiment Name: Zm_Meristem_P Parameter: Age (day) Value: 8
  misc_feature: MA Experiment 108536 PARAMETER Experiment Name: Zm_Meristem_P Parameter: Organism Value: Zea mays
  misc_feature: MA Experiment 108536 PARAMETER Experiment Name: Zm_Meristem_P Parameter: Plant Line Value: 35A19
  misc_feature: MA Experiment 108536 PARAMETER Experiment Name: Zm_Meristem_P Parameter: Tissue Value: Shoot Meristem vs. Above Shoot Meristem
  misc_feature: MA Experiment ID: 108543 Result: Up-regulated in Transcription
  misc_feature: MA Experiment ID: 108544 Result: Down-regulated in Transcription
  misc_feature: MA Experiment ID: 108547 Result: Down-regulated in Transcription
  misc_feature: MA Experiment 108547 PARAMETER Experiment Name: Zm_Imbibed_Seeds_P Parameter: Age (day) Value: 4 vs. 2
  misc_feature: MA Experiment 108547 PARAMETER Experiment Name: Zm_Imbibed_Seeds_P Parameter: Organism Value: Zea mays
  misc_feature: MA Experiment 108547 PARAMETER Experiment Name: Zm_Imbibed_Seeds_P Parameter: Plant Line Value: 35A19
  misc_feature: MA Experiment 108547 PARAMETER Experiment Name: Zm_Imbibed_Seeds_P Parameter: Tissue Value: Aerial vs. Embryo
  misc_feature: MA Experiment ID: 108597 Result: Up-regulated in Transcription
  misc_feature: MA Experiment 108597 PARAMETER Experiment Name: Zm_100uM_ABA_P Parameter: Age (day) Value: 9
  misc_feature: MA Experiment 108597 PARAMETER Experiment Name: Zm_100uM_ABA_P Parameter: Organism Value: Zea mays
  misc_feature: MA Experiment 108597 PARAMETER Experiment Name: Zm_100uM_ABA_P Parameter: Plant Line Value: 35A19
  misc_feature: MA Experiment 108597 PARAMETER Experiment Name: Zm_100uM_ABA_P Parameter: Timepoint (hr) Value: 24
  misc_feature: MA Experiment 108597 PARAMETER Experiment Name: Zm_100uM_ABA_P Parameter: Tissue Value: Aerial
  misc_feature: MA Experiment 108597 PARAMETER Experiment Name: Zm_100uM_ABA_P Parameter: Treatment Value: 100uM ABA vs. No Treatment
  misc_feature: MA Experiment ID: 108688 Result: Down-regulated in Transcription
  misc_feature: MA Experiment 108688 PARAMETER Experiment Name: Zm_Embryos-Flowers__P Parameter: Tissue Value: Immature Flowers vs. Aerial+
  misc_feature: MA Experiment ID: 20000477 Result: Down-regulated in Transcription
  misc_feature: MA Experiment 20000477 PARAMETER Experiment Name: Zm_5mM_SA_P Parameter: Age (day) Value: 10
  misc_feature: MA Experiment 20000477 PARAMETER Experiment Name: Zm_5mM_SA_P Parameter: Organism Value: Zea mays
  misc_feature: MA Experiment 20000477 PARAMETER Experiment Name: Zm_5mM_SA_P Parameter: Plant Line Value: 35A19
  misc_feature: MA Experiment 20000477 PARAMETER Experiment Name: Zm_5mM_SA_P Parameter: Timepoint (hr) Value: 48
  misc_feature: MA Experiment 20000477 PARAMETER Experiment Name: Zm_5mM_SA_P Parameter: Tissue Value: Aerial
  misc_feature: MA Experiment 20000477 PARAMETER Experiment Name: Zm_5mM_SA_P Parameter: Treatment Value: 5mM SA vs. No Treatment
  misc_feature: MA Experiment ID: 20000492 Result: Down-regulated in Transcription
  misc_feature: MA Experiment 20000492 PARAMETER Experiment Name: Zm_Hybrid_Seed_Dev_P Parameter: DAP Value: 12
  misc_feature: MA Experiment 20000492 PARAMETER Experiment Name: Zm_Hybrid_Seed_Dev_P Parameter: Organism Value: Zea mays
  misc_feature: MA Experiment 20000492 PARAMETER Experiment Name: Zm_Hybrid_Seed_Dev_P Parameter: Plant Line Value: 35A19
  misc_feature: MA Experiment 20000492 PARAMETER Experiment Name: Zm_Hybrid_Seed_Dev_P Parameter: Tissue Value: Fert Kernel vs. Unfert Floret
aaccaaagctagctactttgttgctgtttttattcgtttgtcacataagcagtggtggtcggtcggccggcgacaatgagcggccgtgtgttcgtcctggccgctgccttcggcgtgctgctcgccgcagccgccgtgtcctcgaggcccgtcctgactccgctgggtactagccgccctgctgccggcgacctgtccgtgtacttccacgcggactcgtgcccgcagctggagacgatcgtgcggtccagcgtggacgcgggcgctccagcagaacgtccgtctgacggcgggtctcctccgcctcttgttccacgactgcttcccgcagggctgcgacgcgtccatcctcctggacaacggcgagcgcggcctcccgcccaacgtggggctgcagcaggaggccgtgcagctggtggaggacatccgcgggaaggtgcacgcggcgtgcgggcccaccgtgtcgtgcgccgacatcacggtgctggccacccgcgacgccgtgagcctgtccggcgggccttccttcacggtgccgctggggcggctggacagcgcggcgccggcgtccagcaacgacgtgttcacgctgccgccgccgacggcgacggtggacgagctgctgacggcgttcgggagcaagaacctgtcggacccggcggacctggtggcgctgtcgggcgcgcacacggtggggaaggcgcggtgcagctcgttcggcgacgtggcgggcccggccaccgacgacgtgacgcggtgcgtgacggcgacgtgctcggcccccgggagcggcgacacgctgcgggacctggacttcctgacgcccgccgtgttcgacaacctctacttcgtggagctgacgctgaggaagaacaagggggtgatgctgccgtcggaccaagggctggtgagcgacccgcgcacgagctggctcgtccagggcttcgccgacaaccactggtggttcttcgaccagttcaggacctccatgatcaagatgagccagctcaggggaccccaggggaacgtcggcgagatccgccgtaactgcttccgccccaacaccaacggcatcgccgcctctgcttgagttgactgaccaggcaccgatccatccgccggtgaggactcatcacttcactttcactgtgtctgtgtgtaataattaataataataaaacaacaacaacaaccccagcccgtacgtgccgtgtgaggggggcacgtggttgtgccgtcaccaccatgtcggcgtcgtccatgcatgtcgcattaccgatttttgttcatgttccgatctcatctcatcatctcgctatcaataacaattatactagtgtttt

SEQ ID NO: 8439 - protein, 323 aa, Zea mays subsp. mays
  peptide (1)..(323): Ceres Seq. ID no. 12405394
  misc_feature (4)..(67): Homolog of NCBI NO: 5777628 NR Description: CAA303716.1 protein [Oryza sativa]
  misc_feature (8)..(67): Homolog of NCBI NO: 38345511 NR Description: OSJNBa0039K24.14 [Oryza sativa (japonica
  misc_feature (36)..(67): Homolog of NCBI NO: 5777624 NR Description: CAA303712.1 protein [Oryza sativa]
  misc_feature (36)..(67): Homolog of NCBI NO: 38345508 NR Description: OSJNBa0039K24.10 [Oryza sativa (japonica
MSGRVFVLAAAFGVLLAAAAVSSRPVLTPLGTSRPAAGDLSVYFHADSCPQLETIVRSSVDAGAPAERPSDGGSPPPLVPRLLPAGLRRVHPPGQRRARPPAQRGAAAGGRAAGGGHPREGARGVRAHRVVRRHHGAGHPRRREPVRRAFLHGAAGAAGQRGAGVQQRRVHAAAADGDGGRAADGVREQEPVGPGGPGGAVGRAHGGEGAVQLVRRRGGPGHRRRDAVRDGDVLGPRERRHAAGPGLPDARRVRQPLLRGADAEEEQGGDAAVGPRAGERPAHELARPGLRRQPLVVLRPVQDLHDQDEPAQGTPGERRRDPP

SEQ ID NO: 8440 - DNA, 830 bp, Zea mays subsp. mays
  misc_feature (1)..(830): Ceres Seq. ID no. 12369086
  misc_feature: MA Experiment ID: 108528 Result: Up-regulated in Transcription
  misc_feature: MA Experiment 108528 PARAMETER Experiment Name: Zm_Imbibed_Seeds_P Parameter: Age (day) Value: 5 vs. 2
  misc_feature: MA Experiment 108528 PARAMETER Experiment Name: Zm_Imbibed_Seeds_P Parameter: Organism Value: Zea mays
  misc_feature: MA Experiment 108528 PARAMETER Experiment Name: Zm_Imbibed_Seeds_P Parameter: Plant Line Value: 35A19
  misc_feature: MA Experiment 108528 PARAMETER Experiment Name: Zm_Imbibed_Seeds_P Parameter: Tissue Value: Aerial vs. Embryo
  misc_feature: MA Experiment ID: 108556 Result: Down-regulated in Transcription
  misc_feature: MA Experiment 108556 PARAMETER Experiment Name: Zm_Drought_P Parameter: Age (day) Value: 9
  misc_feature: MA Experiment 108556 PARAMETER Experiment Name: Zm_Drought_P Parameter: Organism Value: Zea mays
  misc_feature: MA Experiment 108556 PARAMETER Experiment Name: Zm_Drought_P Parameter: Plant Line Value: 35A19
  misc_feature: MA Experiment 108556 PARAMETER Experiment Name: Zm_Drought_P Parameter: Timepoint (hr) Value: 24
  misc_feature: MA Experiment 108556 PARAMETER Experiment Name: Zm_Drought_P Parameter: Tissue Value: Aerial
  misc_feature: MA Experiment 108556 PARAMETER Experiment Name: Zm_Drought_P Parameter: Treatment Value: Drought vs. No Drought
accgctcttctcccgaagacccgaactccacgccacatatctctcctcttttctctcttttttctctccgtactctccccacgcaggtggcagctatggcggaggacgcccccaacgcagccgccgagggcggccagcccgctcctcccgagggatccgccgatgccgccccgttggctactgcgggcgccaaggccgcggaggcgctgctcccgtcgctcagcatctgggccgccgtcgcagcgcacgcgcgacgccgtggtgcgccgcctcgtgcagacgctcgcggcgcccagcgtcctctcccagcgctacggcgccgttccggagcccgaggccgagcgcgccgccgcggccgtcgaggccaaggccttcgcggccgcctccaagtccgccgccgccgagtccccggcctctatcgaggaggggattgaggtgctccaggcgtactccaaggaggtcagccgccgcctcctcgagctcgccaagaccaggtccgccgctgcgacggcgcccgccgaggggagcgtgcaggaggccgaggactcgtcggcgactgctccagccgccgaggaggctgccgtaaaagaggagtaaggcttcggcccgtgctttgatccaccgacagttgctgttattttggcatttggtcggaatgttattcatcgtcccccctgcatatgtttactagtatatctattgtctatctattagagattgcttgtgacaagagtgactgatgtttgttccaagaacatatatagtattaagctatatatcaaccgcgcgtccttcgcattgcaaatgtgaaggttgctcgtgtacgtttt

SEQ ID NO: 8441 - protein, 198 aa, Zea mays subsp. mays
  peptide (1)..(198): Ceres Seq. ID no. 12369087
  misc_feature (78)..(191): Homolog of NCBI NO: 33146512 NR Description: putative MFP1 attachment factor 1 [Oryza sativa
  misc_feature (78)..(192): Homolog of NCBI NO: 26006500 NR Description: Unknown protein [Oryza sativa (japonica
  misc_feature (78)..(190): Homolog of NCBI NO: 7546727 NR Description: MFP1 attachment factor 1 [Zea mays]
TALLPKTRTPRHISLLFSLFFLSVLSPRRWQLWRRTPPTQPPRAASPLLPRDPPMPPRWLLRAPRPRRRCSRRSASGPPSQRTRDAVVRRLVQTLAAPSVLSQRYGAVPEPEAERAAAAVEAKAFAAASKSAAAESPASIEEGIEVLQAYSKEVSRRLLELAKTRSAAATAPAEGSVQEAEDSSATAPAAEEAAVKEE

SEQ ID NO: 8442 - protein, 194 aa, Zea mays subsp. mays
  peptide (1)..(194): Ceres Seq. ID no. 12369088
  misc_feature (91)..(194): Pfam Name: Cupin Pfam Description: Cupin
  misc_feature (23)..(194): Homolog of NCBI NO: 25989119 NR Description: unknown [Streptomyces aureofaciens]
  misc_feature (98)..(194): Homolog of NCBI NO: 6523547 NR Description: hydroxyproline-rich glycoprotein DZ-HRGP [Volvox
  misc_feature (98)..(194): Homolog of NCBI NO: 14253159 NR Description: VMP3 protein [Volvox carteri f. nagariensis]
  misc_feature (80)..(192): Homolog of NCBI NO: 17506453 NR Description: AT4g02720 T10P11 1 like (59.0 kD) [Caenorhabditis >gi|15150654|gb|AAK85461.1|AC006627_4 Hypothetical protein
  misc_feature (98)..(194): Homolog of NCBI NO: 6523547 NR Description: hydroxyproline-rich glycoprotein DZ-HRGP [Volvox
  misc_feature (62)..(191): Homolog of NCBI NO: 21234143 NR Description: putative integral membrane protein [Streptomyces A3(2)] >gi|13620629|emb|CAC36668.1| putative integral membrane
  misc_feature (37)..(183): Homolog of NCBI NO: 141449 NR Description: Hypothetical 35.5 kDa protein in transposon TN4556
  misc_feature (84)..(190): Homolog of NCBI NO: 5305335 NR Description: proline-rich mucin homolog [Mycobacterium
  misc_feature (98)..(182): Homolog of NCBI NO: 6523547 NR Description: hydroxyproline-rich glycoprotein DZ-HRGP [Volvox
  misc_feature (113)..(194): Homolog of NCBI NO: 22330241 NR Description: similar to extensin-like protein; protein id:
PLFSRRPELHATYLSSFLSFFSPYSPHAGGSYGGGRPQRSRRGRPARSSRGIRRCRPVGYCGRQGRGGAAPVAQHLGRRRSARATPWCAASCRRSRRPASSPSATAPFRSPRPSAPPRPSRPRPSRPPPSPPPPSPRPLSRRGLRCSRRTPRRSAAASSSSPRPGPPLRRRPPRGACRRPRTRRRLLQPPRRLP

SEQ ID NO: 8443 - protein, 144 aa, Zea mays subsp. mays
  peptide (1)..(144): Ceres Seq. ID no. 12369089
  misc_feature (24)..(137): Homolog of NCBI NO: 33146512 NR Description: putative MFP1 attachment factor 1 [Oryza sativa
  misc_feature (24)..(138): Homolog of NCBI NO: 26006500 NR Description: Unknown protein [Oryza sativa (japonica
  misc_feature (24)..(136): Homolog of NCBI NO: 7546727 NR Description: MFP1 attachment factor 1 [Zea mays]
MPPRWLLRAPRPRRRCSRRSASGPPSQRTRDAVVRRLVQTLAAPSVLSQRYGAVPEPEAERAAAAVEAKAFAAASKSAAAESPASIEEGIEVLQAYSKEVSRRLLELAKTRSAAATAPAEGSVQEAEDSSATAPAAEEAAVKEE

SEQ ID NO: 8444 - DNA, 1566 bp, Zea mays subsp. mays
  misc_feature (1)..(1566): Ceres Seq. ID no. 12405381
  misc_feature: MA Experiment ID: 108533 Result: Up-regulated in Transcription
  misc_feature: MA Experiment 108533 PARAMETER Experiment Name: Zm_4deg_Cold_P Parameter: Age (hr) Value: 8
  misc_feature: MA Experiment 108533 PARAMETER Experiment Name: Zm_4deg_Cold_P Parameter: Organism Value: Zea mays
  misc_feature: MA Experiment 108533 PARAMETER Experiment Name: Zm_4deg_Cold_P Parameter: Plant Line Value: 35A19
  misc_feature: MA Experiment 108533 PARAMETER Experiment Name: Zm_4deg_Cold_P Parameter: Temperature (deg C) Value: 4 vs. 22
  misc_feature: MA Experiment 108533 PARAMETER Experiment Name: Zm_4deg_Cold_P Parameter: Timepoint (hr) Value: 1
  misc_feature: MA Experiment 108533 PARAMETER Experiment Name: Zm_4deg_Cold_P Parameter: Tissue Value: Aerial
  misc_feature: MA Experiment ID: 108534 Result: Up-regulated in Transcription
  misc_feature: MA Experiment 108534 PARAMETER Experiment Name: Zm_4deg_Cold_P Parameter: Age (hr) Value: 8
  misc_feature: MA Experiment 108534 PARAMETER Experiment Name: Zm_4deg_Cold_P Parameter: Organism Value: Zea mays
  misc_feature: MA Experiment 108534 PARAMETER Experiment Name: Zm_4deg_Cold_P Parameter: Plant Line Value: 35A19
  misc_feature: MA Experiment 108534 PARAMETER Experiment Name: Zm_4deg_Cold_P Parameter: Temperature (deg C) Value: 4 vs. 22
  misc_feature: MA Experiment 108534 PARAMETER Experiment Name: Zm_4deg_Cold_P Parameter: Timepoint (hr) Value: 6
  misc_feature: MA Experiment 108534 PARAMETER Experiment Name: Zm_4deg_Cold_P Parameter: Tissue Value: Aerial
  misc_feature: MA Experiment ID: 108536 Result: Up-regulated in Transcription
  misc_feature: MA Experiment 108536 PARAMETER Experiment Name: Zm_Meristem_P Parameter: Age (day) Value: 8
  misc_feature: MA Experiment 108536 PARAMETER Experiment Name: Zm_Meristem_P Parameter: Organism Value: Zea mays
  misc_feature: MA Experiment 108536 PARAMETER Experiment Name: Zm_Meristem_P Parameter: Plant Line Value: 35A19
  misc_feature: MA Experiment 108536 PARAMETER Experiment Name: Zm_Meristem_P Parameter: Tissue Value: Shoot Meristem vs. Above Shoot Meristem
  misc_feature: MA Experiment ID: 20000626 Result: Down-regulated in Transcription
  misc_feature: MA Experiment 20000626 PARAMETER Experiment Name: Zm_Herbicide-Treatments_P Parameter: Timepoint (hr) Value: 12
  misc_feature: MA Experiment 20000626 PARAMETER Experiment Name: Zm_Herbicide-Treatments_P Parameter: Tissue Value: Aerial
  misc_feature: MA Experiment 20000626 PARAMETER Experiment Name: Zm_Herbicide-Treatments_P Parameter: Treatment Value: Roundup vs. No Treatment
aatacttcgatagtaactgtttgtgtgggaaattactaaaaacactttttgtttgtgtgggaaagaagaaaaaaagaactaacgttaaaggcggcttgtgttgtggcgcagggcaccagcagcagtgggcgctccccttcgccggctccttgcaggtcagtccgccgccgcagcaggcgcaaccggataggaagggccgcggcggaggcggggtcatggattcaggctccagatccagcggcggagccgggttcgacgacgaagacggcctcaccacgcgccgcgaggtctcctcctcgctccaagatttggcagtaagggtggattggaagggtgggagctgcagcgatggcggtacaaatcaggggccaaacacaccacggtcaaaacactcggccacagagcagcgcagacgcagcaagatcaatgataggtttcagatacttagggagctgttgccacacaatgatcaaaagagagacaaagcaacatttctcttggaggttattgaatatatacgttttttgcaagagaaagcgcaaaaatacgaggcaacattcccagaatggaaccaagaaaatccaacgatgcttccgtggagtaaaggccaaatcccaggagattccccgcctgacccttcacatttcgtgagaaatggatcctcccctggatctaatttcactgggaaactcgatgataatcacacatctgcagctgcatcaggggcactggaccaggcagaaactaatcacgtggctagcggctgctacagatcatcagaaactccggcgaatattacaaataatgctatatctcagtcccaacctcaatggacaggtccgtcccctgtggatgactctgcagtgaaaagtgaaatgcttaacagccaggagttggcaatagatgaaggaatgatcagtgtgtccagtacctattcccaagagttacttatctcgttgtctcacgcccttcagagctcaggtgtggatctgtcccaaaccagcatctctgtgcagatcaacctgggaaagcgtgctggcaagagatctgcatctgctggtggtgtatcctccaactccaaggaaccaccagccgatccagcatctagtaacgaactaggcggccatcacgtgacaacgttgggagctagcgctgacggtctcctcccccacgcgacgaaacggcataaacgggacaacagctgatgatgggcctctctcactccgcctcgttcccagacgacagacggattgatcattcttttttttttctcccagcccgacgggaggctctctcttggattggttgcacatcgcgtgctcggtgatgggctgagaccccggctgtattctttttgatttgatcgctcccgccgccatcccctgtctagcccattgtttttacgtagaggaacgaaccgtggagcttcccattgcggattgtgaagccgctcttcttgtacacaggcttccattcatctgagaagcttcttcccctccttgaacaggtctctccgcgttttagacctgtatactagcaacctgtaagatatgattatgatgtccc

SEQ ID NO: 8445 - protein, 400 aa, Zea mays subsp. mays
  peptide (1)..(400): Ceres Seq. ID no. 12405382
  misc_feature (126)..(176): Pfam Name: Helix-loop-helix DNA-binding domain Pfam Description: Helix-loop-helix DNA-binding domain
  misc_feature (72)..(347): Homolog of NCBI NO: 21555388 NR Description: putative DNA-binding protein [Arabidopsis
  misc_feature (116)..(347): Homolog of NCBI NO: 15221582 NR Description: putative DNA-binding protein; protein id: supported by cDNA: 27793. [Arabidopsis thaliana]
  misc_feature (74)..(349): Homolog of NCBI NO: 30682248 NR Description: bHLH protein family [Arabidopsis thaliana]
  misc_feature (74)..(349): Homolog of NCBI NO: 11358566 NR Description: myc-like protein - Arabidopsis thaliana
  misc_feature (113)..(397): Homolog of NCBI NO: 9758063 NR Description: DNA-binding protein-like [Arabidopsis thaliana]
  misc_feature (113)..(236): Homolog of NCBI NO: 15241563 NR Description: putative protein; protein id: At5g38860.1
  misc_feature (293)..(397): Homolog of NCBI NO: 15241563 NR Description: putative protein; protein id: At5g38860.1
  misc_feature (173)..(347): Homolog of NCBI NO: 19310568 NR Description: putative DNA-binding protein [Arabidopsis
  misc_feature (53)..(178): Homolog of NCBI NO: 34907076 NR Description: OSJNBa0093F16.27 [Oryza sativa (japonica
YFDSNCLCGKLLKTLFVCVGKKKKRTNVKGGLCCGAGHQQQWALPFAGSLQVSPPPQQAQPDRKGRGGGGVMDSGSRSSGGAGFDDEDGLTTRREVSSSLQDLAVRVDWKGGSCSDGGTNQGPNTPRSKHSATEQRRRSKINDRFQILRELLPHNDQKRDKATFLLEVIEYIRFLQEKAQKYEATFPEWNQENPTMLPWSKGQIPGDSPPDPSHFVRNGSSPGSNFTGKLDDNHTSAAASGALDQAETNHVASGCYRSSETPANITNNAISQSQPQWTGPSPVDDSAVKSEMLNSQELAIDEGMISVSSTYSQELLISLSHALQSSGVDLSQTSISVQINLGKRAGKRSASAGGVSSNSKEPPADPASSNELGGHHVTTLGASADGLLPHATKRHKRDNS

SEQ ID NO: 8446 - protein, 329 aa, Zea mays subsp. mays
  peptide (1)..(329): Ceres Seq. ID no. 12405383
  misc_feature (55)..(105): Pfam Name: Helix-loop-helix DNA-binding domain Pfam Description: Helix-loop-helix DNA-binding domain
  misc_feature (1)..(276): Homolog of NCBI NO: 21555388 NR Description: putative DNA-binding protein [Arabidopsis
  misc_feature (45)..(276): Homolog of NCBI NO: 15221582 NR Description: putative DNA-binding protein; protein id: supported by cDNA: 27793. [Arabidopsis thaliana]
  misc_feature (3)..(278): Homolog of NCBI NO: 30682248 NR Description: bHLH protein family [Arabidopsis thaliana]
  misc_feature (3)..(278): Homolog of NCBI NO: 11358566 NR Description: myc-like protein - Arabidopsis thaliana
  misc_feature (42)..(326): Homolog of NCBI NO: 9758063 NR Description: DNA-binding protein-like [Arabidopsis thaliana]
  misc_feature (42)..(165): Homolog of NCBI NO: 15241563 NR Description: putative protein; protein id: At5g38860.1
  misc_feature (222)..(326): Homolog of NCBI NO: 15241563 NR Description: putative protein; protein id: At5g38860.1
  misc_feature (102)..(276): Homolog of NCBI NO: 19310568 NR Description: putative DNA-binding protein [Arabidopsis
  misc_feature (1)..(107): Homolog of NCBI NO: 34907076 NR Description: OSJNBa0093F16.27 [Oryza sativa (japonica
MDSGSRSSGGAGFDDEDGLTTRREVSSSLQDLAVRVDWKGGSCSDGGTNQGPNTPRSKHSATEQRRRSKINDRFQILRELLPHNDQKRDKATFLLEVIEYIRFLQEKAQKYEATFPEWNQENPTMLPWSKGQIPGDSPPDPSHFVRNGSSPGSNFTGKLDDNHTSAAASGALDQAETNHVASGCYRSSETPANITNNAISQSQPQWTGPSPVDDSAVKSEMLNSQELAIDEGMISVSSTYSQELLISLSHALQSSGVDLSQTSISVQINLGKRAGKRSASAGGVSSNSKEPPADPASSNELGGHHVTTLGASADGLLPHATKRHKRDNS

SEQ ID NO: 8447 - protein, 205 aa, Zea mays subsp. mays
  peptide (1)..(205): Ceres Seq. ID no. 12405384
  misc_feature (1)..(152): Homolog of NCBI NO: 21555388 NR Description: putative DNA-binding protein [Arabidopsis
  misc_feature (1)..(152): Homolog of NCBI NO: 15221582 NR Description: putative DNA-binding protein; protein id: supported by cDNA: 27793. [Arabidopsis thaliana]
  misc_feature (1)..(154): Homolog of NCBI NO: 30682248 NR Description: bHLH protein family [Arabidopsis thaliana]
  misc_feature (1)..(154): Homolog of NCBI NO: 11358566 NR Description: myc-like protein - Arabidopsis thaliana
  misc_feature (1)..(202): Homolog of NCBI NO: 9758063 NR Description: DNA-binding protein-like [Arabidopsis thaliana]
  misc_feature (1)..(41): Homolog of NCBI NO: 15241563 NR Description: putative protein; protein id: At5g38860.1
  misc_feature (98)..(202): Homolog of NCBI NO: 15241563 NR Description: putative protein; protein id: At5g38860.1
  misc_feature (1)..(152): Homolog of NCBI NO: 19310568 NR Description: putative DNA-binding protein [Arabidopsis
MLPWSKGQIPGDSPPDPSHFVRNGSSPGSNFTGKLDDNHTSAAASGALDQAETNHVASGCYRSSETPANITNNAISQSQPQWTGPSPVDDSAVKSEMLNSQELAIDEGMISVSSTYSQELLISLSHALQSSGVDLSQTSISVQINLGKRAGKRSASAGGVSSNSKEPPADPASSNELGGHHVTTLGASADGLLPHATKRHKRDNS

SEQ ID NO: 8448 - DNA, 800 bp, Zea mays subsp. mays
  misc_feature (1)..(800): Ceres Seq. ID no. 12348080
  misc_feature: MA Experiment ID: 108543 Result: Up-regulated in Transcription
  misc_feature: MA Experiment ID: 108597 Result: Up-regulated in Transcription
  misc_feature: MA Experiment 108597 PARAMETER Experiment Name: Zm_100uM_ABA_P Parameter: Age (day) Value: 9
  misc_feature: MA Experiment 108597 PARAMETER Experiment Name: Zm_100uM_ABA_P Parameter: Organism Value: Zea mays
  misc_feature: MA Experiment 108597 PARAMETER Experiment Name: Zm_100uM_ABA_P Parameter: Plant Line Value: 35A19
  misc_feature: MA Experiment 108597 PARAMETER Experiment Name: Zm_100uM_ABA_P Parameter: Timepoint (hr) Value: 24
  misc_feature: MA Experiment 108597 PARAMETER Experiment Name: Zm_100uM_ABA_P Parameter: Tissue Value: Aerial
  misc_feature: MA Experiment 108597 PARAMETER Experiment Name: Zm_100uM_ABA_P Parameter: Treatment Value: 100uM ABA vs. No Treatment
  misc_feature: MA Experiment ID: 108689 Result: Up-regulated in Transcription
  misc_feature: MA Experiment 108689 PARAMETER Experiment Name: Zm_Drought_Roots_P Parameter: Age (day) Value: 9
  misc_feature: MA Experiment 108689 PARAMETER Experiment Name: Zm_Drought_Roots_P Parameter: Organism Value: Zea mays
  misc_feature: MA Experiment 108689 PARAMETER Experiment Name: Zm_Drought_Roots_P Parameter: Plant Line Value: 35A19
  misc_feature: MA Experiment 108689 PARAMETER Experiment Name: Zm_Drought_Roots_P Parameter: Timepoint (hr) Value: 24
  misc_feature: MA Experiment 108689 PARAMETER Experiment Name: Zm_Drought_Roots_P Parameter: Tissue Value: Roots
  misc_feature: MA Experiment 108689 PARAMETER Experiment Name: Zm_Drought_Roots_P Parameter: Treatment Value: Drought vs. No Drought
  misc_feature: MA Experiment ID: 20000480 Result: Up-regulated in Transcription
  misc_feature: MA Experiment 20000480 PARAMETER Experiment Name: Zm_Drought_P Parameter: Age (day) Value: 11
  misc_feature: MA Experiment 20000480 PARAMETER Experiment Name: Zm_Drought_P Parameter: Organism Value: Zea mays
  misc_feature: MA Experiment 20000480 PARAMETER Experiment Name: Zm_Drought_P Parameter: Plant Line Value: 35A19
  misc_feature: MA Experiment 20000480 PARAMETER Experiment Name: Zm_Drought_P Parameter: Timepoint (hr) Value: 72
  misc_feature: MA Experiment 20000480 PARAMETER Experiment Name: Zm_Drought_P Parameter: Tissue Value: Aerial
  misc_feature: MA Experiment 20000480 PARAMETER Experiment Name: Zm_Drought_P Parameter: Treatment Value: Drought vs. No Drought
  misc_feature: MA Experiment ID: 20000535 Result: Up-regulated in Transcription
  misc_feature: MA Experiment 20000535 PARAMETER Experiment Name: Zm_Hybrid_Seed_Dev_P Parameter: DAP Value: 30 vs. 12
  misc_feature: MA Experiment 20000535 PARAMETER Experiment Name: Zm_Hybrid_Seed_Dev_P Parameter: Organism Value: Zea mays
  misc_feature: MA Experiment 20000535 PARAMETER Experiment Name: Zm_Hybrid_Seed_Dev_P Parameter: Plant Line Value: 35A19
  misc_feature: MA Experiment 20000535 PARAMETER Experiment Name: Zm_Hybrid_Seed_Dev_P Parameter: Tissue Value: Embryo vs. Unfert Floret
acgttctgtcgttctcgcttgaggcggcccgcggccttctcgaagccctccctcgctccgtgctcgtggctcccgcacgatccccacattccttggccggctccgcgctcgtgctctcgttgggatcgttgtcagttcagtggaaatgcattcttcggcaatgccacacccagtgatcagaggcacattgagaagccttttaaagtgaaggaggcagaacctgtgaatgtgacaaaaccttcaccacacaagctgctggttctaggaggaagtggtttcgttggatcacacgtttgcaaagaggctttggacaaaggtttagttgtctctagtcttaatagatcgggaaagccatccttaaatgaaccttgggctgacaaagttatatggaaccaaggcaacctccttgaaccagcttcattgaaggatgctatggataatgtttctgcagtggtatcttgtgtcggaggttttggatcaaattcattcatgtataagattaatgggactgcaaacatcaatggccatcagggctgcagctgagaaaggtgtaaagagatttgtatatgtgtcagctgcagactttggattagtgaattatttattgcaaggctattacgagggcatagggcttctgaagctgaattgttgtcaaagtttacatatggaggttgataaatggattaatggaaaaggtcgctgacatcgcaccaaggctgatctgcaccatatctaaaagaattatcaacaaaagaacagtgcaagaggctatggtcaataggagatggattggtgatatt

SEQ ID NO: 8449 - protein, 180 aa, Zea mays subsp. mays
  peptide (1)..(180): Ceres Seq. ID no. 12348081
  misc_feature (53)..(180): Homolog of NCBI NO: 18416362 NR Description: putative protein; protein id: At5g10730.1, by cDNA: 10217., supported by cDNA: gi_13926272, supported by gi_16323237, supported by cDNA: gi_19698948 [Arabidopsis
  misc_feature (53)..(180): Homolog of NCBI NO: 10129651 NR Description: putative protein [Arabidopsis thaliana]
  misc_feature (83)..(180): Homolog of NCBI NO: 18417824 NR Description: putative protein; protein id: At5g15910.1, by cDNA: 22994., supported by cDNA: gi_15292960, supported by gi_21280840 [Arabidopsis thaliana] >gi|15292961|gb|AAK93591.1|
  misc_feature (83)..(180): Homolog of NCBI NO: 21592373 NR Description: unknown [Arabidopsis thaliana]
  misc_feature (7)..(180): Homolog of NCBI NO: 38346147 NR Description: OSJNBb0118P14.7 [Oryza sativa (japonica
  misc_feature (74)..(180): Homolog of NCBI NO: 18398333 NR Description: expressed protein; protein id: At1g32220.1, by cDNA: 3464. [Arabidopsis thaliana] >gi|25403150|pir||G86446
  misc_feature (84)..(163): Homolog of NCBI NO: 19076008 NR Description: hypothetical protein [Schizosaccharomyces pombe]
  misc_feature (84)..(156): Homolog of NCBI NO: 40745869 NR Description: hypothetical protein AN1860.2 [Aspergillus
  misc_feature (84)..(156): Homolog of NCBI NO: 6323321 NR Description: Hypothetical ORF; Ylr290cp [Saccharomyces
TFCRSRLRRPAAFSKPSLAPCSWLPHDPHIPWPAPRSCSRWDRCQFSGNAFFGNATPSDQRHIEKPFKVKEAEPVNVTKPSPHKLLVLGGSGFVGSHVCKEALDKGLVVSSLNRSGKPSLNEPWADKVIWNQGNLLEPASLKDAMDNVSAVVSCVGGFGSNSFMYKINGTANINGHQGCS

SEQ ID NO: 8450 - protein, 91 aa, Zea mays subsp. mays
  peptide (1)..(91): Ceres Seq. ID no. 12348082
  misc_feature (23)..(66): Homolog of NCBI NO: 11346175 NR Description: hypothetical protein F1N13_50 - Arabidopsis >gi|9755637|emb|CAC01790.1| putative protein [Arabidopsis
MLWIMFLQWYLVSEVLDQIHSCIRLMGLQTSMAIRAAAEKGVKRFVYVSAADFGLVNYLLQGYYEGIGLLKLNCCQSLHMEVDKWINGKGR

SEQ ID NO: 8451 - DNA, 1606 bp, Zea mays subsp. mays
  misc_feature (1)..(1606): Ceres Seq. ID no. 12408467
  misc_feature: MA Experiment ID: 108535 Result: Up-regulated in Transcription
  misc_feature: MA Experiment 108535 PARAMETER Experiment Name: Zm_Meristem_P Parameter: Age (day) Value: 8
  misc_feature: MA Experiment 108535 PARAMETER Experiment Name: Zm_Meristem_P Parameter: Organism Value: Zea mays
  misc_feature: MA Experiment 108535 PARAMETER Experiment Name: Zm_Meristem_P Parameter: Plant Line Value: 35A19
  misc_feature: MA Experiment 108535 PARAMETER Experiment Name: Zm_Meristem_P Parameter: Tissue Value: Root Meristem vs. Above Root Meristem
  misc_feature: MA Experiment ID: 108543 Result: Up-regulated in Transcription
  misc_feature: MA Experiment ID: 108689 Result: Up-regulated in Transcription
  misc_feature: MA Experiment 108689 PARAMETER Experiment Name: Zm_Drought_Roots_P Parameter: Age (day) Value: 9
  misc_feature: MA Experiment 108689 PARAMETER Experiment Name: Zm_Drought_Roots_P Parameter: Organism Value: Zea mays
  misc_feature: MA Experiment 108689 PARAMETER Experiment Name: Zm_Drought_Roots_P Parameter: Plant Line Value: 35A19
  misc_feature: MA Experiment 108689 PARAMETER Experiment Name: Zm_Drought_Roots_P Parameter: Timepoint (hr) Value: 24
  misc_feature: MA Experiment 108689 PARAMETER Experiment Name: Zm_Drought_Roots_P Parameter: Tissue Value: Roots
  misc_feature: MA Experiment 108689 PARAMETER Experiment Name: Zm_Drought_Roots_P Parameter: Treatment Value: Drought vs. No Drought
  misc_feature: MA Experiment ID: 20000492 Result: Up-regulated in Transcription
  misc_feature: MA Experiment 20000492 PARAMETER Experiment Name: Zm_Hybrid_Seed_Dev_P Parameter: DAP Value: 12
  misc_feature: MA Experiment 20000492 PARAMETER Experiment Name: Zm_Hybrid_Seed_Dev_P Parameter: Organism Value: Zea mays
  misc_feature: MA Experiment 20000492 PARAMETER Experiment Name: Zm_Hybrid_Seed_Dev_P Parameter: Plant Line Value: 35A19
  misc_feature: MA Experiment 20000492 PARAMETER Experiment Name: Zm_Hybrid_Seed_Dev_P Parameter: Tissue Value: Fert Kernel vs. Unfert Floret
acgagaagggcaccgatctgggaaggcattgtcttgttgtactttcccttccggcagtggcctcgattcgcatccccttttcccgtccatgcgcgcgccggcgggcggtgccagtgccagtgccaccgcgctcgcggcggccatgaacattaagcagccgctgcacggcgcatcgacgctgttcgcgctgctctccctctcgctgctcctcctccgcctgctcctccgcctccgcctggcggccttccgcgacgcggcgctgtcgctccacctgctggcgcgcctccgcttccgccccgtcctcctctgcctcccgtcagcctgccacgacggcggcgccggcgccaccacgctgcgcgtctggtgccccgccgccccatcctccaagccgccgctgctcctcctccacggcttcggcggggacgccaagtggacgtgggcgcgcaacctcccgcgcctgtcccgccacttccacgtgtacgcgccggacctcgtgttcttcggcgcgcagtcccggtccgcgtcgccgctgcgctccgtggcgttccaggcccgctgcgccgccgaggccatgcgcctcctcggcgtgccccgctacgacgtcgcggggatcagctacggcggcttcgtcgcctaccggatggccgccgccgaggccagggacgccgtgggcaggctcgtcatcatgaccaccggcgtcgcggccacgcccggggagatgcgggcgatggcggcgcgcgaggaccgcaccgtcgaggatgcgctgctgccggacaccgccgaggggctgcgcttcctcgtaagacgctccatgcatcgccccccgccttggatgccggacttcgtgcttgacgacttcatccagctcatgtacgtggaccagaaaagggagagggcagagttgctgcacgaacttctcaagaccggagctggcttcgaccccctgccggttcttacccaggaaacactgatcatctggggcgacaaagaccaggtgttccccgtcgacctcggccacaggctgcacaggcttctgggcgagaggtccaggctagagatcgtcagggacgcagggcacgcgctgcagctggagggcgccgaccacgtcaaccgctccatcaagtcgttcctcctggacgagcgggtcggcccgggagccggcgcgggccgcaagtaggacgaggccttctcccgtccaggcccacaagcaaacggaggcctgctcgcagtcgcaggtgcctgcgtacttgcgttgcagagctgcaatgcaacagtgccaacgccagctgtagttaagcagcggagcggcaatgacctgcacgcacgcagacgcccccaccgccccgcaatcatgcagcgctggggctactggttacataagtacagagaagcgtcgctccggactactagtttgttttgtacaataatgtctgaaagaatgagcttgtgcggccgaaattccgagagctgtcttttgtctggtgccctggcgcgcacagtctgtctctgttgtttctttaggctcagccttatgggataacgacatatttaggacagctccaacaataatttgtaagctaaattcaagcattttattttatatttc

SEQ ID NO: 8452 - protein, 391 aa, Zea mays subsp. mays
  peptide (1)..(391): Ceres Seq. ID no. 12408468
  misc_feature (157)..(288): Pfam Name: alpha/beta hydrolase fold Pfam Description: alpha/beta hydrolase fold
  misc_feature (57)..(288): Homolog of NCBI NO: 27436747 NR Description: Hypothetical protein [Oryza sativa (japonica
  misc_feature (287)..(379): Homolog of NCBI NO: 27436747 NR Description: Hypothetical protein [Oryza sativa (japonica
  misc_feature (77)..(376): Homolog of NCBI NO: 33146617 NR Description: hydrolase-like protein [Oryza sativa (japonica
  misc_feature (104)..(384): Homolog of NCBI NO: 18420566 NR Description: Expressed protein; protein id: At4g39955.1,
  misc_feature (104)..(384): Homolog of NCBI NO: 21536873 NR Description: putative hydrolase [Arabidopsis thaliana]
  misc_feature (98)..(382): Homolog of NCBI NO: 37533664 NR Description: putative hydrolase [Oryza sativa (japonica >gi|19920100|gb|AAM08532.1| Putative hydrolase [Oryza sativa]
  misc_feature (109)..(379): Homolog of NCBI NO: 15242419 NR Description: putative hydrolase; protein id: At5g09430.1 thaliana] >gi|9955530|emb|CAC05469.1| putative hydrolase
  misc_feature (98)..(384): Homolog of NCBI NO: 27436745 NR Description: Hypothetical protein [Oryza sativa (japonica
  misc_feature (79)..(378): Homolog of NCBI NO: 21592821 NR Description: unknown [Arabidopsis thaliana]
  misc_feature (79)..(378): Homolog of NCBI NO: 18394481 NR Description: expressed protein; protein id: At1g17430.1, by cDNA: 32887. [Arabidopsis thaliana] >gi|25402829|pir||H86310
REGHRSGKALSCCTFPSGSGLDSHPLFPSMRAPAGGASASATALAAAMNIKQPLHGASTLFALLSLSLLLLRLLLRLRLAAFRDAALSLHLLARLRFRPVLLCLPSACHDGGAGATTLRVWCPAAPSSKPPLLLLHGFGGDAKWTWARNLPRLSRHFHVYAPDLVFFGAQSRSASPLRSVAFQARCAAEAMRLLGVPRYDVAGISYGGFVAYRMAAAEARDAVGRLVIMTTGVAATPGEMRAMAAREDRTVEDALLPDTAEGLRFLVRRSMHRPPPWMPDFVLDDFIQLMYVDQKRERAELLHELLKTGAGFDPLPVLTQETLIIWGDKDQVFPVDLGHRLHRLLGERSRLEIVRDAGHALQLEGADHVNRSIKSFLLDERVGPGAGAGRK

SEQ ID NO: 8453 - protein, 362 aa, Zea mays subsp. mays
  peptide (1)..(362): Ceres Seq. ID no. 12408469
  misc_feature (128)..(259): Pfam Name: alpha/beta hydrolase fold Pfam Description: alpha/beta hydrolase fold
  misc_feature (28)..(259): Homolog of NCBI NO: 27436747 NR Description: Hypothetical protein [Oryza sativa (japonica
  misc_feature (258)..(350): Homolog of NCBI NO: 27436747 NR Description: Hypothetical protein [Oryza sativa (japonica
  misc_feature (48)..(347): Homolog of NCBI NO: 33146617 NR Description: hydrolase-like protein [Oryza sativa (japonica
  misc_feature (75)..(355): Homolog of NCBI NO: 18420566 NR Description: Expressed protein; protein id: At4g39955.1,
  misc_feature (75)..(355): Homolog of NCBI NO: 21536873 NR Description: putative hydrolase [Arabidopsis thaliana]
  misc_feature (69)..(353): Homolog of NCBI NO: 37533664 NR Description: putative hydrolase [Oryza sativa (japonica >gi|19920100|gb|AAM08532.1| Putative hydrolase [Oryza sativa]
  misc_feature (80)..(350): Homolog of NCBI NO: 15242419 NR Description: putative hydrolase; protein id: At5g09430.1 thaliana] >gi|9955530|emb|CAC05469.1| putative hydrolase
  misc_feature (69)..(355): Homolog of NCBI NO: 27436745 NR Description: Hypothetical protein [Oryza sativa (japonica
  misc_feature (50)..(349): Homolog of NCBI NO: 21592821 NR Description: unknown [Arabidopsis thaliana]
  misc_feature (50)..(349): Homolog of NCBI NO: 18394481 NR Description: expressed protein; protein id: At1g17430.1, by cDNA: 32887. [Arabidopsis thaliana] >gi|25402829|pir||H86310
MRAPAGGASASATALAAAMNIKQPLHGASTLFALLSLSLLLLRLLLRLRLAAFRDAALSLHLLARLRFRPVLLCLPSACHDGGAGATTLRVWCPAAPSSKPPLLLLHGFGGDAKWTWARNLPRLSRHFHVYAPDLVFFGAQSRSASPLRSVAFQARCAAEAMRLLGVPRYDVAGISYGGFVAYRMAAAEARDAVGRLVIMTTGVAATPGEMRAMAAREDRTVEDALLPDTAEGLRFLVRRSMHRPPPWMPDFVLDDFIQLMYVDQKRERAELLHELLKTGAGFDPLPVLTQETLIIWGDKDQVFPVDLGHRLHRLLGERSRLEIVRDAGHALQLEGADHVNRSIKSFLLDERVGPGAGAGRK

SEQ ID NO: 8454 - protein, 344 aa, Zea mays subsp. mays
  peptide (1)..(344): Ceres Seq. ID no. 12408470
  misc_feature (110)..(241): Pfam Name: alpha/beta hydrolase fold Pfam Description: alpha/beta hydrolase fold
  misc_feature (10)..(241): Homolog of NCBI NO: 27436747 NR Description: Hypothetical protein [Oryza sativa (japonica
  misc_feature (240)..(332): Homolog of NCBI NO: 27436747 NR Description: Hypothetical protein [Oryza sativa (japonica
  misc_feature (30)..(329): Homolog of NCBI NO: 33146617 NR Description: hydrolase-like protein [Oryza sativa (japonica
  misc_feature (57)..(337): Homolog of NCBI NO: 18420566 NR Description: Expressed protein; protein id: At4g39955.1,
  misc_feature (57)..(337): Homolog of NCBI NO: 21536873 NR Description: putative hydrolase [Arabidopsis thaliana]
  misc_feature (51)..(335): Homolog of NCBI NO: 37533664 NR Description: putative hydrolase [Oryza sativa (japonica >gi|19920100|gb|AAM08532.1| Putative hydrolase [Oryza sativa]
  misc_feature (62)..(332): Homolog of NCBI NO: 15242419 NR Description: putative hydrolase; protein id: At5g09430.1 thaliana] >gi|9955530|emb|CAC05469.1| putative hydrolase
  misc_feature (51)..(337): Homolog of NCBI NO: 27436745 NR Description: Hypothetical protein [Oryza sativa (japonica
  misc_feature (32)..(331): Homolog of NCBI NO: 21592821 NR Description: unknown [Arabidopsis thaliana]
  misc_feature (32)..(331): Homolog of NCBI NO: 18394481 NR Description: expressed protein; protein id: At1g17430.1, by cDNA: 32887. [Arabidopsis thaliana] >gi|25402829|pir||H86310
MNIKQPLHGASTLFALLSLSLLLLRLLLRLRLAAFRDAALSLHLLARLRFRPVLLCLPSACHDGGAGATTLRVWCPAAPSSKPPLLLLHGFGGDAKWTWARNLPRLSRHFHVYAPDLVFFGAQSRSASPLRSVAFQARCAAEAMRLLGVPRYDVAGISYGGFVAYRMAAAEARDAVGRLVIMTTGVAATPGEMRAMAAREDRTVEDALLPDTAEGLRFLVRRSMHRPPPWMPDFVLDDFIQLMYVDQKRERAELLHELLKTGAGFDPLPVLTQETLIIWGDKDQVFPVDLGHRLHRLLGERSRLEIVRDAGHALQLEGADHVNRSIKSFLLDERVGPGAGAGRK

SEQ ID NO: 8455 - DNA, 1182 bp, Zea mays subsp. mays
  misc_feature (1)..(1182): Ceres Seq. ID no. 12352605
  misc_feature: MA Experiment ID: 108522 Result: Down-regulated in Transcription
  misc_feature: MA Experiment 108522 PARAMETER Experiment Name: Zm_42deg_Heat_P Parameter: Age (day) Value: 8
  misc_feature: MA Experiment 108522 PARAMETER Experiment Name: Zm_42deg_Heat_P Parameter: Organism Value: Zea mays
  misc_feature: MA Experiment 108522 PARAMETER Experiment Name: Zm_42deg_Heat_P Parameter: Plant Line Value: 35A19
  misc_feature: MA Experiment 108522 PARAMETER Experiment Name: Zm_42deg_Heat_P Parameter: Temperature (deg C) Value: 42 vs. 22
  misc_feature: MA Experiment 108522 PARAMETER Experiment Name: Zm_42deg_Heat_P Parameter: Timepoint (hr) Value: 1
  misc_feature: MA Experiment 108522 PARAMETER Experiment Name: Zm_42deg_Heat_P Parameter: Tissue Value: Aerial
  misc_feature: MA Experiment ID: 108527 Result: Up-regulated in Transcription
  misc_feature: MA Experiment 108527 PARAMETER Experiment Name: Zm_5mM_NO_P Parameter: Age (day) Value: 8
  misc_feature: MA Experiment 108527 PARAMETER Experiment Name: Zm_5mM_NO_P Parameter: Organism Value: Zea mays
  misc_feature: MA Experiment 108527 PARAMETER Experiment Name: Zm_5mM_NO_P Parameter: Plant Line Value: 35A19
  misc_feature: MA Experiment 108527 PARAMETER Experiment Name: Zm_5mM_NO_P Parameter: Timepoint (hr) Value: 6
  misc_feature: MA Experiment 108527 PARAMETER Experiment Name: Zm_5mM_NO_P Parameter: Tissue Value: Aerial
  misc_feature: MA Experiment 108527 PARAMETER Experiment Name: Zm_5mM_NO_P Parameter: Treatment Value: 5mM NO vs. No Treatment
  misc_feature: MA Experiment ID: 108533 Result: Down-regulated in Transcription
  misc_feature: MA Experiment 108533 PARAMETER Experiment Name: Zm_4deg_Cold_P Parameter: Age (hr) Value: 8
  misc_feature: MA Experiment 108533 PARAMETER Experiment Name: Zm_4deg_Cold_P Parameter: Organism Value: Zea mays
  misc_feature: MA Experiment 108533 PARAMETER Experiment Name: Zm_4deg_Cold_P Parameter: Plant Line Value: 35A19
  misc_feature: MA Experiment 108533 PARAMETER Experiment Name: Zm_4deg_Cold_P Parameter: Temperature (deg C) Value: 4 vs. 22
  misc_feature: MA Experiment 108533 PARAMETER Experiment Name: Zm_4deg_Cold_P Parameter: Timepoint (hr) Value: 1
  misc_feature: MA Experiment 108533 PARAMETER Experiment Name: Zm_4deg_Cold_P Parameter: Tissue Value: Aerial
  misc_feature: MA Experiment ID: 108687 Result: Down-regulated in Transcription
  misc_feature: MA Experiment 108687 PARAMETER Experiment Name: Zm_Embryos-Flowers__P Parameter: Tissue Value: Embryo vs. Aerial+
  misc_feature: MA Experiment ID: 20000108 Result: Down-regulated in Transcription
  misc_feature: MA Experiment 20000108 PARAMETER Experiment Name: Zm_Root-Tips_P Parameter: Age (day) Value: 12
  misc_feature: MA Experiment 20000108 PARAMETER Experiment Name: Zm_Root-Tips_P Parameter: Organism Value: Zea mays
  misc_feature: MA Experiment 20000108 PARAMETER Experiment Name: Zm_Root-Tips_P Parameter: Tissue Value: Root tips vs. Root mid region    35
  misc_feature: MA Experiment 20000108 PARAMETER Experiment Name: Zm_Root-Tips_P Parameter: Tissue Value: Root tips vs. Root mid region   Sequence Listing-Misc Features (4)
  misc_feature: MA Experiment ID: 20000532 Result: Up-regulated in Transcription
  misc_feature: MA Experiment 20000532 PARAMETER Experiment Name: Zm_0.001percent_MeJA_P Parameter: Age (day) Value: 10
  misc_feature: MA Experiment 20000532 PARAMETER Experiment Name: Zm_0.001percent_MeJA_P Parameter: Organism Value: Zea mays
  misc_feature: MA Experiment 20000532 PARAMETER Experiment Name: Zm_0.001percent_MeJA_P Parameter: Plant Line Value: 35A19
  misc_feature: MA Experiment 20000532 PARAMETER Experiment Name: Zm_0.001percent_MeJA_P Parameter: Timepoint (hr) Value: 48
  misc_feature: MA Experiment 20000532 PARAMETER Experiment Name: Zm_0.001percent_MeJA_P Parameter: Tissue Value: Aerial
  misc_feature: MA Experiment 20000532 PARAMETER Experiment Name: Zm_0.001percent_MeJA_P Parameter: Treatment Value: 0.001percent MeJA vs. No Treatment
  misc_feature: MA Experiment ID: 20000533 Result: Up-regulated in Transcription
  misc_feature: MA Experiment 20000533 PARAMETER Experiment Name: Zm_0.001percent_MeJA_P Parameter: Age (day) Value: 11
  misc_feature: MA Experiment 20000533 PARAMETER Experiment Name: Zm_0.001percent_MeJA_P Parameter: Organism Value: Zea mays
  misc_feature: MA Experiment 20000533 PARAMETER Experiment Name: Zm_0.001percent_MeJA_P Parameter: Plant Line Value: 35A19
  misc_feature: MA Experiment 20000533 PARAMETER Experiment Name: Zm_0.001percent_MeJA_P Parameter: Timepoint (hr) Value: 72
  misc_feature: MA Experiment 20000533 PARAMETER Experiment Name: Zm_0.001percent_MeJA_P Parameter: Tissue Value: Aerial
  misc_feature: MA Experiment 20000533 PARAMETER Experiment Name: Zm_0.001percent_MeJA_P Parameter: Treatment Value: 0.001percent MeJA vs. No Treatment
  misc_feature: MA Experiment ID: 20000535 Result: Down-regulated in Transcription
  misc_feature: MA Experiment 20000535 PARAMETER Experiment Name: Zm_Hybrid_Seed_Dev_P Parameter: DAP Value: 30 vs. 12
  misc_feature: MA Experiment 20000535 PARAMETER Experiment Name: Zm_Hybrid_Seed_Dev_P Parameter: Organism Value: Zea mays
  misc_feature: MA Experiment 20000535 PARAMETER Experiment Name: Zm_Hybrid_Seed_Dev_P Parameter: Plant Line Value: 35A19
  misc_feature: MA Experiment 20000535 PARAMETER Experiment Name: Zm_Hybrid_Seed_Dev_P Parameter: Tissue Value: Embryo vs. Unfert Floret
  misc_feature: MA Experiment ID: 20000626 Result: Up-regulated in Transcription
  misc_feature: MA Experiment 20000626 PARAMETER Experiment Name: Zm_Herbicide-Treatments_P Parameter: Timepoint (hr) Value: 12
  misc_feature: MA Experiment 20000626 PARAMETER Experiment Name: Zm_Herbicide-Treatments_P Parameter: Tissue Value: Aerial
  misc_feature: MA Experiment 20000626 PARAMETER Experiment Name: Zm_Herbicide-Treatments_P Parameter: Treatment Value: Roundup vs. No Treatment
aacctgtgcttccttccgtcgtcttcctgcctcctcttctgttcaccgctctggcgctctcctatactcttctctctctctcgctgaggcaggcggggggcagcctttcctccccggtcgccatcctcgtttatatacacacaccctctcttgccgaaccactgctcgcttctctgcctgcttctgcttgagtcgtgccagtgacccgtgaccgtgaccgcgagcttcagggacgcgggcggcggcgatcatggcgtggcgcggcccgctcggagccggagaggaggccctggacagcggcctcgagctcagcctcggcctcccggcatacttcgcccggccttcaggtttggacgccgccagggaggagcccgccgaggcctctgtctacgctatccaggccgccagtgggagcaatgtctccaaggcaagggtcaggccagcgggcgcggcgccggtggtggggtggccgccggtgcggtcgttccggaggaacctggccgcctcctcctccaggccgtcgtcggggaaacacacccgccaggagggcagcgccaaggacggcctgttcgtgaagatcaacatggacggcgtgccgatcaggcgcaaggtggacctcacggcgtacggcggctacgccgacctctccgccgccgtcggcaagctcttccgcggcctgcttgccgctcagagggaccgagcggccacggcgggtggcgaggaggaggaggagggggagggccccgtgatcggcggcgactacacgctggtgtacgaggacgacgagggcgacagggtccttgccggcgacgtcccctgggagatgttcgtggccaccgccaagaggctgcgcgtgctcaagagctccgacgtgccggcctcgtcggtgacgctgggagctgggggcccggagaggtctgcagccgactgctgctgctgaaacgtgctctgcttcgtcagctgcttgtaaaaagtcccgagtggaggagacgaggagtggccctatccctggcctcttttttgtgtgttgctcttgctgcctttctgctagtggtactagtattgggtgccagtaaaaagtaggagaacaaagtcatgacggtattaaggatgtaatgtgcaagattagcagtggtagtagtcgtaaggtgtttaatgaatctacggtctctgttttggggc

SEQ ID NO: 8456 - protein, 229 aa, Zea mays subsp. mays
  peptide (1)..(229): Ceres Seq. ID no. 12352606
  misc_feature (19)..(209): Pfam Name: AUX/IAA family Pfam Description: AUX/IAA family
  misc_feature (1)..(226): Homolog of NCBI NO: 34906394 NR Description: P0710E05.9 [Oryza sativa (japonica
  misc_feature (99)..(222): Homolog of NCBI NO: 15218080 NR Description: auxin regulated protein IAA18, putative; protein At1g51950.1, supported by cDNA: 6493., supported by cDNA: supported by cDNA: gi_15810072 [Arabidopsis thaliana]
  misc_feature (18)..(100): Homolog of NCBI NO: 15218080 NR Description: auxin regulated protein IAA18, putative; protein At1g51950.1, supported by cDNA: 6493., supported by cDNA: supported by cDNA: gi_15810072 [Arabidopsis thaliana]
  misc_feature (99)..(222): Homolog of NCBI NO: 21594025 NR Description: auxin regulated protein IAA18, putative
  misc_feature (18)..(100): Homolog of NCBI NO: 21594025 NR Description: auxin regulated protein IAA18, putative
  misc_feature (50)..(222): Homolog of NCBI NO: 4093155 NR Description: phytochrome-associated protein 1 [Arabidopsis
  misc_feature (50)..(222): Homolog of NCBI NO: 21593333 NR Description: phytochrome-associated protein 1 (PAP1)
  misc_feature (50)..(222): Homolog of NCBI NO: 15228226 NR Description: phytochrome-associated protein 1 (PAP1); protein At3g16500.1, supported by cDNA: 38146., supported by cDNA: supported by cDNA: gi_14423421, supported by cDNA: gi_18377501,
  misc_feature (18)..(222): Homolog of NCBI NO: 25296228 NR Description: auxin-induced protein IAA18 [imported] - thaliana (fragment) >gi|2618725|gb|AAB84355.1| IAA18 [Arabidopsis
  misc_feature (54)..(217): Homolog of NCBI NO: 34909384 NR Description: putative phytochrome-associated protein [Oryza
MAWRGPLGAGEEALDSGLELSLGLPAYFARPSGLDAAREEPAEASVYAIQAASGSNVSKARVRPAGAAPVVGWPPVRSFRRNLAASSSRPSSGKHTRQEGSAKDGLFVKINMDGVPIRRKVDLTAYGGYADLSAAVGKLFRGLLAAQRDRAATAGGEEEEEGEGPVIGGDYTLVYEDDEGDRVLAGDVPWEMFVATAKRLRVLKSSDVPASSVTLGAGGPERSAADCCC

SEQ ID NO: 8457 - protein, 118 aa, Zea mays subsp. mays
  peptide (1)..(118): Ceres Seq. ID no. 12352607
  misc_feature (1)..(98): Pfam Name: AUX/IAA family Pfam Description: AUX/IAA family
  misc_feature (1)..(115): Homolog of NCBI NO: 34906394 NR Description: P0710E05.9 [Oryza sativa (japonica
  misc_feature (1)..(111): Homolog of NCBI NO: 15218080 NR Description: auxin regulated protein IAA18, putative; protein At1g51950.1, supported by cDNA: 6493., supported by cDNA: supported by cDNA: gi_15810072 [Arabidopsis thaliana]
  misc_feature (1)..(111): Homolog of NCBI NO: 21594025 NR Description: auxin regulated protein IAA18, putative
  misc_feature (1)..(111): Homolog of NCBI NO: 4093155 NR Description: phytochrome-associated protein 1 [Arabidopsis
  misc_feature (1)..(111): Homolog of NCBI NO: 21593333 NR Description: phytochrome-associated protein 1 (PAP1)
  misc_feature (1)..(111): Homolog of NCBI NO: 15228226 NR Description: phytochrome-associated protein 1 (PAP1); protein At3g16500.1, supported by cDNA: 38146., supported by cDNA: supported by cDNA: gi_14423421, supported by cDNA: gi_18377501,
  misc_feature (1)..(111): Homolog of NCBI NO: 25296228 NR Description: auxin-induced protein IAA18 [imported] - thaliana (fragment) >gi|2618725|gb|AAB84355.1| IAA18 [Arabidopsis
  misc_feature (1)..(106): Homolog of NCBI NO: 34909384 NR Description: putative phytochrome-associated protein [Oryza
  misc_feature (1)..(96): Homolog of NCBI NO: 20269051 NR Description: aux/IAA protein [Populus tremula x Populus
  misc_feature (1)..(96): Homolog of NCBI NO: 29465672 NR Description: Aux/IAA protein [Vitis vinifera]
MDGVPIRRKVDLTAYGGYADLSAAVGKLFRGLLAAQRDRAATAGGEEEEEGEGPVIGGDYTLVYEDDEGDRVLAGDVPWEMFVATAKRLRVLKSSDVPASSVTLGAGGPERSAADCCC

SEQ ID NO: 8458 - DNA, 469 bp, Zea mays subsp. mays
  misc_feature (1)..(469): Ceres Seq. ID no. 1439681
  misc_feature: MA Experiment ID: 108535 Result: Down-regulated in Transcription
  misc_feature: MA Experiment 108535 PARAMETER Experiment Name: Zm_Meristem_P Parameter: Age (day) Value: 8
  misc_feature: MA Experiment 108535 PARAMETER Experiment Name: Zm_Meristem_P Parameter: Organism Value: Zea mays
  misc_feature: MA Experiment 108535 PARAMETER Experiment Name: Zm_Meristem_P Parameter: Plant Line Value: 35A19
  misc_feature: MA Experiment 108535 PARAMETER Experiment Name: Zm_Meristem_P Parameter: Tissue Value: Root Meristem vs. Above Root Meristem
  misc_feature: MA Experiment ID: 108544 Result: Up-regulated in Transcription
  misc_feature: MA Experiment ID: 108556 Result: Up-regulated in Transcription
  misc_feature: MA Experiment 108556 PARAMETER Experiment Name: Zm_Drought_P Parameter: Age (day) Value: 9
  misc_feature: MA Experiment 108556 PARAMETER Experiment Name: Zm_Drought_P Parameter: Organism Value: Zea mays
  misc_feature: MA Experiment 108556 PARAMETER Experiment Name: Zm_Drought_P Parameter: Plant Line Value: 35A19
  misc_feature: MA Experiment 108556 PARAMETER Experiment Name: Zm_Drought_P Parameter: Timepoint (hr) Value: 24
  misc_feature: MA Experiment 108556 PARAMETER Experiment Name: Zm_Drought_P Parameter: Tissue Value: Aerial
  misc_feature: MA Experiment 108556 PARAMETER Experiment Name: Zm_Drought_P Parameter: Treatment Value: Drought vs. No Drought
  misc_feature: MA Experiment ID: 108597 Result: Up-regulated in Transcription
  misc_feature: MA Experiment 108597 PARAMETER Experiment Name: Zm_100uM_ABA_P Parameter: Age (day) Value: 9
  misc_feature: MA Experiment 108597 PARAMETER Experiment Name: Zm_100uM_ABA_P Parameter: Organism Value: Zea mays
  misc_feature: MA Experiment 108597 PARAMETER Experiment Name: Zm_100uM_ABA_P Parameter: Plant Line Value: 35A19
  misc_feature: MA Experiment 108597 PARAMETER Experiment Name: Zm_100uM_ABA_P Parameter: Timepoint (hr) Value: 24
  misc_feature: MA Experiment 108597 PARAMETER Experiment Name: Zm_100uM_ABA_P Parameter: Tissue Value: Aerial
  misc_feature: MA Experiment 108597 PARAMETER Experiment Name: Zm_100uM_ABA_P Parameter: Treatment Value: 100uM ABA vs. No Treatment
  misc_feature: MA Experiment ID: 108689 Result: Up-regulated in Transcription
  misc_feature: MA Experiment 108689 PARAMETER Experiment Name: Zm_Drought_Roots_P Parameter: Age (day) Value: 9
  misc_feature: MA Experiment 108689 PARAMETER Experiment Name: Zm_Drought_Roots_P Parameter: Organism Value: Zea mays
  misc_feature: MA Experiment 108689 PARAMETER Experiment Name: Zm_Drought_Roots_P Parameter: Plant Line Value: 35A19
  misc_feature: MA Experiment 108689 PARAMETER Experiment Name: Zm_Drought_Roots_P Parameter: Timepoint (hr) Value: 24
  misc_feature: MA Experiment 108689 PARAMETER Experiment Name: Zm_Drought_Roots_P Parameter: Tissue Value: Roots
  misc_feature: MA Experiment 108689 PARAMETER Experiment Name: Zm_Drought_Roots_P Parameter: Treatment Value: Drought vs. No Drought
  misc_feature: MA Experiment ID: 20000479 Result: Up-regulated in Transcription
  misc_feature: MA Experiment 20000479 PARAMETER Experiment Name: Zm_Drought_P Parameter: Age (day) Value: 10
  misc_feature: MA Experiment 20000479 PARAMETER Experiment Name: Zm_Drought_P Parameter: Organism Value: Zea mays
  misc_feature: MA Experiment 20000479 PARAMETER Experiment Name: Zm_Drought_P Parameter: Plant Line Value: 35A19
  misc_feature: MA Experiment 20000479 PARAMETER Experiment Name: Zm_Drought_P Parameter: Timepoint (hr) Value: 48
  misc_feature: MA Experiment 20000479 PARAMETER Experiment Name: Zm_Drought_P Parameter: Tissue Value: Aerial
  misc_feature: MA Experiment 20000479 PARAMETER Experiment Name: Zm_Drought_P Parameter: Treatment Value: Drought vs. No Drought
  misc_feature: MA Experiment ID: 20000480 Result: Up-regulated in Transcription
  misc_feature: MA Experiment 20000480 PARAMETER Experiment Name: Zm_Drought_P Parameter: Age (day) Value: 11
  misc_feature: MA Experiment 20000480 PARAMETER Experiment Name: Zm_Drought_P Parameter: Organism Value: Zea mays
  misc_feature: MA Experiment 20000480 PARAMETER Experiment Name: Zm_Drought_P Parameter: Plant Line Value: 35A19
  misc_feature: MA Experiment 20000480 PARAMETER Experiment Name: Zm_Drought_P Parameter: Timepoint (hr) Value: 72
  misc_feature: MA Experiment 20000480 PARAMETER Experiment Name: Zm_Drought_P Parameter: Tissue Value: Aerial
  misc_feature: MA Experiment 20000480 PARAMETER Experiment Name: Zm_Drought_P Parameter: Treatment Value: Drought vs. No Drought
  misc_feature: MA Experiment ID: 20000487 Result: Up-regulated in Transcription
  misc_feature: MA Experiment 20000487 PARAMETER Experiment Name: Zm_50mM_NH4NO3_L_to_H_P Parameter: Organism Value: Zea mays
  misc_feature: MA Experiment 20000487 PARAMETER Experiment Name: Zm_50mM_NH4NO3_L_to_H_P Parameter: Timepoint (hr) Value: 4
  misc_feature: MA Experiment 20000487 PARAMETER Experiment Name: Zm_50mM_NH4NO3_L_to_H_P Parameter: Tissue Value: Leaves
  misc_feature: MA Experiment 20000487 PARAMETER Experiment Name: Zm_50mM_NH4NO3_L_to_H_P Parameter: Treatment Value: 50mM NH4NO3 vs. 100mM Mannitol
  misc_feature: MA Experiment ID: 20000535 Result: Up-regulated in Transcription
  misc_feature: MA Experiment 20000535 PARAMETER Experiment Name: Zm_Hybrid_Seed_Dev_P Parameter: DAP Value: 30 vs. 12
  misc_feature: MA Experiment 20000535 PARAMETER Experiment Name: Zm_Hybrid_Seed_Dev_P Parameter: Organism Value: Zea mays
  misc_feature: MA Experiment 20000535 PARAMETER Experiment Name: Zm_Hybrid_Seed_Dev_P Parameter: Plant Line Value: 35A19
  misc_feature: MA Experiment 20000535 PARAMETER Experiment Name: Zm_Hybrid_Seed_Dev_P Parameter: Tissue Value: Embryo vs. Unfert Floret
ctcggtaaggaatccccttttaagggttgctcgggttcctcttcctgctgcgattcatcccgttcttgccccctacggttcaccccggagcgcgtttcctggtcaactaaggccggcatgaagggctgctcagagcgcttgctgtttctgctgctgctgctggcatcgtcgtcgttactgtccgctgtgattgccgcgcasagaacttgccccgccgacctcgacagcaaatgcgatggtggcgcgtctgatgatgattgggagggggagttcttccccggcgtcccgaaaatcaagtatgagggtccaacaagcaagaaccctcttgcttataagtggtataacaaggaggaagtgattctcggtaagaagatgaaggattggatgcgcttcagtgttgcgttctggcacacgttccgcggtactggcgctgatcctttcggtgctcctacaaakacttggccttggg

SEQ ID NO: 8459 - protein, 156 aa, Zea mays subsp. mays
  peptide (1)..(156): Ceres Seq. ID no. 1439682
  misc_feature (50)..(155): Homolog of NCBI NO: 34395196 NR Description: putative xylose isomerase [Oryza sativa (japonica
  misc_feature (50)..(155): Homolog of NCBI NO: 34899308 NR Description: putative xylose isomerase [Oryza sativa (japonica
  misc_feature (50)..(155): Homolog of NCBI NO: 2130051 NR Description: xylose isomerase (EC 5.3.1.5) - barley xylose isomerase [Hordeum vulgare subsp. vulgare]
  misc_feature (50)..(155): Homolog of NCBI NO: 6175480 NR Description: Xylose isomerase >gi|1296809|emb|CAA64545.1|
  misc_feature (45)..(155): Homolog of NCBI NO: 17433690 NR Description: Xylose isomerase >gi|9758328|dbj|BAB08802.1|
  misc_feature (45)..(155): Homolog of NCBI NO: 30696901 NR Description: expressed protein [Arabidopsis thaliana]
  misc_feature (45)..(155): Homolog of NCBI NO: 30696904 NR Description: expressed protein [Arabidopsis thaliana] expressed protein; supported by full length cDNA: Ceres: 122798 thaliana] >gi|30387571|gb|AAP31951.1| At5g57655 [Arabidopsis
  misc_feature (45)..(155): Homolog of NCBI NO: 21537178 NR Description: xylose isomerase [Arabidopsis thaliana]
  misc_feature (92)..(155): Homolog of NCBI NO: 32472084 NR Description: xylose isomerase [Pirellula sp.]
  misc_feature (90)..(155): Homolog of NCBI NO: 139827 NR Description: Xylose isomerase >gi|68441|pir||ISCLXH xylose
  misc_feature (67)..(67): Xaa is any aa, unknown or other
  misc_feature (152)..(152): Xaa is any aa, unknown or other
LGKESPFKGCSGSSSCCDSSRSCPLRFTPERVSWSTKAGMKGCSERLLFLLLLLASSSLLSAVIAAXRTCPADLDSKCDGGASDDDWEGEFFPGVPKIKYEGPTSKNPLAYKWYNKEEVILGKKMKDWMRFSVAFWHTFRGTGADPFGAPTXTWPW

SEQ ID NO: 8460 - protein, 117 aa, Zea mays subsp. mays
  peptide (1)..(117): Ceres Seq. ID no. 1439683
  misc_feature (11)..(116): Homolog of NCBI NO: 34395196 NR Description: putative xylose isomerase [Oryza sativa (japonica
  misc_feature (11)..(116): Homolog of NCBI NO: 34899308 NR Description: putative xylose isomerase [Oryza sativa (japonica
  misc_feature (11)..(116): Homolog of NCBI NO: 2130051 NR Description: xylose isomerase (EC 5.3.1.5) - barley xylose isomerase [Hordeum vulgare subsp. vulgare]
  misc_feature (11)..(116): Homolog of NCBI NO: 6175480 NR Description: Xylose isomerase >gi|1296809|emb|CAA64545.1|
  misc_feature (6)..(116): Homolog of NCBI NO: 17433690 NR Description: Xylose isomerase >gi|9758328|dbj|BAB08802.1|
  misc_feature (6)..(116): Homolog of NCBI NO: 30696901 NR Description: expressed protein [Arabidopsis thaliana]
  misc_feature (6)..(116): Homolog of NCBI NO: 30696904 NR Description: expressed protein [Arabidopsis thaliana] expressed protein; supported by full length cDNA: Ceres: 122798 thaliana] >gi|30387571|gb|AAP31951.1| At5g57655 [Arabidopsis
  misc_feature (6)..(116): Homolog of NCBI NO: 21537178 NR Description: xylose isomerase [Arabidopsis thaliana]
  misc_feature (53)..(116): Homolog of NCBI NO: 32472084 NR Description: xylose isomerase [Pirellula sp.]
  misc_feature (51)..(116): Homolog of NCBI NO: 139827 NR Description: Xylose isomerase >gi|68441|pir||ISCLXH xylose
  misc_feature (28)..(28): Xaa is any aa, unknown or other
  misc_feature (113)..(113): Xaa is any aa, unknown or other
MKGCSERLLFLLLLLASSSLLSAVIAAXRTCPADLDSKCDGGASDDDWEGEFFPGVPKIKYEGPTSKNPLAYKWYNKEEVILGKKMKDWMRFSVAFWHTFRGTGADPFGAPTXTWPW

SEQ ID NO: 8461 - DNA, 1585 bp, Zea mays subsp. mays
  misc_feature (1)..(1585): Ceres Seq. ID no. 12408463
  misc_feature: MA Experiment ID: 108528 Result: Up-regulated in Transcription
  misc_feature: MA Experiment 108528 PARAMETER Experiment Name: Zm_Imbibed_Seeds_P Parameter: Age (day) Value: 5 vs. 2
  misc_feature: MA Experiment 108528 PARAMETER Experiment Name: Zm_Imbibed_Seeds_P Parameter: Organism Value: Zea mays
  misc_feature: MA Experiment 108528 PARAMETER Experiment Name: Zm_Imbibed_Seeds_P Parameter: Plant Line Value: 35A19
  misc_feature: MA Experiment 108528 PARAMETER Experiment Name: Zm_Imbibed_Seeds_P Parameter: Tissue Value: Aerial vs. Embryo
  misc_feature: MA Experiment ID: 108530 Result: Up-regulated in Transcription
  misc_feature: MA Experiment 108530 PARAMETER Experiment Name: Zm_Imbibed_Seeds_P Parameter: Age (day) Value: 6 vs. 2
  misc_feature: MA Experiment 108530 PARAMETER Experiment Name: Zm_Imbibed_Seeds_P Parameter: Organism Value: Zea mays
  misc_feature: MA Experiment 108530 PARAMETER Experiment Name: Zm_Imbibed_Seeds_P Parameter: Plant Line Value: 35A19
  misc_feature: MA Experiment 108530 PARAMETER Experiment Name: Zm_Imbibed_Seeds_P Parameter: Tissue Value: Aerial vs. Embryo
  misc_feature: MA Experiment ID: 108534 Result: Up-regulated in Transcription
  misc_feature: MA Experiment 108534 PARAMETER Experiment Name: Zm_4deg_Cold_P Parameter: Age (hr) Value: 8
  misc_feature: MA Experiment 108534 PARAMETER Experiment Name: Zm_4deg_Cold_P Parameter: Organism Value: Zea mays
  misc_feature: MA Experiment 108534 PARAMETER Experiment Name: Zm_4deg_Cold_P Parameter: Plant Line Value: 35A19
  misc_feature: MA Experiment 108534 PARAMETER Experiment Name: Zm_4deg_Cold_P Parameter: Temperature (deg C) Value: 4 vs. 22
  misc_feature: MA Experiment 108534 PARAMETER Experiment Name: Zm_4deg_Cold_P Parameter: Timepoint (hr) Value: 6
  misc_feature: MA Experiment 108534 PARAMETER Experiment Name: Zm_4deg_Cold_P Parameter: Tissue Value: Aerial
  misc_feature: MA Experiment ID: 108536 Result: Up-regulated in Transcription
  misc_feature: MA Experiment 108536 PARAMETER Experiment Name: Zm_Meristem_P Parameter: Age (day) Value: 8
  misc_feature: MA Experiment 108536 PARAMETER Experiment Name: Zm_Meristem_P Parameter: Organism Value: Zea mays
  misc_feature: MA Experiment 108536 PARAMETER Experiment Name: Zm_Meristem_P Parameter: Plant Line Value: 35A19
  misc_feature: MA Experiment 108536 PARAMETER Experiment Name: Zm_Meristem_P Parameter: Tissue Value: Shoot Meristem vs. Above Shoot Meristem
  misc_feature: MA Experiment ID: 108542 Result: Up-regulated in Transcription
  misc_feature: MA Experiment 108542 PARAMETER Experiment Name: Zm_150mM_NaCl_P Parameter: Age (day) Value: 8
  misc_feature: MA Experiment 108542 PARAMETER Experiment Name: Zm_150mM_NaCl_P Parameter: Organism Value: Zea mays
  misc_feature: MA Experiment 108542 PARAMETER Experiment Name: Zm_150mM_NaCl_P Parameter: Plant Line Value: 35A19
  misc_feature: MA Experiment 108542 PARAMETER Experiment Name: Zm_150mM_NaCl_P Parameter: Timepoint (hr) Value: 6
  misc_feature: MA Experiment 108542 PARAMETER Experiment Name: Zm_150mM_NaCl_P Parameter: Tissue Value: Aerial
  misc_feature: MA Experiment 108542 PARAMETER Experiment Name: Zm_150mM_NaCl_P Parameter: Treatment Value: 150mM NaCl vs. No Treatment
  misc_feature: MA Experiment ID: 108547 Result: Up-regulated in Transcription
  misc_feature: MA Experiment 108547 PARAMETER Experiment Name: Zm_Imbibed_Seeds_P Parameter: Age (day) Value: 4 vs. 2
  misc_feature: MA Experiment 108547 PARAMETER Experiment Name: Zm_Imbibed_Seeds_P Parameter: Organism Value: Zea mays
  misc_feature: MA Experiment 108547 PARAMETER Experiment Name: Zm_Imbibed_Seeds_P Parameter: Plant Line Value: 35A19
  misc_feature: MA Experiment 108547 PARAMETER Experiment Name: Zm_Imbibed_Seeds_P Parameter: Tissue Value: Aerial vs. Embryo
  misc_feature: MA Experiment ID: 20000533 Result: Up-regulated in Transcription
  misc_feature: MA Experiment 20000533 PARAMETER Experiment Name: Zm_0.001percent_MeJA_P Parameter: Age (day) Value: 11
  misc_feature: MA Experiment 20000533 PARAMETER Experiment Name: Zm_0.001percent_MeJA_P Parameter: Organism Value: Zea mays
  misc_feature: MA Experiment 20000533 PARAMETER Experiment Name: Zm_0.001percent_MeJA_P Parameter: Plant Line Value: 35A19
  misc_feature: MA Experiment 20000533 PARAMETER Experiment Name: Zm_0.001percent_MeJA_P Parameter: Timepoint (hr) Value: 72
  misc_feature: MA Experiment 20000533 PARAMETER Experiment Name: Zm_0.001percent_MeJA_P Parameter: Tissue Value: Aerial
  misc_feature: MA Experiment 20000533 PARAMETER Experiment Name: Zm_0.001percent_MeJA_P Parameter: Treatment Value: 0.001percent MeJA vs. No Treatment
  misc_feature: MA Experiment ID: 20001610 Result: Up-regulated in Transcription
  misc_feature: MA Experiment 20001610 PARAMETER Experiment Name: Zm_50ppm_KNO3_L-to-H_P Parameter: Age (day) Value: 19
  misc_feature: MA Experiment 20001610 PARAMETER Experiment Name: Zm_50ppm_KNO3_L-to-H_P Parameter: Organism Value: Zea mays
  misc_feature: MA Experiment 20001610 PARAMETER Experiment Name: Zm_50ppm_KNO3_L-to-H_P Parameter: Plant Line Value: 35A19
  misc_feature: MA Experiment 20001610 PARAMETER Experiment Name: Zm_50ppm_KNO3_L-to-H_P Parameter: Timepoint (hr) Value: 2
  misc_feature: MA Experiment 20001610 PARAMETER Experiment Name: Zm_50ppm_KNO3_L-to-H_P Parameter: Tissue Value: Roots
  misc_feature: MA Experiment 20001610 PARAMETER Experiment Name: Zm_50ppm_KNO3_L-to-H_P Parameter: Treatment Value: 50ppm KNO3 vs. 50ppm KCl
aacccacacatccgacgccgaggaagtaggaagcacgagcagcatatgtcacagagggccagcgtcccacactcctcctgcatagccttcgcgctccattcccatctcctggtctccagtgagatgtgccccagctcctattggcagcaatagctattctccgctttccttttttttcccccttcctttcttcccgtctggctttggtttccgtttgatcgagctggctctcagtttccgtttttagttttgttggcatctttgctctcggatccgtctctccctaactcctgaaacccaaaagggagagaagaaaccgggcaagcaagcaaccaagcgagcgatgggtgtcaagggattcgtcgagggcggcatcgcctccatcgtggccggctgctccacccacccgctggacctcatcaaggtccgcatgcagctgcagggggaggcggcggccgccgtggcgccgcagccggcgctgcgcccggcgctcgccttccacgccgggggccacgccgtcgcgctcccgcaccaccaccaccacgacatcccggcgccaccgcggaagcccgggccgctggccgtcggcgcgcagatcctgcggtccgagggcgccgcgggcctcttctcgggggtgtccgccaccatgctgcggcagacgctctactccaccacgcggatggggctgtacgacatcctcaagaccaggtgggcccgggagaacggcggcgtcctcccgctgcaccgcaagatcttggccggcctcgtcgccggcggcgtcggcgccgccgtgggcaacccggccgacgtggccatggtgcggatgcaggcggacgggcgcctgcccctcgcggagcgccggaactaccgcggcgtcggcgacgccatcggccggatggcgcgcgacgagggcgtgcgcagcctctggcgcgggtcctcgctcaccgtcaaccgcgccatgatcgtcacggcgtcgcagctggccacgtacgaccaggccaaggaggccatcctggcgcgccgcggcccgggcgccgacgggctcgccacgcacgtggccgccagcttcaccgccggcatcgtcgccgccgccgcgtccaaccccgtcgacgtcgtcaagacgaggatgatgaacatgaaggtggcgcccggcgcgcccccgccctacgccggcgccgtcgactgcgccctcaagaccgtcaggtcggagggacccatggcgctgtacaaggggttcatccccaccgtcatgcgccaggggcccttcaccgttgtgctcttcgtcacgctcgagcaggtgcgcaaggtcttcaagggcgtcgagttctgagaccggcgacgaggaaagatgatgacgacaacaaacgttgcgctgccagttcgtcaccgcgttcgctgccaagaataataacccgctgccaccctagaggccgcgactactattacgccctttgcttgcattgcatcccgtgttagacttgtgctcatgcgcttcactgcatcctgttgtatctggatggatttgaccaaatgcaaattgccaacatttttattaattaaaattgctactgcaatgtctcaaccc

SEQ ID NO: 8462 - protein, 328 aa, Zea mays subsp. mays
  peptide (1)..(328): Ceres Seq. ID no. 12408464
  misc_feature (1)..(328): Homolog of NCBI NO: 15227225 NR Description: mitochondrial carrier protein family; protein id: supported by cDNA: 20723., supported by cDNA: gi_13877658, by cDNA: gi_13878154 [Arabidopsis thaliana]
  misc_feature (1)..(328): Homolog of NCBI NO: 21554157 NR Description: putative mitochondrial dicarboxylate carrier
  misc_feature (1)..(328): Homolog of NCBI NO: 13878155 NR Description: putative mitochondrial dicarboxylate carrier
  misc_feature (1)..(324): Homolog of NCBI NO: 15233884 NR Description: mitochondrial carrier protein family; protein id: supported by cDNA: 119476., supported by cDNA: gi_14596142
  misc_feature (1)..(328): Homolog of NCBI NO: 15242423 NR Description: mitochondrial carrier protein family; protein id:
  misc_feature (85)..(324): Homolog of NCBI NO: 21312994 NR Description: solute carrier family 25 (mitochondrial carrier;
  misc_feature (1)..(37): Homolog of NCBI NO: 21312994 NR Description: solute carrier family 25 (mitochondrial carrier;
  misc_feature (85)..(324): Homolog of NCBI NO: 1580888 NR Description: 2-oxoglutarate carrier protein
  misc_feature (1)..(37): Homolog of NCBI NO: 1580888 NR Description: 2-oxoglutarate carrier protein
  misc_feature (85)..(324): Homolog of NCBI NO: 27807211 NR Description: solute carrier family 25 (mitochondrial carrier;
MGVKGFVEGGIASIVAGCSTHPLDLIKVRMQLQGEAAAAVAPQPALRPALAFHAGGHAVALPHHHHHDIPAPPRKPGPLAVGAQILRSEGAAGLFSGVSATMLRQTLYSTTRMGLYDILKTRWARENGGVLPLHRKILAGLVAGGVGAAVGNPADVAMVRMQADGRLPLAERRNYRGVGDAIGRMARDEGVRSLWRGSSLTVNRAMIVTASQLATYDQAKEAILARRGPGADGLATHVAASFTAGIVAAAASNPVDVVKTRMMNMKVAPGAPPPYAGAVDCALKTVRSEGPMALYKGFIPTVMRQGPFTVVLFVTLEQVRKVFKGVEF

SEQ ID NO: 8463 - protein, 299 aa, Zea mays subsp. mays
  peptide (1)..(299): Ceres Seq. ID no. 12408465
  misc_feature (1)..(299): Homolog of NCBI NO: 15227225 NR Description: mitochondrial carrier protein family; protein id: supported by cDNA: 20723., supported by cDNA: gi_13877658, by cDNA: gi_13878154 [Arabidopsis thaliana]
  misc_feature (1)..(299): Homolog of NCBI NO: 21554157 NR Description: putative mitochondrial dicarboxylate carrier
  misc_feature (1)..(299): Homolog of NCBI NO: 13878155 NR Description: putative mitochondrial dicarboxylate carrier
  misc_feature (1)..(295): Homolog of NCBI NO: 15233884 NR Description: mitochondrial carrier protein family; protein id: supported by cDNA: 119476., supported by cDNA: gi_14596142
  misc_feature (1)..(299): Homolog of NCBI NO: 15242423 NR Description: mitochondrial carrier protein family; protein id:
  misc_feature (56)..(295): Homolog of NCBI NO: 21312994 NR Description: solute carrier family 25 (mitochondrial carrier;
  misc_feature (56)..(295): Homolog of NCBI NO: 1580888 NR Description: 2-oxoglutarate carrier protein
  misc_feature (56)..(295): Homolog of NCBI NO: 27807211 NR Description: solute carrier family 25 (mitochondrial carrier;
  misc_feature (56)..(295): Homolog of NCBI NO: 21361114 NR Description: solute carrier family 25 (mitochondrial carrier; carrier), member 11; solute carrier family 20 (oxoglutarate member 4 [Homo sapiens] >gi|20141580|sp|Q02978|M2OM_HUMAN Unknown
  misc_feature (56)..(297): Homolog of NCBI NO: 19913109 NR Description: dicarboxylate/tricarboxylate carrier [Nicotiana
MQLQGEAAAAVAPQPALRPALAFHAGGHAVALPHHHHHDIPAPPRKPGPLAVGAQILRSEGAAGLFSGVSATMLRQTLYSTTRMGLYDILKTRWARENGGVLPLHRKILAGLVAGGVGAAVGNPADVAMVRMQADGRLPLAERRNYRGVGDAIGRMARDEGVRSLWRGSSLTVNRAMIVTASQLATYDQAKEAILARRGPGADGLATHVAASFTAGIVAAAASNPVDVVKTRMMNMKVAPGAPPPYAGAVDCALKTVRSEGPMALYKGFIPTVMRQGPFTVVLFVTLEQVRKVFKGVEF

SEQ ID NO: 8464 - protein, 227 aa, Zea mays subsp. mays
  peptide (1)..(227): Ceres Seq. ID no. 12408466
  misc_feature (1)..(227): Homolog of NCBI NO: 15227225 NR Description: mitochondrial carrier protein family; protein id: supported by cDNA: 20723., supported by cDNA: gi_13877658, by cDNA: gi_13878154 [Arabidopsis thaliana]
  misc_feature (1)..(227): Homolog of NCBI NO: 21554157 NR Description: putative mitochondrial dicarboxylate carrier
  misc_feature (1)..(227): Homolog of NCBI NO: 13878155 NR Description: putative mitochondrial dicarboxylate carrier
  misc_feature (1)..(223): Homolog of NCBI NO: 15233884 NR Description: mitochondrial carrier protein family; protein id: supported by cDNA: 119476., supported by cDNA: gi_14596142
  misc_feature (1)..(227): Homolog of NCBI NO: 15242423 NR Description: mitochondrial carrier protein family; protein id:
  misc_feature (1)..(223): Homolog of NCBI NO: 21312994 NR Description: solute carrier family 25 (mitochondrial carrier;
  misc_feature (1)..(223): Homolog of NCBI NO: 1580888 NR Description: 2-oxoglutarate carrier protein
  misc_feature (1)..(223): Homolog of NCBI NO: 27807211 NR Description: solute carrier family 25 (mitochondrial carrier;
  misc_feature (1)..(223): Homolog of NCBI NO: 21361114 NR Description: solute carrier family 25 (mitochondrial carrier; carrier), member 11; solute carrier family 20 (oxoglutarate member 4 [Homo sapiens] >gi|20141580|sp|Q02978|M2OM_HUMAN Unknown
  misc_feature (1)..(225): Homolog of NCBI NO: 19913109 NR Description: dicarboxylate/tricarboxylate carrier [Nicotiana
MLRQTLYSTTRMGLYDILKTRWARENGGVLPLHRKILAGLVAGGVGAAVGNPADVAMVRMQADGRLPLAERRNYRGVGDAIGRMARDEGVRSLWRGSSLTVNRAMIVTASQLATYDQAKEAILARRGPGADGLATHVAASFTAGIVAAAASNPVDVVKTRMMNMKVAPGAPPPYAGAVDCALKTVRSEGPMALYKGFIPTVMRQGPFTVVLFVTLEQVRKVFKGVEF

SEQ ID NO: 8465 - DNA, 1427 bp, Zea mays subsp. mays
  misc_feature (1)..(1427): Ceres Seq. ID no. 12405016
  misc_feature: MA Experiment ID: 108527 Result: Down-regulated in Transcription
  misc_feature: MA Experiment 108527 PARAMETER Experiment Name: Zm_5mM_NO_P Parameter: Age (day) Value: 8
  misc_feature: MA Experiment 108527 PARAMETER Experiment Name: Zm_5mM_NO_P Parameter: Organism Value: Zea mays
  misc_feature: MA Experiment 108527 PARAMETER Experiment Name: Zm_5mM_NO_P Parameter: Plant Line Value: 35A19
  misc_feature: MA Experiment 108527 PARAMETER Experiment Name: Zm_5mM_NO_P Parameter: Timepoint (hr) Value: 6
  misc_feature: MA Experiment 108527 PARAMETER Experiment Name: Zm_5mM_NO_P Parameter: Tissue Value: Aerial
  misc_feature: MA Experiment 108527 PARAMETER Experiment Name: Zm_5mM_NO_P Parameter: Treatment Value: 5mM NO vs. No Treatment
  misc_feature: MA Experiment ID: 108529 Result: Up-regulated in Transcription
  misc_feature: MA Experiment 108529 PARAMETER Experiment Name: Zm_Imbibed_Seeds_P Parameter: Age (day) Value: 5 vs. 2
  misc_feature: MA Experiment 108529 PARAMETER Experiment Name: Zm_Imbibed_Seeds_P Parameter: Organism Value: Zea mays
  misc_feature: MA Experiment 108529 PARAMETER Experiment Name: Zm_Imbibed_Seeds_P Parameter: Plant Line Value: 35A19
  misc_feature: MA Experiment 108529 PARAMETER Experiment Name: Zm_Imbibed_Seeds_P Parameter: Tissue Value: Roots vs. Embryo
  misc_feature: MA Experiment ID: 108530 Result: Up-regulated in Transcription
  misc_feature: MA Experiment 108530 PARAMETER Experiment Name: Zm_Imbibed_Seeds_P Parameter: Age (day) Value: 6 vs. 2
  misc_feature: MA Experiment 108530 PARAMETER Experiment Name: Zm_Imbibed_Seeds_P Parameter: Organism Value: Zea mays
  misc_feature: MA Experiment 108530 PARAMETER Experiment Name: Zm_Imbibed_Seeds_P Parameter: Plant Line Value: 35A19
  misc_feature: MA Experiment 108530 PARAMETER Experiment Name: Zm_Imbibed_Seeds_P Parameter: Tissue Value: Aerial vs. Embryo
  misc_feature: MA Experiment ID: 108535 Result: Down-regulated in Transcription
  misc_feature: MA Experiment 108535 PARAMETER Experiment Name: Zm_Meristem_P Parameter: Age (day) Value: 8
  misc_feature: MA Experiment 108535 PARAMETER Experiment Name: Zm_Meristem_P Parameter: Organism Value: Zea mays
  misc_feature: MA Experiment 108535 PARAMETER Experiment Name: Zm_Meristem_P Parameter: Plant Line Value: 35A19
  misc_feature: MA Experiment 108535 PARAMETER Experiment Name: Zm_Meristem_P Parameter: Tissue Value: Root Meristem vs. Above Root Meristem
  misc_feature: MA Experiment ID: 108536 Result: Up-regulated in Transcription
  misc_feature: MA Experiment 108536 PARAMETER Experiment Name: Zm_Meristem_P Parameter: Age (day) Value: 8
  misc_feature: MA Experiment 108536 PARAMETER Experiment Name: Zm_Meristem_P Parameter: Organism Value: Zea mays
  misc_feature: MA Experiment 108536 PARAMETER Experiment Name: Zm_Meristem_P Parameter: Plant Line Value: 35A19
  misc_feature: MA Experiment 108536 PARAMETER Experiment Name: Zm_Meristem_P Parameter: Tissue Value: Shoot Meristem vs. Above Shoot Meristem
  misc_feature: MA Experiment ID: 108543 Result: Up-regulated in Transcription
  misc_feature: MA Experiment ID: 108544 Result: Up-regulated in Transcription
  misc_feature: MA Experiment ID: 108545 Result: Down-regulated in Transcription
  misc_feature: MA Experiment 108545 PARAMETER Experiment Name: Zm_Imbibed_Seeds_P Parameter: Age (day) Value: 3 vs. 2
  misc_feature: MA Experiment 108545 PARAMETER Experiment Name: Zm_Imbibed_Seeds_P Parameter: Organism Value: Zea mays
  misc_feature: MA Experiment 108545 PARAMETER Experiment Name: Zm_Imbibed_Seeds_P Parameter: Plant Line Value: 35A19
  misc_feature: MA Experiment 108545 PARAMETER Experiment Name: Zm_Imbibed_Seeds_P Parameter: Tissue Value: Aerial vs. Embryo
  misc_feature: MA Experiment ID: 108546 Result: Up-regulated in Transcription
  misc_feature: MA Experiment 108546 PARAMETER Experiment Name: Zm_Imbibed_Seeds_P Parameter: Age (day) Value: 3 vs. 2
  misc_feature: MA Experiment 108546 PARAMETER Experiment Name: Zm_Imbibed_Seeds_P Parameter: Organism Value: Zea mays
  misc_feature: MA Experiment 108546 PARAMETER Experiment Name: Zm_Imbibed_Seeds_P Parameter: Plant Line Value: 35A19
  misc_feature: MA Experiment 108546 PARAMETER Experiment Name: Zm_Imbibed_Seeds_P Parameter: Tissue Value: Roots vs. Embryo
  misc_feature: MA Experiment ID: 108559 Result: Down-regulated in Transcription
  misc_feature: MA Experiment 108559 PARAMETER Experiment Name: Zm_5mM_NO_P Parameter: Age (day) Value: 8
  misc_feature: MA Experiment 108559 PARAMETER Experiment Name: Zm_5mM_NO_P Parameter: Organism Value: Zea mays
  misc_feature: MA Experiment 108559 PARAMETER Experiment Name: Zm_5mM_NO_P Parameter: Plant Line Value: 35A19
  misc_feature: MA Experiment 108559 PARAMETER Experiment Name: Zm_5mM_NO_P Parameter: Timepoint (hr) Value: 12
  misc_feature: MA Experiment 108559 PARAMETER Experiment Name: Zm_5mM_NO_P Parameter: Tissue Value: Aerial
  misc_feature: MA Experiment 108559 PARAMETER Experiment Name: Zm_5mM_NO_P Parameter: Treatment Value: 5mM NO vs. No Treatment
  misc_feature: MA Experiment ID: 108687 Result: Down-regulated in Transcription
  misc_feature: MA Experiment 108687 PARAMETER Experiment Name: Zm_Embryos-Flowers__P Parameter: Tissue Value: Embryo vs. Aerial+
  misc_feature: MA Experiment ID: 108688 Result: Down-regulated in Transcription
  misc_feature: MA Experiment 108688 PARAMETER Experiment Name: Zm_Embryos-Flowers__P Parameter: Tissue Value: Immature Flowers vs. Aerial+
  misc_feature: MA Experiment ID: 20000477 Result: Down-regulated in Transcription
  misc_feature: MA Experiment 20000477 PARAMETER Experiment Name: Zm_5mM_SA_P Parameter: Age (day) Value: 10
  misc_feature: MA Experiment 20000477 PARAMETER Experiment Name: Zm_5mM_SA_P Parameter: Organism Value: Zea mays
  misc_feature: MA Experiment 20000477 PARAMETER Experiment Name: Zm_5mM_SA_P Parameter: Plant Line Value: 35A19
  misc_feature: MA Experiment 20000477 PARAMETER Experiment Name: Zm_5mM_SA_P Parameter: Timepoint (hr) Value: 48
  misc_feature: MA Experiment 20000477 PARAMETER Experiment Name: Zm_5mM_SA_P Parameter: Tissue Value: Aerial
  misc_feature: MA Experiment 20000477 PARAMETER Experiment Name: Zm_5mM_SA_P Parameter: Treatment Value: 5mM SA vs. No Treatment
  misc_feature: MA Experiment ID: 20000478 Result: Down-regulated in Transcription
  misc_feature: MA Experiment 20000478 PARAMETER Experiment Name: Zm_5mM_SA_P Parameter: Age (day) Value: 11
  misc_feature: MA Experiment 20000478 PARAMETER Experiment Name: Zm_5mM_SA_P Parameter: Organism Value: Zea mays
  misc_feature: MA Experiment 20000478 PARAMETER Experiment Name: Zm_5mM_SA_P Parameter: Plant Line Value: 35A19
  misc_feature: MA Experiment 20000478 PARAMETER Experiment Name: Zm_5mM_SA_P Parameter: Timepoint (hr) Value: 72
  misc_feature: MA Experiment 20000478 PARAMETER Experiment Name: Zm_5mM_SA_P Parameter: Tissue Value: Aerial
  misc_feature: MA Experiment 20000478 PARAMETER Experiment Name: Zm_5mM_SA_P Parameter: Treatment Value: 5mM SA vs. No Treatment
  misc_feature: MA Experiment ID: 20000479 Result: Down-regulated in Transcription
  misc_feature: MA Experiment 20000479 PARAMETER Experiment Name: Zm_Drought_P Parameter: Age (day) Value: 10
  misc_feature: MA Experiment 20000479 PARAMETER Experiment Name: Zm_Drought_P Parameter: Organism Value: Zea mays
  misc_feature: MA Experiment 20000479 PARAMETER Experiment Name: Zm_Drought_P Parameter: Plant Line Value: 35A19
  misc_feature: MA Experiment 20000479 PARAMETER Experiment Name: Zm_Drought_P Parameter: Timepoint (hr) Value: 48
  misc_feature: MA Experiment 20000479 PARAMETER Experiment Name: Zm_Drought_P Parameter: Tissue Value: Aerial
  misc_feature: MA Experiment 20000479 PARAMETER Experiment Name: Zm_Drought_P Parameter: Treatment Value: Drought vs. No Drought
  misc_feature: MA Experiment ID: 20000480 Result: Down-regulated in Transcription
  misc_feature: MA Experiment 20000480 PARAMETER Experiment Name: Zm_Drought_P Parameter: Age (day) Value: 11
  misc_feature: MA Experiment 20000480 PARAMETER Experiment Name: Zm_Drought_P Parameter: Organism Value: Zea mays
  misc_feature: MA Experiment 20000480 PARAMETER Experiment Name: Zm_Drought_P Parameter: Plant Line Value: 35A19
  misc_feature: MA Experiment 20000480 PARAMETER Experiment Name: Zm_Drought_P Parameter: Timepoint (hr) Value: 72
  misc_feature: MA Experiment 20000480 PARAMETER Experiment Name: Zm_Drought_P Parameter: Tissue Value: Aerial
  misc_feature: MA Experiment 20000480 PARAMETER Experiment Name: Zm_Drought_P Parameter: Treatment Value: Drought vs. No Drought
  misc_feature: MA Experiment ID: 20000534 Result: Down-regulated in Transcription
  misc_feature: MA Experiment 20000534 PARAMETER Experiment Name: Zm_Hybrid_Pollen_P Parameter: Age (day) Value: 8
  misc_feature: MA Experiment 20000534 PARAMETER Experiment Name: Zm_Hybrid_Pollen_P Parameter: Organism Value: Zea mays
  misc_feature: MA Experiment 20000534 PARAMETER Experiment Name: Zm_Hybrid_Pollen_P Parameter: Plant Line Value: 35A19
  misc_feature: MA Experiment 20000534 PARAMETER Experiment Name: Zm_Hybrid_Pollen_P Parameter: Tissue Value: Pollen vs. Aerial
  misc_feature: MA Experiment ID: 20000535 Result: Down-regulated in Transcription
  misc_feature: MA Experiment 20000535 PARAMETER Experiment Name: Zm_Hybrid_Seed_Dev_P Parameter: DAP Value: 30 vs. 12
  misc_feature: MA Experiment 20000535 PARAMETER Experiment Name: Zm_Hybrid_Seed_Dev_P Parameter: Organism Value: Zea mays
  misc_feature: MA Experiment 20000535 PARAMETER Experiment Name: Zm_Hybrid_Seed_Dev_P Parameter: Plant Line Value: 35A19
  misc_feature: MA Experiment 20000535 PARAMETER Experiment Name: Zm_Hybrid_Seed_Dev_P Parameter: Tissue Value: Embryo vs. Unfert Floret
  misc_feature: MA Experiment ID: 20001610 Result: Down-regulated in Transcription
  misc_feature: MA Experiment 20001610 PARAMETER Experiment Name: Zm_50ppm_KNO3_L-to-H_P Parameter: Age (day) Value: 19
  misc_feature: MA Experiment 20001610 PARAMETER Experiment Name: Zm_50ppm_KNO3_L-to-H_P Parameter: Organism Value: Zea mays
  misc_feature: MA Experiment 20001610 PARAMETER Experiment Name: Zm_50ppm_KNO3_L-to-H_P Parameter: Plant Line Value: 35A19
  misc_feature: MA Experiment 20001610 PARAMETER Experiment Name: Zm_50ppm_KNO3_L-to-H_P Parameter: Timepoint (hr) Value: 2
  misc_feature: MA Experiment 20001610 PARAMETER Experiment Name: Zm_50ppm_KNO3_L-to-H_P Parameter: Tissue Value: Roots
  misc_feature: MA Experiment 20001610 PARAMETER Experiment Name: Zm_50ppm_KNO3_L-to-H_P Parameter: Treatment Value: 50ppm KNO3 vs. 50ppm KCl
aagcaagcaagagactgagagaggcaggtaatacatacctgcgactgcgacgagtgagtaaagcttcatcttcttcctccttcctccggcctcttcctgagtgctgcacgcagtgcgtaggaaggaactcgcgtacgtacgtgtgctagctagctagctcgaccacgcgcagcacgcaggcgcgtagtagctcgatcgatcgaccgccggccggaaatgtcgaccaactcgaggtccaactccagggccaacttcaacaacgagatccatgacatcggcacggcgcagaactccagcatgccccccacgtactacgaccggtcgctggcggacatcttccctccgcacctcctcaagaaggtggtctcggaggtggtgtccacgttcctgctggtgttcgtcacgtgcggggcggcggggatctacggcagcgacaaggaccgcatctcgcagctggggcagtcggtcgccggcgggctcatcgtcaccgtcatgatctacgccgtcggacacatctcgggcgcgcacatgaaccccgccgtcacgctcgcgttcgccgtgttccgccatttcccctggatccaggtcccgttctactgggcggcgcagttcaccggcagcatctgcgcgtcgttcgtgctcaaggccgtgctgcaccccatcgccgtgctgggcaccaccacgccgacggggccgcactggcactcgctcgtcatcgagatcatcgtcaccttcaacatgatgttcgtcaccctcgccgtcgccacggacacgagagcggtgggtgagttggcggggttggcagttggttccgcggtttgcattacgtccatcttcgcaggggcagtgtcgggcggatcgatgaacccggcgaggacgctggggccggcgctggcgagcaacctctacaccggcctctggatctacttcctgggccccgtcctcggcacgctctccggggcctggacctacacctacatccgcttcgaggaggcgcccagccacaaggacatgtcgcagaagctctcctccttcaagctccgccgcctgcagagccagtccgtcgcggtcgacgacgacgagctcgaccacatccaagtgtgattcatgctccatcgatcagagagtgcgcacttgtttactcctcagtcctctcactctatgtatcggcaacactccctaggatatactagtggtccgtagtcatggtctatgtctatgtgtcgctcttctctcgatccatgcacgtccgtggcgcggtgtggatgggctcgctctgtcaaatgtgccaatgagctggagcttaattttgggacgaacactgtgccgtgtgctgtgtgcagccagtcgtactcgtacctctcctgctatcacttgttccaaaagcttctttggtgcttacataaagatcatctgtgccttgcacg

SEQ ID NO: 8466 - protein, 295 aa, Zea mays subsp. mays
  peptide (1)..(295): Ceres Seq. ID no. 12405017
  misc_feature (39)..(252): Pfam Name: Major intrinsic protein Pfam Description: Major intrinsic protein
  misc_feature (1)..(295): Homolog of NCBI NO: 13447787 NR Description: NOD26-like membrane integral protein ZmNIP2-1
  misc_feature (2)..(293): Homolog of NCBI NO: 13447789 NR Description: NOD26-like membrane integral protein ZmNIP2-2
  misc_feature (2)..(293): Homolog of NCBI NO: 13448045 NR Description: NOD26-like membrane integral protein ZmNIP2-3
  misc_feature (16)..(283): Homolog of NCBI NO: 33468424 NR Description: Nod26-like protein [Cucurbita pepo]
  misc_feature (45)..(277): Homolog of NCBI NO: 9971217 NR Description: MIP [Adiantum capillus-veneris]
  misc_feature (35)..(284): Homolog of NCBI NO: 15777893 NR Description: early embryogenesis aquaglyceroporin [Pinus taeda]
  misc_feature (46)..(284): Homolog of NCBI NO: 13447785 NR Description: NOD26-like membrane integral protein ZmNIP1-1
  misc_feature (40)..(274): Homolog of NCBI NO: 37536006 NR Description: putative nodulin-26 [Oryza sativa (japonica
  misc_feature (41)..(282): Homolog of NCBI NO: 1076748 NR Description: major intrinsic protein - rice
  misc_feature (33)..(274): Homolog of NCBI NO: 15235034 NR Description: major intrinsic protein (MIP) - like; protein id:
MSTNSRSNSRANFNNEIHDIGTAQNSSMPPTYYDRSLADIFPPHLLKKVVSEVVSTFLLVFVTCGAAGIYGSDKDRISQLGQSVAGGLIVTVMIYAVGHISGAHMNPAVTLAFAVFRHFPWIQVPFYWAAQFTGSICASFVLKAVLHPIAVLGTTTPTGPHWHSLVIEIIVTFNMMFVTLAVATDTRAVGELAGLAVGSAVCITSIFAGAVSGGSMNPARTLGPALASNLYTGLWIYFLGPVLGTLSGAWTYTYIRFEEAPSHKDMSQKLSSFKLRRLQSQSVAVDDDELDHIQV

SEQ ID NO: 8467 - protein, 268 aa, Zea mays subsp. mays
  peptide (1)..(268): Ceres Seq. ID no. 12405018
  misc_feature (12)..(225): Pfam Name: Major intrinsic protein Pfam Description: Major intrinsic protein
  misc_feature (1)..(268): Homolog of NCBI NO: 13447787 NR Description: NOD26-like membrane integral protein ZmNIP2-1
  misc_feature (1)..(266): Homolog of NCBI NO: 13447789 NR Description: NOD26-like membrane integral protein ZmNIP2-2
  misc_feature (1)..(266): Homolog of NCBI NO: 13448045 NR Description: NOD26-like membrane integral protein ZmNIP2-3
  misc_feature (1)..(256): Homolog of NCBI NO: 33468424 NR Description: Nod26-like protein [Cucurbita pepo]
  misc_feature (18)..(250): Homolog of NCBI NO: 9971217 NR Description: MIP [Adiantum capillus-veneris]
  misc_feature (8)..(257): Homolog of NCBI NO: 15777893 NR Description: early embryogenesis aquaglyceroporin [Pinus taeda]
  misc_feature (19)..(257): Homolog of NCBI NO: 13447785 NR Description: NOD26-like membrane integral protein ZmNIP1-1
  misc_feature (13)..(247): Homolog of NCBI NO: 37536006 NR Description: putative nodulin-26 [Oryza sativa (japonica
  misc_feature (14)..(255): Homolog of NCBI NO: 1076748 NR Description: major intrinsic protein - rice
  misc_feature (6)..(247): Homolog of NCBI NO: 15235034 NR Description: major intrinsic protein (MIP) - like; protein id:
MPPTYYDRSLADIFPPHLLKKVVSEVVSTFLLVFVTCGAAGIYGSDKDRISQLGQSVAGGLIVTVMIYAVGHISGAHMNPAVTLAFAVFRHFPWIQVPFYWAAQFTGSICASFVLKAVLHPIAVLGTTTPTGPHWHSLVIEIIVTFNMMFVTLAVATDTRAVGELAGLAVGSAVCITSIFAGAVSGGSMNPARTLGPALASNLYTGLWIYFLGPVLGTLSGAWTYTYIRFEEAPSHKDMSQKLSSFKLRRLQSQSVAVDDDELDHIQV

SEQ ID NO: 8468 - protein, 203 aa, Zea mays subsp. mays
  peptide (1)..(203): Ceres Seq. ID no. 12405019
  misc_feature (1)..(160): Pfam Name: Major intrinsic protein Pfam Description: Major intrinsic protein
  misc_feature (1)..(203): Homolog of NCBI NO: 13447787 NR Description: NOD26-like membrane integral protein ZmNIP2-1
  misc_feature (1)..(201): Homolog of NCBI NO: 13447789 NR Description: NOD26-like membrane integral protein ZmNIP2-2
  misc_feature (1)..(201): Homolog of NCBI NO: 13448045 NR Description: NOD26-like membrane integral protein ZmNIP2-3
  misc_feature (1)..(191): Homolog of NCBI NO: 33468424 NR Description: Nod26-like protein [Cucurbita pepo]
  misc_feature (1)..(185): Homolog of NCBI NO: 9971217 NR Description: MIP [Adiantum capillus-veneris]
  misc_feature (1)..(192): Homolog of NCBI NO: 15777893 NR Description: early embryogenesis aquaglyceroporin [Pinus taeda]
  misc_feature (1)..(192): Homolog of NCBI NO: 13447785 NR Description: NOD26-like membrane integral protein ZmNIP1-1
  misc_feature (1)..(182): Homolog of NCBI NO: 37536006 NR Description: putative nodulin-26 [Oryza sativa (japonica
  misc_feature (1)..(190): Homolog of NCBI NO: 1076748 NR Description: major intrinsic protein - rice
  misc_feature (1)..(182): Homolog of NCBI NO: 15235034 NR Description: major intrinsic protein (MIP) - like; protein id:
MIYAVGHISGAHMNPAVTLAFAVFRHFPWIQVPFYWAAQFTGSICASFVLKAVLHPIAVLGTTTPTGPHWHSLVIEIIVTFNMMFVTLAVATDTRAVGELAGLAVGSAVCITSIFAGAVSGGSMNPARTLGPALASNLYTGLWIYFLGPVLGTLSGAWTYTYIRFEEAPSHKDMSQKLSSFKLRRLQSQSVAVDDDELDHIQV

SEQ ID NO: 8469 - DNA, 1881 bp, Zea mays subsp. mays
  misc_feature (1)..(1881): Ceres Seq. ID no. 12379651
  misc_feature: MA Experiment ID: 108528 Result: Up-regulated in Transcription
  misc_feature: MA Experiment 108528 PARAMETER Experiment Name: Zm_Imbibed_Seeds_P Parameter: Age (day) Value: 5 vs. 2
  misc_feature: MA Experiment 108528 PARAMETER Experiment Name: Zm_Imbibed_Seeds_P Parameter: Organism Value: Zea mays
  misc_feature: MA Experiment 108528 PARAMETER Experiment Name: Zm_Imbibed_Seeds_P Parameter: Plant Line Value: 35A19
  misc_feature: MA Experiment 108528 PARAMETER Experiment Name: Zm_Imbibed_Seeds_P Parameter: Tissue Value: Aerial vs. Embryo
  misc_feature: MA Experiment ID: 108529 Result: Down-regulated in Transcription
  misc_feature: MA Experiment 108529 PARAMETER Experiment Name: Zm_Imbibed_Seeds_P Parameter: Age (day) Value: 5 vs. 2
  misc_feature: MA Experiment 108529 PARAMETER Experiment Name: Zm_Imbibed_Seeds_P Parameter: Organism Value: Zea mays
  misc_feature: MA Experiment 108529 PARAMETER Experiment Name: Zm_Imbibed_Seeds_P Parameter: Plant Line Value: 35A19
  misc_feature: MA Experiment 108529 PARAMETER Experiment Name: Zm_Imbibed_Seeds_P Parameter: Tissue Value: Roots vs. Embryo
  misc_feature: MA Experiment ID: 108535 Result: Up-regulated in Transcription
  misc_feature: MA Experiment 108535 PARAMETER Experiment Name: Zm_Meristem_P Parameter: Age (day) Value: 8
  misc_feature: MA Experiment 108535 PARAMETER Experiment Name: Zm_Meristem_P Parameter: Organism Value: Zea mays
  misc_feature: MA Experiment 108535 PARAMETER Experiment Name: Zm_Meristem_P Parameter: Plant Line Value: 35A19
  misc_feature: MA Experiment 108535 PARAMETER Experiment Name: Zm_Meristem_P Parameter: Tissue Value: Root Meristem vs. Above Root Meristem
  misc_feature: MA Experiment ID: 108543 Result: Up-regulated in Transcription
  misc_feature: MA Experiment ID: 108545 Result: Up-regulated in Transcription
  misc_feature: MA Experiment 108545 PARAMETER Experiment Name: Zm_Imbibed_Seeds_P Parameter: Age (day) Value: 3 vs. 2
  misc_feature: MA Experiment 108545 PARAMETER Experiment Name: Zm_Imbibed_Seeds_P Parameter: Organism Value: Zea mays
  misc_feature: MA Experiment 108545 PARAMETER Experiment Name: Zm_Imbibed_Seeds_P Parameter: Plant Line Value: 35A19
  misc_feature: MA Experiment 108545 PARAMETER Experiment Name: Zm_Imbibed_Seeds_P Parameter: Tissue Value: Aerial vs. Embryo
  misc_feature: MA Experiment ID: 108546 Result: Down-regulated in Transcription
  misc_feature: MA Experiment 108546 PARAMETER Experiment Name: Zm_Imbibed_Seeds_P Parameter: Age (day) Value: 3 vs. 2
  misc_feature: MA Experiment 108546 PARAMETER Experiment Name: Zm_Imbibed_Seeds_P Parameter: Organism Value: Zea mays
  misc_feature: MA Experiment 108546 PARAMETER Experiment Name: Zm_Imbibed_Seeds_P Parameter: Plant Line Value: 35A19
  misc_feature: MA Experiment 108546 PARAMETER Experiment Name: Zm_Imbibed_Seeds_P Parameter: Tissue Value: Roots vs. Embryo
  misc_feature: MA Experiment ID: 108547 Result: Up-regulated in Transcription
  misc_feature: MA Experiment 108547 PARAMETER Experiment Name: Zm_Imbibed_Seeds_P Parameter: Age (day) Value: 4 vs. 2
  misc_feature: MA Experiment 108547 PARAMETER Experiment Name: Zm_Imbibed_Seeds_P Parameter: Organism Value: Zea mays
  misc_feature: MA Experiment 108547 PARAMETER Experiment Name: Zm_Imbibed_Seeds_P Parameter: Plant Line Value: 35A19
  misc_feature: MA Experiment 108547 PARAMETER Experiment Name: Zm_Imbibed_Seeds_P Parameter: Tissue Value: Aerial vs. Embryo
  misc_feature: MA Experiment ID: 108689 Result: Down-regulated in Transcription
  misc_feature: MA Experiment 108689 PARAMETER Experiment Name: Zm_Drought_Roots_P Parameter: Age (day) Value: 9
  misc_feature: MA Experiment 108689 PARAMETER Experiment Name: Zm_Drought_Roots_P Parameter: Organism Value: Zea mays
  misc_feature: MA Experiment 108689 PARAMETER Experiment Name: Zm_Drought_Roots_P Parameter: Plant Line Value: 35A19
  misc_feature: MA Experiment 108689 PARAMETER Experiment Name: Zm_Drought_Roots_P Parameter: Timepoint (hr) Value: 24
  misc_feature: MA Experiment 108689 PARAMETER Experiment Name: Zm_Drought_Roots_P Parameter: Tissue Value: Roots
  misc_feature: MA Experiment 108689 PARAMETER Experiment Name: Zm_Drought_Roots_P Parameter: Treatment Value: Drought vs. No Drought
  misc_feature: MA Experiment ID: 20000477 Result: Down-regulated in Transcription
  misc_feature: MA Experiment 20000477 PARAMETER Experiment Name: Zm_5mM_SA_P Parameter: Age (day) Value: 10
  misc_feature: MA Experiment 20000477 PARAMETER Experiment Name: Zm_5mM_SA_P Parameter: Organism Value: Zea mays
  misc_feature: MA Experiment 20000477 PARAMETER Experiment Name: Zm_5mM_SA_P Parameter: Plant Line Value: 35A19
  misc_feature: MA Experiment 20000477 PARAMETER Experiment Name: Zm_5mM_SA_P Parameter: Timepoint (hr) Value: 48
  misc_feature: MA Experiment 20000477 PARAMETER Experiment Name: Zm_5mM_SA_P Parameter: Tissue Value: Aerial
  misc_feature: MA Experiment 20000477 PARAMETER Experiment Name: Zm_5mM_SA_P Parameter: Treatment Value: 5mM SA vs. No Treatment
  misc_feature: MA Experiment ID: 20000478 Result: Down-regulated in Transcription
  misc_feature: MA Experiment 20000478 PARAMETER Experiment Name: Zm_5mM_SA_P Parameter: Age (day) Value: 11
  misc_feature: MA Experiment 20000478 PARAMETER Experiment Name: Zm_5mM_SA_P Parameter: Organism Value: Zea mays
  misc_feature: MA Experiment 20000478 PARAMETER Experiment Name: Zm_5mM_SA_P Parameter: Plant Line Value: 35A19
  misc_feature: MA Experiment 20000478 PARAMETER Experiment Name: Zm_5mM_SA_P Parameter: Timepoint (hr) Value: 72
  misc_feature: MA Experiment 20000478 PARAMETER Experiment Name: Zm_5mM_SA_P Parameter: Tissue Value: Aerial
  misc_feature: MA Experiment 20000478 PARAMETER Experiment Name: Zm_5mM_SA_P Parameter: Treatment Value: 5mM SA vs. No Treatment
  misc_feature: MA Experiment ID: 20000479 Result: Down-regulated in Transcription
  misc_feature: MA Experiment 20000479 PARAMETER Experiment Name: Zm_Drought_P Parameter: Age (day) Value: 10
  misc_feature: MA Experiment 20000479 PARAMETER Experiment Name: Zm_Drought_P Parameter: Organism Value: Zea mays
  misc_feature: MA Experiment 20000479 PARAMETER Experiment Name: Zm_Drought_P Parameter: Plant Line Value: 35A19
  misc_feature: MA Experiment 20000479 PARAMETER Experiment Name: Zm_Drought_P Parameter: Timepoint (hr) Value: 48
  misc_feature: MA Experiment 20000479 PARAMETER Experiment Name: Zm_Drought_P Parameter: Tissue Value: Aerial
  misc_feature: MA Experiment 20000479 PARAMETER Experiment Name: Zm_Drought_P Parameter: Treatment Value: Drought vs. No Drought
  misc_feature: MA Experiment ID: 20000480 Result: Down-regulated in Transcription
  misc_feature: MA Experiment 20000480 PARAMETER Experiment Name: Zm_Drought_P Parameter: Age (day) Value: 11
  misc_feature: MA Experiment 20000480 PARAMETER Experiment Name: Zm_Drought_P Parameter: Organism Value: Zea mays
  misc_feature: MA Experiment 20000480 PARAMETER Experiment Name: Zm_Drought_P Parameter: Plant Line Value: 35A19
  misc_feature: MA Experiment 20000480 PARAMETER Experiment Name: Zm_Drought_P Parameter: Timepoint (hr) Value: 72
  misc_feature: MA Experiment 20000480 PARAMETER Experiment Name: Zm_Drought_P Parameter: Tissue Value: Aerial
  misc_feature: MA Experiment 20000480 PARAMETER Experiment Name: Zm_Drought_P Parameter: Treatment Value: Drought vs. No Drought
  misc_feature: MA Experiment ID: 20000487 Result: Down-regulated in Transcription
  misc_feature: MA Experiment 20000487 PARAMETER Experiment Name: Zm_50mM_NH4NO3_L_to_H_P Parameter: Organism Value: Zea mays
  misc_feature: MA Experiment 20000487 PARAMETER Experiment Name: Zm_50mM_NH4NO3_L_to_H_P Parameter: Timepoint (hr) Value: 4
  misc_feature: MA Experiment 20000487 PARAMETER Experiment Name: Zm_50mM_NH4NO3_L_to_H_P Parameter: Tissue Value: Leaves
  misc_feature: MA Experiment 20000487 PARAMETER Experiment Name: Zm_50mM_NH4NO3_L_to_H_P Parameter: Treatment Value: 50mM NH4NO3 vs. 100mM Mannitol
  misc_feature: MA Experiment ID: 20000626 Result: Down-regulated in Transcription
  misc_feature: MA Experiment 20000626 PARAMETER Experiment Name: Zm_Herbicide-Treatments_P Parameter: Timepoint (hr) Value: 12
  misc_feature: MA Experiment 20000626 PARAMETER Experiment Name: Zm_Herbicide-Treatments_P Parameter: Tissue Value: Aerial
  misc_feature: MA Experiment 20000626 PARAMETER Experiment Name: Zm_Herbicide-Treatments_P Parameter: Treatment Value: Roundup vs. No Treatment
  misc_feature: MA Experiment ID: 20000632 Result: Down-regulated in Transcription
  misc_feature: MA Experiment 20000632 PARAMETER Experiment Name: Zm_Herbicide-Treatments_P Parameter: Timepoint (hr) Value: 4
  misc_feature: MA Experiment 20000632 PARAMETER Experiment Name: Zm_Herbicide-Treatments_P Parameter: Tissue Value: Aerial
  misc_feature: MA Experiment 20000632 PARAMETER Experiment Name: Zm_Herbicide-Treatments_P Parameter: Treatment Value: Glean vs. No Treatment
gtcgcgcacacctcagtctcctgccgtgcgtagtgtgtacgggcaaggcggcagagctagctttcactacactcagtggccattgccgttgctagctttcaatagctcttagctgcaatgtcggcggcggcgtcgcagagcagtgtcaaggcaatggcggcggccgcagccgctgtggcaatgctgctctcggccgcggcggcggtggccgcgcagcacgattacggcgacgccctgcacaagtgcatcctcttcttcgaggggcagcgctcggggaggctcccgccggaccagcgcctccgctggcgccgcgactccggcctccacgacggcgccgcggccggggtggatctgaccggagggtactacgacgccggcgacaacgtgaagttcgggttcccgatggcgtttcacggcgacgctcatgtcgtggggcctgatcgacttcgggcgcagcttcgggccccacagggaggaggcccggaaggcggtgcggtgggcgacggactacctgatgaaggcgacggcgaagcggaacacggtgtacgtgcaggtgggcgacgcgttccgcgaccacgcgtgctgggagcggcccgaggacatggacaccccgcgcaccgtgtacaaggtggacccgtcccacccgggctccgacgtcgccgccgagaccgccgccgcgctcgccgccggctccatcgtcttccgcgacgccgaccccgcctactccaagcgcctcctcgaccgcgccgtcgccgtgttcgagttcgcggacaagtaccggggcccctacagcagcagcctccacgcggcggtgtgcccctgctactgcgactactccggataccaggacgagctgctgtggggcgcggcgtggctgcacaaggcgacgcggcggcgggagtaccgcgagtacatcaagaggaacgaggtggtgctcggcgccagcgacgccatcaacgagttcggctgggacaacaagcacgccggcatcaacgtcctcatctcaaaggaggttctgatggggaaggacgagtacttccagtccttccgtgtcaacgccgacaacttcatgtgcaccctcctccccggcatctccaatcacccccagatccagtactccccaggcgggctgctgttcaaggtcgggagcagcaacatgcagcacgtgacgcagctgtcgttcctcctgctggcctactccaactacctgagccacgccggcgggcgcgtctcgtgcggctcgtcgtcggcgtcgccggtgcagctccgccgcgtggccaagcggcaggtggactacatactgggcgacaacccgctgcggatgtcgtacatggttggggtacggcgcgcggttcccgcggcggatccaccaccgccgccagctccgctgccgtccgtggcggcgcacccggcgcggatcggctgcaaggccggcgccgcctactacaccagcccggcgcccaacccgaacctgctcgtgggcgccgtcgtgggcgggcccaccgacgactccgacgccttccccgacgcgcgcgccgtgttccagcagtcctagcccaccacgtacatcaacgcgccgctcatgggcctcctcgcctacttctcggcacatcccaacccagccgagtcgggcggcgactgaaaaaagcctagggagagtgatagatgacgaacgcacgcacgggcctgggtattttagatgggctttggtttgtcttgttcgggcccgattgttgcctggtgtatccgtacgagtagttgtaactagttaaccagagccactcccttgcctgcaaaagaaagaccagggaagaggaattagtaggctccaagattgtattagctgttaagattatatacgctagtagcaaggttaactgt

SEQ ID NO: 8470 - protein, 511 aa, Zea mays subsp. mays
  peptide (1)..(511): Ceres Seq. ID no. 12379652
  misc_feature (35)..(98): Pfam Name: Glycosyl hydrolase family 9 Pfam Description: Glycosyl hydrolase family 9
  misc_feature (14)..(98): Homolog of NCBI NO: 3549291 NR Description: endo-1,4-beta-glucanase precursor [Fragaria x
  misc_feature (12)..(98): Homolog of NCBI NO: 4220423 NR Description: putative cellulase [Fragaria x ananassa]
  misc_feature (12)..(98): Homolog of NCBI NO: 4972234 NR Description: endo-beta-1,4-glucanase [Fragaria x ananassa]
  misc_feature (11)..(98): Homolog of NCBI NO: 15223222 NR Description: glycosyl hydrolase family 9 protein id: At1g70710.1, supported by cDNA: gi_15081780, by cDNA: gi_18377810 [Arabidopsis thaliana]
  misc_feature (21)..(98): Homolog of NCBI NO: 2440035 NR Description: endo-1,4-beta-glucanase [Arabidopsis thaliana]
  misc_feature (12)..(98): Homolog of NCBI NO: 3892180 NR Description: cellulase [Fragaria x ananassa]
  misc_feature (31)..(98): Homolog of NCBI NO: 16903351 NR Description: endo-beta-1,4-glucanase precursor [Nicotiana
  misc_feature (22)..(98): Homolog of NCBI NO: 1655547 NR Description: cellulase; endo-beta-1,4-glucanase [Capsicum
  misc_feature (25)..(98): Homolog of NCBI NO: 7488978 NR Description: cellulase (EC 3.2.1.4) Cel2 precursor - tomato
  misc_feature (11)..(98): Homolog of NCBI NO: 15220676 NR Description: glycosyl hydrolase family 9; protein id:
MSAAASQSSVKAMAAAAAAVAMLLSAAAAVAAQHDYGDALHKCILFFEGQRSGRLPPDQRLRWRRDSGLHDGAAAGVDLTGGYYDAGDNVKFGFPMAFHGDAHVVGPDRLRAQLRAPQGGGPEGGAVGDGLPDEGDGEAEHGVRAGGRRVPRPRVLGAARGHGHPAHRVQGGPVPPGLRRRRRDRRRARRRLHRLPRRRPRLLQAPPRPRRRRVRVRGQVPGPLQQQPPRGGVPLLLRLLRIPGRAAVGRGVAAQGDAAAGVPRVHQEERGGARRQRRHQRVRLGQQARRHQRPHLKGGSDGEGRVLPVLPCQRRQLHVHPPPRHLQSPPDPVLPRRAAVQGREQQHAARDAAVVPPAGLLQLPEPRRRARLVRLVVGVAGAAPPRGQAAGGLHTGRQPAADVVHGWGTARGSRGGSTTAASSAAVRGGAPGADRLQGRRRLLHQPGAQPEPARGRRRGRAHRRLRRLPRRARRVPAVLAHHVHQRAAHGPPRLLLGTSQPSRVGRRLKKA

SEQ ID NO: 8471 - protein, 499 aa, Zea mays subsp. mays
  peptide (1)..(499): Ceres Seq. ID no. 12379653
  misc_feature (23)..(86): Pfam Name: Glycosyl hydrolase family 9 Pfam Description: Glycosyl hydrolase family 9
  misc_feature (2)..(86): Homolog of NCBI NO: 3549291 NR Description: endo-1,4-beta-glucanase precursor [Fragaria x
  misc_feature (1)..(86): Homolog of NCBI NO: 4220423 NR Description: putative cellulase [Fragaria x ananassa]
  misc_feature (1)..(86): Homolog of NCBI NO: 4972234 NR Description: endo-beta-1,4-glucanase [Fragaria x ananassa]
  misc_feature (1)..(86): Homolog of NCBI NO: 15223222 NR Description: glycosyl hydrolase family 9 protein id: At1g70710.1, supported by cDNA: gi_15081780, by cDNA: gi_18377810 [Arabidopsis thaliana]
  misc_feature (9)..(86): Homolog of NCBI NO: 2440035 NR Description: endo-1,4-beta-glucanase [Arabidopsis thaliana]
  misc_feature (1)..(86): Homolog of NCBI NO: 3892180 NR Description: cellulase [Fragaria x ananassa]
  misc_feature (19)..(86): Homolog of NCBI NO: 16903351 NR Description: endo-beta-1,4-glucanase precursor [Nicotiana
  misc_feature (10)..(86): Homolog of NCBI NO: 1655547 NR Description: cellulase; endo-beta-1,4-glucanase [Capsicum
  misc_feature (13)..(86): Homolog of NCBI NO: 7488978 NR Description: cellulase (EC 3.2.1.4) Cel2 precursor - tomato
  misc_feature (1)..(86): Homolog of NCBI NO: 15220676 NR Description: glycosyl hydrolase family 9; protein id:
MAAAAAAVAMLLSAAAAVAAQHDYGDALHKCILFFEGQRSGRLPPDQRLRWRRDSGLHDGAAAGVDLTGGYYDAGDNVKFGFPMAFHGDAHVVGPDRLRAQLRAPQGGGPEGGAVGDGLPDEGDGEAEHGVRAGGRRVPRPRVLGAARGHGHPAHRVQGGPVPPGLRRRRRDRRRARRRLHRLPRRRPRLLQAPPRPRRRRVRVRGQVPGPLQQQPPRGGVPLLLRLLRIPGRAAVGRGVAAQGDAAAGVPRVHQEERGGARRQRRHQRVRLGQQARRHQRPHLKGGSDGEGRVLPVLPCQRRQLHVHPPPRHLQSPPDPVLPRRAAVQGREQQHAARDAAVVPPAGLLQLPEPRRRARLVRLVVGVAGAAPPRGQAAGGLHTGRQPAADVVHGWGTARGSRGGSTTAASSAAVRGGAPGADRLQGRRRLLHQPGAQPEPARGRRRGRAHRRLRRLPRRARRVPAVLAHHVHQRAAHGPPRLLLGTSQPSRVGRRLKKA

SEQ ID NO: 8472 - protein, 490 aa, Zea mays subsp. mays
  peptide (1)..(490): Ceres Seq. ID no. 12379654
  misc_feature (14)..(77): Pfam Name: Glycosyl hydrolase family 9 Pfam Description: Glycosyl hydrolase family 9
  misc_feature (1)..(77): Homolog of NCBI NO: 3549291 NR Description: endo-1,4-beta-glucanase precursor [Fragaria x
  misc_feature (1)..(77): Homolog of NCBI NO: 4220423 NR Description: putative cellulase [Fragaria x ananassa]
  misc_feature (1)..(77): Homolog of NCBI NO: 4972234 NR Description: endo-beta-1,4-glucanase [Fragaria x ananassa]
  misc_feature (1)..(77): Homolog of NCBI NO: 15223222 NR Description: glycosyl hydrolase family 9 protein id: At1g70710.1, supported by cDNA: gi_15081780, by cDNA: gi_18377810 [Arabidopsis thaliana]
  misc_feature (1)..(77): Homolog of NCBI NO: 2440035 NR Description: endo-1,4-beta-glucanase [Arabidopsis thaliana]
  misc_feature (1)..(77): Homolog of NCBI NO: 3892180 NR Description: cellulase [Fragaria x ananassa]
  misc_feature (10)..(77): Homolog of NCBI NO: 16903351 NR Description: endo-beta-1,4-glucanase precursor [Nicotiana
  misc_feature (1)..(77): Homolog of NCBI NO: 1655547 NR Description: cellulase; endo-beta-1,4-glucanase [Capsicum
  misc_feature (4)..(77): Homolog of NCBI NO: 7488978 NR Description: cellulase (EC 3.2.1.4) Cel2 precursor - tomato
  misc_feature (1)..(77): Homolog of NCBI NO: 15220676 NR Description: glycosyl hydrolase family 9; protein id:
MLLSAAAAVAAQHDYGDALHKCILFFEGQRSGRLPPDQRLRWRRDSGLHDGAAAGVDLTGGYYDAGDNVKFGFPMAFHGDAHVVGPDRLRAQLRAPQGGGPEGGAVGDGLPDEGDGEAEHGVRAGGRRVPRPRVLGAARGHGHPAHRVQGGPVPPGLRRRRRDRRRARRRLHRLPRRRPRLLQAPPRPRRRRVRVRGQVPGPLQQQPPRGGVPLLLRLLRIPGRAAVGRGVAAQGDAAAGVPRVHQEERGGARRQRRHQRVRLGQQARRHQRPHLKGGSDGEGRVLPVLPCQRRQLHVHPPPRHLQSPPDPVLPRRAAVQGREQQHAARDAAVVPPAGLLQLPEPRRRARLVRLVVGVAGAAPPRGQAAGGLHTGRQPAADVVHGWGTARGSRGGSTTAASSAAVRGGAPGADRLQGRRRLLHQPGAQPEPARGRRRGRAHRRLRRLPRRARRVPAVLAHHVHQRAAHGPPRLLLGTSQPSRVGRRLKKA

SEQ ID NO: 8473 - protein, 376 aa, Zea mays subsp. mays
  peptide (1)..(376): Ceres Seq. ID no. 12379655
  misc_feature (1)..(376): Pfam Name: Glycosyl hydrolase family 9 Pfam Description: Glycosyl hydrolase family 9
  misc_feature (1)..(376): Homolog of NCBI NO: 3549291 NR Description: endo-1,4-beta-glucanase precursor [Fragaria x
  misc_feature (1)..(376): Homolog of NCBI NO: 4220423 NR Description: putative cellulase [Fragaria x ananassa]
  misc_feature (1)..(376): Homolog of NCBI NO: 4972234 NR Description: endo-beta-1,4-glucanase [Fragaria x ananassa]
  misc_feature (1)..(376): Homolog of NCBI NO: 15223222 NR Description: glycosyl hydrolase family 9 protein id: At1g70710.1, supported by cDNA: gi_15081780, by cDNA: gi_18377810 [Arabidopsis thaliana]
  misc_feature (1)..(376): Homolog of NCBI NO: 2440035 NR Description: endo-1,4-beta-glucanase [Arabidopsis thaliana]
  misc_feature (1)..(376): Homolog of NCBI NO: 3892180 NR Description: cellulase [Fragaria x ananassa]
  misc_feature (1)..(376): Homolog of NCBI NO: 16903351 NR Description: endo-beta-1,4-glucanase precursor [Nicotiana
  misc_feature (1)..(376): Homolog of NCBI NO: 1655547 NR Description: cellulase; endo-beta-1,4-glucanase [Capsicum
  misc_feature (1)..(376): Homolog of NCBI NO: 7488978 NR Description: cellulase (EC 3.2.1.4) Cel2 precursor - tomato
  misc_feature (1)..(376): Homolog of NCBI NO: 15220676 NR Description: glycosyl hydrolase family 9; protein id:
MSWGLIDFGRSFGPHREEARKAVRWATDYLMKATAKRNTVYVQVGDAFRDHACWERPEDMDTPRTVYKVDPSHPGSDVAAETAAALAAGSIVFRDADPAYSKRLLDRAVAVFEFADKYRGPYSSSLHAAVCPCYCDYSGYQDELLWGAAWLHKATRRREYREYIKRNEVVLGASDAINEFGWDNKHAGINVLISKEVLMGKDEYFQSFRVNADNFMCTLLPGISNHPQIQYSPGGLLFKVGSSNMQHVTQLSFLLLAYSNYLSHAGGRVSCGSSSASPVQLRRVAKRQVDYILGDNPLRMSYMVGVRRAVPAADPPPPPAPLPSVAAHPARIGCKAGAAYYTSPAPNPNLLVGAVVGGPTDDSDAFPDARAVFQQS

SEQ ID NO: 8474 - DNA, 1342 bp, Zea mays subsp. mays
  misc_feature (1)..(1342): Ceres Seq. ID no. 12546334
  misc_feature: MA Experiment ID: 108528 Result: Up-regulated in Transcription
  misc_feature: MA Experiment 108528 PARAMETER Experiment Name: Zm_Imbibed_Seeds_P Parameter: Age (day) Value: 5 vs. 2
  misc_feature: MA Experiment 108528 PARAMETER Experiment Name: Zm_Imbibed_Seeds_P Parameter: Organism Value: Zea mays
  misc_feature: MA Experiment 108528 PARAMETER Experiment Name: Zm_Imbibed_Seeds_P Parameter: Plant Line Value: 35A19
  misc_feature: MA Experiment 108528 PARAMETER Experiment Name: Zm_Imbibed_Seeds_P Parameter: Tissue Value: Aerial vs. Embryo
  misc_feature: MA Experiment ID: 108530 Result: Up-regulated in Transcription
  misc_feature: MA Experiment 108530 PARAMETER Experiment Name: Zm_Imbibed_Seeds_P Parameter: Age (day) Value: 6 vs. 2
  misc_feature: MA Experiment 108530 PARAMETER Experiment Name: Zm_Imbibed_Seeds_P Parameter: Organism Value: Zea mays
  misc_feature: MA Experiment 108530 PARAMETER Experiment Name: Zm_Imbibed_Seeds_P Parameter: Plant Line Value: 35A19
  misc_feature: MA Experiment 108530 PARAMETER Experiment Name: Zm_Imbibed_Seeds_P Parameter: Tissue Value: Aerial vs. Embryo
  misc_feature: MA Experiment ID: 108545 Result: Up-regulated in Transcription
  misc_feature: MA Experiment 108545 PARAMETER Experiment Name: Zm_Imbibed_Seeds_P Parameter: Age (day) Value: 3 vs. 2
  misc_feature: MA Experiment 108545 PARAMETER Experiment Name: Zm_Imbibed_Seeds_P Parameter: Organism Value: Zea mays
  misc_feature: MA Experiment 108545 PARAMETER Experiment Name: Zm_Imbibed_Seeds_P Parameter: Plant Line Value: 35A19
  misc_feature: MA Experiment 108545 PARAMETER Experiment Name: Zm_Imbibed_Seeds_P Parameter: Tissue Value: Aerial vs. Embryo
  misc_feature: MA Experiment ID: 108547 Result: Up-regulated in Transcription
  misc_feature: MA Experiment 108547 PARAMETER Experiment Name: Zm_Imbibed_Seeds_P Parameter: Age (day) Value: 4 vs. 2
  misc_feature: MA Experiment 108547 PARAMETER Experiment Name: Zm_Imbibed_Seeds_P Parameter: Organism Value: Zea mays
  misc_feature: MA Experiment 108547 PARAMETER Experiment Name: Zm_Imbibed_Seeds_P Parameter: Plant Line Value: 35A19
  misc_feature: MA Experiment 108547 PARAMETER Experiment Name: Zm_Imbibed_Seeds_P Parameter: Tissue Value: Aerial vs. Embryo
  misc_feature: MA Experiment ID: 108559 Result: Down-regulated in Transcription
  misc_feature: MA Experiment 108559 PARAMETER Experiment Name: Zm_5mM_NO_P Parameter: Age (day) Value: 8
  misc_feature: MA Experiment 108559 PARAMETER Experiment Name: Zm_5mM_NO_P Parameter: Organism Value: Zea mays
  misc_feature: MA Experiment 108559 PARAMETER Experiment Name: Zm_5mM_NO_P Parameter: Plant Line Value: 35A19
  misc_feature: MA Experiment 108559 PARAMETER Experiment Name: Zm_5mM_NO_P Parameter: Timepoint (hr) Value: 12
  misc_feature: MA Experiment 108559 PARAMETER Experiment Name: Zm_5mM_NO_P Parameter: Tissue Value: Aerial
  misc_feature: MA Experiment 108559 PARAMETER Experiment Name: Zm_5mM_NO_P Parameter: Treatment Value: 5mM NO vs. No Treatment
  misc_feature: MA Experiment ID: 20000480 Result: Down-regulated in Transcription
  misc_feature: MA Experiment 20000480 PARAMETER Experiment Name: Zm_Drought_P Parameter: Age (day) Value: 11
  misc_feature: MA Experiment 20000480 PARAMETER Experiment Name: Zm_Drought_P Parameter: Organism Value: Zea mays
  misc_feature: MA Experiment 20000480 PARAMETER Experiment Name: Zm_Drought_P Parameter: Plant Line Value: 35A19
  misc_feature: MA Experiment 20000480 PARAMETER Experiment Name: Zm_Drought_P Parameter: Timepoint (hr) Value: 72
  misc_feature: MA Experiment 20000480 PARAMETER Experiment Name: Zm_Drought_P Parameter: Tissue Value: Aerial
  misc_feature: MA Experiment 20000480 PARAMETER Experiment Name: Zm_Drought_P Parameter: Treatment Value: Drought vs. No Drought
  misc_feature: MA Experiment ID: 20000535 Result: Down-regulated in Transcription
  misc_feature: MA Experiment 20000535 PARAMETER Experiment Name: Zm_Hybrid_Seed_Dev_P Parameter: DAP Value: 30 vs. 12
  misc_feature: MA Experiment 20000535 PARAMETER Experiment Name: Zm_Hybrid_Seed_Dev_P Parameter: Organism Value: Zea mays
  misc_feature: MA Experiment 20000535 PARAMETER Experiment Name: Zm_Hybrid_Seed_Dev_P Parameter: Plant Line Value: 35A19
  misc_feature: MA Experiment 20000535 PARAMETER Experiment Name: Zm_Hybrid_Seed_Dev_P Parameter: Tissue Value: Embryo vs. Unfert Floret
aatatataccgttcctccgttcgtcccctccggccctctctccatccctgcccacgaccctccgccaccaggcaccagccatcgcctgcatcagatctcccgcccgtccgttacatcccagggcgacgcggccgcggccatgacgccatcctcagctctcgccctcgcgcaccacgccgcggtatccccgctcccgtcctccacgccgcggccctcccccaggtccagctctctgagcctgggcccgggctccgccgggctcgggccgcgccggctcgtcgcggcggcgcccccacgggcgttcttctcctcgtccccctaccagccgccccagccggaggggttctcgcagcaccgcgagtacggcctggtccccatggtcatcgagaccacctcccggggggagcgcgcctacgacatcttctcgcgcctgcttaaggagcgcatcgtctgcatccacgggcccatcgccgacgacacggcctcgctcgtcgtcgcgcagctgctcttcctcgagtccgagaacccgctcaagcccgtccacctctacatcaactcccccgggggcgtcgtcaccgcggggctcgccatctacgacaccatgcagtacatccgctgccccgtcaccaccctctgcatcggccaggcggcctccatgggctcgctcctcctcgcggctggggcgccgggtgagaggcgcgcgcttcccaacgccagggtcatgatccaccagccctcgggcggcgcgcaggggcaagccaccgacatcgccatccaggccaaggagatcctcaaaatgcgcgaccgcctcaacaagatctaccagaagcacacgcgccagcccatcgataagattgagcagtgcatggagagggacctcttcatggaccctgaagaggcgcgcgactggggcctcatcgacgaggtcatcgagaatcgacctgcctcgttcatgcccgacggaatcggtggaggcctcgatgtgcccaggctcggtggcgttggcggcggacgggggagggacgtcgaggaaccttccgcggtgtgaggattggcctcaaaggtgaaatccttcctcatccggtggatgtgttgtttgttgttagatccaaaggttcaattcttactatacaaggttaaccttgttattatggttatggaaacgtccggctccccattgtccttgttgcttaaattgcttcaattgagctattggggatataattattgcaactctaaggaaattctgcactgttgatactgataaattgacacagtattgtgtatgttgtactatatttgtatcaattccatgccaggacattcaaactttttcctcttt

SEQ ID NO: 8475 - protein, 348 aa, Zea mays subsp. mays
  peptide (1)..(348): Ceres Seq. ID no. 12546335
  misc_feature (132)..(313): Pfam Name: Clp protease Pfam Description: Clp protease
  misc_feature (132)..(313): Pfam Name: Clp protease Pfam Description: Clp protease
  misc_feature (90)..(346): Homolog of NCBI NO: 38344435 NR Description: OSJNBa0038O10.7 [Oryza sativa (japonica
  misc_feature (119)..(323): Homolog of NCBI NO: 18420643 NR Description: ATP-dependent Clp protease proteolytic subunit
  misc_feature (123)..(316): Homolog of NCBI NO: 31238393 NR Description: ENSANGP00000017225 [Anopheles gambiae]
  misc_feature (69)..(314): Homolog of NCBI NO: 34882298 NR Description: similar to ClpP protease [Rattus norvegicus]
  misc_feature (123)..(321): Homolog of NCBI NO: 6685315 NR Description: ATP-dependent Clp protease proteolytic subunit
  misc_feature (83)..(314): Homolog of NCBI NO: 8393156 NR Description: caseinolytic protease, ATP-dependent, proteolytic
  misc_feature (119)..(314): Homolog of NCBI NO: 5174419 NR Description: endopeptidase Clp precursor; ATP-dependent
  misc_feature (83)..(314): Homolog of NCBI NO: 8393156 NR Description: caseinolytic protease, ATP-dependent, proteolytic
  misc_feature (123)..(321): Homolog of NCBI NO: 6685315 NR Description: ATP-dependent Clp protease proteolytic subunit
  misc_feature (69)..(314): Homolog of NCBI NO: 34882298 NR Description: similar to ClpP protease [Rattus norvegicus]
  misc_feature (123)..(316): Homolog of NCBI NO: 31238393 NR Description: ENSANGP00000017225 [Anopheles gambiae]
  misc_feature (119)..(323): Homolog of NCBI NO: 18420643 NR Description: ATP-dependent Clp protease proteolytic subunit
  misc_feature (90)..(346): Homolog of NCBI NO: 38344435 NR Description: OSJNBa0038O10.7 [Oryza sativa (japonica
  misc_feature (123)..(316): Homolog of NCBI NO: 23014984 NR Description: hypothetical protein [Magnetospirillum
  misc_feature (119)..(321): Homolog of NCBI NO: 20129427 NR Description: CG5045-PA [Drosophila melanogaster]
  misc_feature (123)..(316): Homolog of NCBI NO: 22967580 NR Description: hypothetical protein [Rhodospirillum rubrum]
  misc_feature (119)..(314): Homolog of NCBI NO: 5174419 NR Description: endopeptidase Clp precursor; ATP-dependent
  misc_feature (123)..(316): Homolog of NCBI NO: 23014984 NR Description: hypothetical protein [Magnetospirillum
  misc_feature (119)..(321): Homolog of NCBI NO: 20129427 NR Description: CG5045-PA [Drosophila melanogaster]
  misc_feature (123)..(316): Homolog of NCBI NO: 22967580 NR Description: hypothetical protein [Rhodospirillum rubrum]
IYTVPPFVPSGPLSIPAHDPPPPGTSHRLHQISRPSVTSQGDAAAAMTPSSALALAHHAAVSPLPSSTPRPSPRSSSLSLGPGSAGLGPRRLVAAAPPRAFFSSSPYQPPQPEGFSQHREYGLVPMVIETTSRGERAYDIFSRLLKERIVCIHGPIADDTASLVVAQLLFLESENPLKPVHLYINSPGGVVTAGLAIYDTMQYIRCPVTTLCIGQAASMGSLLLAAGAPGERRALPNARVMIHQPSGGAQGQATDIAIQAKEILKMRDRLNKIYQKHTRQPIDKIEQCMERDLFMDPEEARDWGLIDEVIENRPASFMPDGIGGGLDVPRLGGVGGGRGRDVEEPSAV

SEQ ID NO: 8476 - protein, 302 aa, Zea mays subsp. mays
  peptide (1)..(302): Ceres Seq. ID no. 12546336
  misc_feature (86)..(267): Pfam Name: Clp protease Pfam Description: Clp protease
  misc_feature (86)..(267): Pfam Name: Clp protease Pfam Description: Clp protease
  misc_feature (44)..(300): Homolog of NCBI NO: 38344435 NR Description: OSJNBa0038O10.7 [Oryza sativa (japonica
  misc_feature (73)..(277): Homolog of NCBI NO: 18420643 NR Description: ATP-dependent Clp protease proteolytic subunit
  misc_feature (77)..(270): Homolog of NCBI NO: 31238393 NR Description: ENSANGP00000017225 [Anopheles gambiae]
  misc_feature (23)..(268): Homolog of NCBI NO: 34882298 NR Description: similar to ClpP protease [Rattus norvegicus]
  misc_feature (77)..(275): Homolog of NCBI NO: 6685315 NR Description: ATP-dependent Clp protease proteolytic subunit
  misc_feature (73)..(277): Homolog of NCBI NO: 18420643 NR Description: ATP-dependent Clp protease proteolytic subunit
  misc_feature (23)..(268): Homolog of NCBI NO: 34882298 NR Description: similar to ClpP protease [Rattus norvegicus]
  misc_feature (77)..(270): Homolog of NCBI NO: 22967580 NR Description: hypothetical protein [Rhodospirillum rubrum]
  misc_feature (73)..(275): Homolog of NCBI NO: 20129427 NR Description: CG5045-PA [Drosophila melanogaster]
  misc_feature (77)..(270): Homolog of NCBI NO: 23014984 NR Description: hypothetical protein [Magnetospirillum
  misc_feature (73)..(268): Homolog of NCBI NO: 5174419 NR Description: endopeptidase Clp precursor; ATP-dependent
  misc_feature (37)..(268): Homolog of NCBI NO: 8393156 NR Description: caseinolytic protease, ATP-dependent, proteolytic
  misc_feature (77)..(275): Homolog of NCBI NO: 6685315 NR Description: ATP-dependent Clp protease proteolytic subunit
  misc_feature (77)..(270): Homolog of NCBI NO: 31238393 NR Description: ENSANGP00000017225 [Anopheles gambiae]
  misc_feature (44)..(300): Homolog of NCBI NO: 38344435 NR Description: OSJNBa0038O10.7 [Oryza sativa (japonica
  misc_feature (37)..(268): Homolog of NCBI NO: 8393156 NR Description: caseinolytic protease, ATP-dependent, proteolytic
  misc_feature (73)..(268): Homolog of NCBI NO: 5174419 NR Description: endopeptidase Clp precursor; ATP-dependent
  misc_feature (77)..(270): Homolog of NCBI NO: 23014984 NR Description: hypothetical protein [Magnetospirillum
  misc_feature (73)..(275): Homolog of NCBI NO: 20129427 NR Description: CG5045-PA [Drosophila melanogaster]
  misc_feature (77)..(270): Homolog of NCBI NO: 22967580 NR Description: hypothetical protein [Rhodospirillum rubrum]
MTPSSALALAHHAAVSPLPSSTPRPSPRSSSLSLGPGSAGLGPRRLVAAAPPRAFFSSSPYQPPQPEGFSQHREYGLVPMVIETTSRGERAYDIFSRLLKERIVCIHGPIADDTASLVVAQLLFLESENPLKPVHLYINSPGGVVTAGLAIYDTMQYIRCPVTTLCIGQAASMGSLLLAAGAPGERRALPNARVMIHQPSGGAQGQATDIAIQAKEILKMRDRLNKIYQKHTRQPIDKIEQCMERDLFMDPEEARDWGLIDEVIENRPASFMPDGIGGGLDVPRLGGVGGGRGRDVEEPSAV

SEQ ID NO: 8477 - protein, 223 aa, Zea mays subsp. mays
  peptide (1)..(223): Ceres Seq. ID no. 12546337
  misc_feature (7)..(188): Pfam Name: Clp protease Pfam Description: Clp protease
  misc_feature (7)..(188): Pfam Name: Clp protease Pfam Description: Clp protease
  misc_feature (1)..(196): Homolog of NCBI NO: 20129427 NR Description: CG5045-PA [Drosophila melanogaster]
  misc_feature (1)..(221): Homolog of NCBI NO: 38344435 NR Description: OSJNBa0038O10.7 [Oryza sativa (japonica
  misc_feature (1)..(191): Homolog of NCBI NO: 31238393 NR Description: ENSANGP00000017225 [Anopheles gambiae]
  misc_feature (1)..(196): Homolog of NCBI NO: 6685315 NR Description: ATP-dependent Clp protease proteolytic subunit
  misc_feature (1)..(189): Homolog of NCBI NO: 5174419 NR Description: endopeptidase Clp precursor; ATP-dependent
  misc_feature (1)..(198): Homolog of NCBI NO: 18420643 NR Description: ATP-dependent Clp protease proteolytic subunit
  misc_feature (1)..(189): Homolog of NCBI NO: 34882298 NR Description: similar to ClpP protease [Rattus norvegicus]
  misc_feature (1)..(191): Homolog of NCBI NO: 22967580 NR Description: hypothetical protein [Rhodospirillum rubrum]
  misc_feature (1)..(196): Homolog of NCBI NO: 20129427 NR Description: CG5045-PA [Drosophila melanogaster]
  misc_feature (1)..(191): Homolog of NCBI NO: 23014984 NR Description: hypothetical protein [Magnetospirillum
  misc_feature (1)..(189): Homolog of NCBI NO: 5174419 NR Description: endopeptidase Clp precursor; ATP-dependent
  misc_feature (1)..(189): Homolog of NCBI NO: 8393156 NR Description: caseinolytic protease, ATP-dependent, proteolytic
  misc_feature (1)..(196): Homolog of NCBI NO: 6685315 NR Description: ATP-dependent Clp protease proteolytic subunit
  misc_feature (1)..(191): Homolog of NCBI NO: 31238393 NR Description: ENSANGP00000017225 [Anopheles gambiae]
  misc_feature (1)..(221): Homolog of NCBI NO: 38344435 NR Description: OSJNBa0038O10.7 [Oryza sativa (japonica
  misc_feature (1)..(191): Homolog of NCBI NO: 23014984 NR Description: hypothetical protein [Magnetospirillum
  misc_feature (1)..(189): Homolog of NCBI NO: 8393156 NR Description: caseinolytic protease, ATP-dependent, proteolytic
  misc_feature (1)..(189): Homolog of NCBI NO: 34882298 NR Description: similar to ClpP protease [Rattus norvegicus]
  misc_feature (1)..(198): Homolog of NCBI NO: 18420643 NR Description: ATP-dependent Clp protease proteolytic subunit
  misc_feature (1)..(191): Homolog of NCBI NO: 22967580 NR Description: hypothetical protein [Rhodospirillum rubrum]
MVIETTSRGERAYDIFSRLLKERIVCIHGPIADDTASLVVAQLLFLESENPLKPVHLYINSPGGVVTAGLAIYDTMQYIRCPVTTLCIGQAASMGSLLLAAGAPGERRALPNARVMIHQPSGGAQGQATDIAIQAKEILKMRDRLNKIYQKHTRQPIDKIEQCMERDLFMDPEEARDWGLIDEVIENRPASFMPDGIGGGLDVPRLGGVGGGRGRDVEEPSAV

SEQ ID NO: 8478 - DNA, 1251 bp, Zea mays subsp. mays
  misc_feature (1)..(1251): Ceres Seq. ID no. 12566852
  misc_feature: MA Experiment ID: 108544 Result: Up-regulated in Transcription
  misc_feature: MA Experiment ID: 20000479 Result: Up-regulated in Transcription
  misc_feature: MA Experiment 20000479 PARAMETER Experiment Name: Zm_Drought_P Parameter: Age (day) Value: 10
  misc_feature: MA Experiment 20000479 PARAMETER Experiment Name: Zm_Drought_P Parameter: Organism Value: Zea mays
  misc_feature: MA Experiment 20000479 PARAMETER Experiment Name: Zm_Drought_P Parameter: Plant Line Value: 35A19
  misc_feature: MA Experiment 20000479 PARAMETER Experiment Name: Zm_Drought_P Parameter: Timepoint (hr) Value: 48
  misc_feature: MA Experiment 20000479 PARAMETER Experiment Name: Zm_Drought_P Parameter: Tissue Value: Aerial
  misc_feature: MA Experiment 20000479 PARAMETER Experiment Name: Zm_Drought_P Parameter: Treatment Value: Drought vs. No Drought
tagactatcataaggaaacaaactagctattacaagggaataatccagactgctatcagtcctgatcttgctgattggatccgtcaatataagactgatccactaccatacttgctatttcctaaaacagaataagtaaactagcaccaatcaaggattactttcctaacaatgcatatatccgtatcaacctacagaatgtttttactggatctaaactcaatctaggtcattcctattgtcattgatatatctgtgcaaagtgcaaacctacatacccatctaaacattatttcagagtaatagtttctacatggatcatgttgcttctatggctgtctcatgtttgatactggacattagaatatgctcctttcaagttcttgcgtaaaagaaaattttgcattctgattctactgttttttttggagcatcatgttagctgaaacctcaggtgtcctgaatatgtcaagcatccctctggttctgaaaaatttcaacaatccagcattaaagagtgccatttgtgccttttccatgcagataacttggcagctaacttcagcagagaattagcagactacataatctacattatcgatgtctctggtggggacaagataccaagaaaaggtggccctgggataacccaggccgatctgttggtgcgtcgtgctgtattcaccagcatcatctataaccttgtgcacttaacttcatttgtagctctgcaaacttattttgacttttgcacactggtcatattttattggccggcataaaatgtctgagtttctgaactcaggtaataaacaagacagacctaacacctgctgttggagctgatctgtctgtaatggagcgagacgcacttcgcatgcgcgaaggagggccctttgtgtttgcacaggtgaaacatggagtgggcgtggaggggatcgtgaaccatattctgcaggcgtgggagatcgcgactggtaataagcggcgataagatctcacgacttggggccatatgttggatgcagatttgattcagtcggcacttccacatgcatgtgtcatctgttcgtttctcaataaattctgcgtcatttgctgctgattgtacttgacaagtagagacatggatggactcttaaaattccatccatgtgttaaatgacatattcgagacatccttttctcaataaactctgcatcatttggtgaattgcacttgagaagtaaagacatggagccttaaaattc

SEQ ID NO: 8479 - protein, 46 aa, Zea mays subsp. mays
  peptide (1)..(46): Ceres Seq. ID no. 12566853
MLAETSGVLNMSSIPLVLKNFNNPALKSAICAFSMQITWQLTSAEN

SEQ ID NO: 8480 - protein, 45 aa, Zea mays subsp. mays
  peptide (1)..(45): Ceres Seq. ID no. 12566854
  misc_feature (1)..(45): Homolog of NCBI NO: 13161906 NR Description: urease accessory protein G [Solanum tuberosum]
  misc_feature (1)..(45): Homolog of NCBI NO: 13161908 NR Description: urease accessory protein G [Solanum tuberosum]
  misc_feature (1)..(45): Homolog of NCBI NO: 13161912 NR Description: urease accessory protein G [Solanum tuberosum]
  misc_feature (1)..(45): Homolog of NCBI NO: 13161910 NR Description: urease accessory protein G [Solanum tuberosum]
  misc_feature (1)..(45): Homolog of NCBI NO: 13161904 NR Description: urease accessory protein G [Solanum tuberosum]
  misc_feature (1)..(45): Homolog of NCBI NO: 15226754 NR Description: putative urease accessory protein; protein id: supported by cDNA: 18513. [Arabidopsis thaliana]
  misc_feature (1)..(45): Homolog of NCBI NO: 25313831 NR Description: urease accessory protein UREG [imported] - thaliana >gi|4324678|gb|AAD16984.1| urease accessory protein UREG
MERDALRMREGGPFVFAQVKHGVGVEGIVNHILQAWEIATGNKRR

SEQ ID NO: 8481 - protein, 38 aa, Zea mays subsp. mays
  peptide (1)..(38): Ceres Seq. ID no. 12566855
  misc_feature (1)..(38): Homolog of NCBI NO: 13161906 NR Description: urease accessory protein G [Solanum tuberosum]
  misc_feature (1)..(38): Homolog of NCBI NO: 13161908 NR Description: urease accessory protein G [Solanum tuberosum]
  misc_feature (1)..(38): Homolog of NCBI NO: 13161912 NR Description: urease accessory protein G [Solanum tuberosum]
  misc_feature (1)..(38): Homolog of NCBI NO: 13161910 NR Description: urease accessory protein G [Solanum tuberosum]
  misc_feature (1)..(38): Homolog of NCBI NO: 13161904 NR Description: urease accessory protein G [Solanum tuberosum]
  misc_feature (1)..(38): Homolog of NCBI NO: 15226754 NR Description: putative urease accessory protein; protein id: supported by cDNA: 18513. [Arabidopsis thaliana]
  misc_feature (1)..(38): Homolog of NCBI NO: 25313831 NR Description: urease accessory protein UREG [imported] - thaliana >gi|4324678|gb|AAD16984.1| urease accessory protein UREG
MREGGPFVFAQVKHGVGVEGIVNHILQAWEIATGNKRR

SEQ ID NO: 8482 - DNA, 1287 bp, Zea mays subsp. mays
  misc_feature (1)..(1287): Ceres Seq. ID no. 12356579
  misc_feature: MA Experiment ID: 108528 Result: Up-regulated in Transcription
  misc_feature: MA Experiment 108528 PARAMETER Experiment Name: Zm_Imbibed_Seeds_P Parameter: Age (day) Value: 5 vs. 2
  misc_feature: MA Experiment 108528 PARAMETER Experiment Name: Zm_Imbibed_Seeds_P Parameter: Organism Value: Zea mays
  misc_feature: MA Experiment 108528 PARAMETER Experiment Name: Zm_Imbibed_Seeds_P Parameter: Plant Line Value: 35A19
  misc_feature: MA Experiment 108528 PARAMETER Experiment Name: Zm_Imbibed_Seeds_P Parameter: Tissue Value: Aerial vs. Embryo
  misc_feature: MA Experiment ID: 108530 Result: Up-regulated in Transcription
  misc_feature: MA Experiment 108530 PARAMETER Experiment Name: Zm_Imbibed_Seeds_P Parameter: Age (day) Value: 6 vs. 2
  misc_feature: MA Experiment 108530 PARAMETER Experiment Name: Zm_Imbibed_Seeds_P Parameter: Organism Value: Zea mays
  misc_feature: MA Experiment 108530 PARAMETER Experiment Name: Zm_Imbibed_Seeds_P Parameter: Plant Line Value: 35A19
  misc_feature: MA Experiment 108530 PARAMETER Experiment Name: Zm_Imbibed_Seeds_P Parameter: Tissue Value: Aerial vs. Embryo
  misc_feature: MA Experiment ID: 108544 Result: Up-regulated in Transcription
  misc_feature: MA Experiment ID: 108688 Result: Down-regulated in Transcription
  misc_feature: MA Experiment 108688 PARAMETER Experiment Name: Zm_Embryos-Flowers__P Parameter: Tissue Value: Immature Flowers vs. Aerial+
  misc_feature: MA Experiment ID: 20000492 Result: Up-regulated in Transcription
  misc_feature: MA Experiment 20000492 PARAMETER Experiment Name: Zm_Hybrid_Seed_Dev_P Parameter: DAP Value: 12
  misc_feature: MA Experiment 20000492 PARAMETER Experiment Name: Zm_Hybrid_Seed_Dev_P Parameter: Organism Value: Zea mays
  misc_feature: MA Experiment 20000492 PARAMETER Experiment Name: Zm_Hybrid_Seed_Dev_P Parameter: Plant Line Value: 35A19
  misc_feature: MA Experiment 20000492 PARAMETER Experiment Name: Zm_Hybrid_Seed_Dev_P Parameter: Tissue Value: Fert Kernel vs. Unfert Floret
  misc_feature: MA Experiment ID: 20001608 Result: Up-regulated in Transcription
  misc_feature: MA Experiment 20001608 PARAMETER Experiment Name: Zm_50ppm_KNO3_L-to-H_P Parameter: Age (day) Value: 21
  misc_feature: MA Experiment 20001608 PARAMETER Experiment Name: Zm_50ppm_KNO3_L-to-H_P Parameter: Organism Value: Zea mays
  misc_feature: MA Experiment 20001608 PARAMETER Experiment Name: Zm_50ppm_KNO3_L-to-H_P Parameter: Plant Line Value: 35A19
  misc_feature: MA Experiment 20001608 PARAMETER Experiment Name: Zm_50ppm_KNO3_L-to-H_P Parameter: Timepoint (hr) Value: 48
  misc_feature: MA Experiment 20001608 PARAMETER Experiment Name: Zm_50ppm_KNO3_L-to-H_P Parameter: Tissue Value: Shoots
  misc_feature: MA Experiment 20001608 PARAMETER Experiment Name: Zm_50ppm_KNO3_L-to-H_P Parameter: Treatment Value: 50ppm KNO3 vs. 50ppm KCl
ctaaaactaaggcatagcggtaaacaccaccgaagtctcagcttctccgaggaaggggcgcaattgctgaagcagccacttcaccttgggcccatacagaaatggcggcttcttgcgcctccacactcccttcactttccttcgtttcctcctccagttcatcccgccgattcaggcgctctggtgtggtggccatggccagcgttgggcagaaggtgtatgcgcccggtgtggcggtgtcggagggcaatggcgggctgccgaaaatcgacctcaaatccccgcacgggagcgaggctgagatttatctgtttggagcgtgtgttacttctttcaaagtccctaatggcaaggacctgctctttgttcgaccagatgctgtgtttaatggacagaaacccatcagcggtggaattccacattgtttcccccagtttggcccaggtcccatgcagcagcatgggtttgcacggaatgtgaattggtctatcacagattcagaagtcacagaaggagatccagctgtaactttggaactgaaagatgacacttatagccgttctatgtgggatttcagcttccatgcactgtacaaggtttccctgcactctaaaagcttgtcaacaactctagcaataataaatacagatgacaagcctttctcattcaactcagccctccacacttatttcagtgcttccataactggcgtttctgtgaaaggtctaaaaggttgcaagactctcaataaggaccctgacccaaaaaatcctttggagggcaaagaagagagggaagaggtgacttttccaggattcgtcgactgcgtctaccttggtgcaccaagtgaactcatcctggacaatggattgggtgacaaaattgccattgcaaattcaaattggtcagatgcagtcttgtggaatcctcacttgcagatggaggcctgctacaaagattttgtctgtgtggaaaacgccaagattgaaatggtacaactggagccaaaacaatcttgggtggcagaacagaaaattgaactagtctgatgataatgtcttgcagcaactgcatcaagtagagtgagacgcagatggcgctcccccagtgtcattcttcatggcacatgtcatcacaatagctatacatgtgatgttttctgttaaaaagaataaatgatgcaaatcatgaatttttttctagcagtctgatgtgtattgaattgcaaatgtacaatttgaactgcatggatctgttgaaataaagggagtgcccatttgatctttg

SEQ ID NO: 8483 - protein, 315 aa, Zea mays subsp. mays
  peptide (1)..(315): Ceres Seq. ID no. 12356580
  misc_feature (54)..(310): Pfam Name: Aldose 1-epimerase Pfam Description: Aldose 1-epimerase
  misc_feature (11)..(314): Homolog of NCBI NO: 15240009 NR Description: apospory-associated protein C-like; protein id:
  misc_feature (10)..(315): Homolog of NCBI NO: 6970044 NR Description: apospory-associated protein C; APOC
  misc_feature (42)..(296): Homolog of NCBI NO: 40253263 NR Description: putative Aldose 1-epimerase [Oryza sativa
  misc_feature (41)..(296): Homolog of NCBI NO: 38344152 NR Description: OSJNBa0041A02.19 [Oryza sativa (japonica
  misc_feature (27)..(296): Homolog of NCBI NO: 2501555 NR Description: POSSIBLE APOSPORY-ASSOCIATED PROTEIN C
  misc_feature (15)..(296): Homolog of NCBI NO: 19387263 NR Description: putative apospory-associated protein C [Oryza
  misc_feature (46)..(296): Homolog of NCBI NO: 15242099 NR Description: apospory-associated protein C; protein id:
  misc_feature (68)..(315): Homolog of NCBI NO: 31238518 NR Description: ENSANGP00000005193 [Anopheles gambiae]
  misc_feature (47)..(306): Homolog of NCBI NO: 21593295 NR Description: possible apospory-associated like protein
  misc_feature (47)..(306): Homolog of NCBI NO: 18416643 NR Description: possible apospory-associated like protein; id: At4g25900.1, supported by cDNA: 37817., supported by cDNA:
MAASCASTLPSLSFVSSSSSSRRFRRSGVVAMASVGQKVYAPGVAVSEGNGGLPKIDLKSPHGSEAEIYLFGACVTSFKVPNGKDLLFVRPDAVFNGQKPISGGIPHCFPQFGPGPMQQHGFARNVNWSITDSEVTEGDPAVTLELKDDTYSRSMWDFSFHALYKVSLHSKSLSTTLAIINTDDKPFSFNSALHTYFSASITGVSVKGLKGCKTLNKDPDPKNPLEGKEEREEVTFPGFVDCVYLGAPSELILDNGLGDKIAIANSNWSDAVLWNPHLQMEACYKDFVCVENAKIEMVQLEPKQSWVAEQKIELV

SEQ ID NO: 8484 - protein, 284 aa, Zea mays subsp. mays
  peptide (1)..(284): Ceres Seq. ID no. 12356581
  misc_feature (23)..(279): Pfam Name: Aldose 1-epimerase Pfam Description: Aldose 1-epimerase
  misc_feature (1)..(283): Homolog of NCBI NO: 15240009 NR Description: apospory-associated protein C-like; protein id:
  misc_feature (1)..(284): Homolog of NCBI NO: 6970044 NR Description: apospory-associated protein C; APOC
  misc_feature (11)..(265): Homolog of NCBI NO: 40253263 NR Description: putative Aldose 1-epimerase [Oryza sativa
  misc_feature (10)..(265): Homolog of NCBI NO: 38344152 NR Description: OSJNBa0041A02.19 [Oryza sativa (japonica
  misc_feature (1)..(265): Homolog of NCBI NO: 2501555 NR Description: POSSIBLE APOSPORY-ASSOCIATED PROTEIN C
  misc_feature (1)..(265): Homolog of NCBI NO: 19387263 NR Description: putative apospory-associated protein C [Oryza
  misc_feature (15)..(265): Homolog of NCBI NO: 15242099 NR Description: apospory-associated protein C; protein id:
  misc_feature (37)..(284): Homolog of NCBI NO: 31238518 NR Description: ENSANGP00000005193 [Anopheles gambiae]
  misc_feature (16)..(275): Homolog of NCBI NO: 21593295 NR Description: possible apospory-associated like protein
  misc_feature (16)..(275): Homolog of NCBI NO: 18416643 NR Description: possible apospory-associated like protein; id: At4g25900.1, supported by cDNA: 37817., supported by cDNA:
MASVGQKVYAPGVAVSEGNGGLPKIDLKSPHGSEAEIYLFGACVTSFKVPNGKDLLFVRPDAVFNGQKPISGGIPHCFPQFGPGPMQQHGFARNVNWSITDSEVTEGDPAVTLELKDDTYSRSMWDFSFHALYKVSLHSKSLSTTLAIINTDDKPFSFNSALHTYFSASITGVSVKGLKGCKTLNKDPDPKNPLEGKEEREEVTFPGFVDCVYLGAPSELILDNGLGDKIAIANSNWSDAVLWNPHLQMEACYKDFVCVENAKIEMVQLEPKQSWVAEQKIELV

SEQ ID NO: 8485 - protein, 199 aa, Zea mays subsp. mays
  peptide (1)..(199): Ceres Seq. ID no. 12356582
  misc_feature (1)..(194): Pfam Name: Aldose 1-epimerase Pfam Description: Aldose 1-epimerase
  misc_feature (1)..(198): Homolog of NCBI NO: 15240009 NR Description: apospory-associated protein C-like; protein id:
  misc_feature (1)..(199): Homolog of NCBI NO: 6970044 NR Description: apospory-associated protein C; APOC
  misc_feature (1)..(180): Homolog of NCBI NO: 40253263 NR Description: putative Aldose 1-epimerase [Oryza sativa
  misc_feature (1)..(180): Homolog of NCBI NO: 38344152 NR Description: OSJNBa0041A02.19 [Oryza sativa (japonica
  misc_feature (1)..(180): Homolog of NCBI NO: 2501555 NR Description: POSSIBLE APOSPORY-ASSOCIATED PROTEIN C
  misc_feature (1)..(180): Homolog of NCBI NO: 19387263 NR Description: putative apospory-associated protein C [Oryza
  misc_feature (1)..(180): Homolog of NCBI NO: 15242099 NR Description: apospory-associated protein C; protein id:
  misc_feature (1)..(199): Homolog of NCBI NO: 31238518 NR Description: ENSANGP00000005193 [Anopheles gambiae]
  misc_feature (1)..(190): Homolog of NCBI NO: 21593295 NR Description: possible apospory-associated like protein
  misc_feature (1)..(190): Homolog of NCBI NO: 18416643 NR Description: possible apospory-associated like protein; id: At4g25900.1, supported by cDNA: 37817., supported by cDNA:
MQQHGFARNVNWSITDSEVTEGDPAVTLELKDDTYSRSMWDFSFHALYKVSLHSKSLSTTLAIINTDDKPFSFNSALHTYFSASITGVSVKGLKGCKTLNKDPDPKNPLEGKEEREEVTFPGFVDCVYLGAPSELILDNGLGDKIAIANSNWSDAVLWNPHLQMEACYKDFVCVENAKIEMVQLEPKQSWVAEQKIELV

SEQ ID NO: 8486 - DNA, 1165 bp, Zea mays subsp. mays
  misc_feature (1)..(1165): Ceres Seq. ID no. 12387009
  misc_feature: MA Experiment ID: 108522 Result: Down-regulated in Transcription
  misc_feature: MA Experiment 108522 PARAMETER Experiment Name: Zm_42deg_Heat_P Parameter: Age (day) Value: 8
  misc_feature: MA Experiment 108522 PARAMETER Experiment Name: Zm_42deg_Heat_P Parameter: Organism Value: Zea mays
  misc_feature: MA Experiment 108522 PARAMETER Experiment Name: Zm_42deg_Heat_P Parameter: Plant Line Value: 35A19
  misc_feature: MA Experiment 108522 PARAMETER Experiment Name: Zm_42deg_Heat_P Parameter: Temperature (deg C) Value: 42 vs. 22
  misc_feature: MA Experiment 108522 PARAMETER Experiment Name: Zm_42deg_Heat_P Parameter: Timepoint (hr) Value: 1
  misc_feature: MA Experiment 108522 PARAMETER Experiment Name: Zm_42deg_Heat_P Parameter: Tissue Value: Aerial
gagctaccccatttccccacccccagcaccccactccccgcttccatttccttggaccccaccaccgcgcctacatccctcagagctcagatgcagccgccggcgaccgagatgcacccggccgccgacgccgccacctccgccgccaccgcgcaggccgacactactgctcgcgccgccgtccccgcatccgatccacccccgcccccgccggcgccggcggctganacggtcgatccgccgcccccgccgccagcgccggcgcccaagacggtcacctggagcgagaagctcacgtccgactcgccgacgcacgtgcacgccgccgccgcggcggagtccagccagtacgtgtcccgtgggcccgcatcctcgtctaagggcgccgtggaggcgatgagggagacgctgtcaaggtgggggaagtcgtggggggagaccaccaagctggtcgagagcctcagccgcgacacgtggcaacacttcaagactggacctagttttactgaagctgctatgggacgcctagcacaagggactaaagttttagcagaaggaggctatgaaaaaatatttaagcagaccttcgaggttcttccagacgaggagctgaaaatatgctatgcgtgctatctctcaacatcagcaggtcctgtcatgggagtcttgtatatttctacagcgaagattgctttctgcagtgacaatcctctgtcatacaaagctggaaataaaactgaatggagttactacaaggtggtcattcctcttcaccagctaagagcagctaatccttcagtaagcaaagtaaatcccgctgagaagtacattcaggtcgtttccgttgaagggcatgagttctggttcatgggttttctaatgtacgacaaggctgcagccagtcttcaagaagccttggctagtgctcgtgagttgcaaccgtgaagacaccaagtggtgttctttccggttacatacatcagtttccacatctcgagttcaggctgggtcgctgggattcttctcctgtttcagatcctttttgctgaagcttttgacacagtacacccacaggcctgcatacgtgtcagaaatgtgtgccattcctgtcaatgttgtaatcatgacagatatttatatatatggaaaaacactgccgctgtcc

SEQ ID NO: 8487 - protein, 314 aa, Zea mays subsp. mays
  peptide (1)..(314): Ceres Seq. ID no. 12387010
  misc_feature (190)..(266): Pfam Name: GRAM domain Pfam Description: GRAM domain
  misc_feature (31)..(306): Homolog of NCBI NO: 18399985 NR Description: Expressed protein; protein id: At2g22475.1, by cDNA: 32573. [Arabidopsis thaliana]
  misc_feature (31)..(306): Homolog of NCBI NO: 21592789 NR Description: unknown [Arabidopsis thaliana]
  misc_feature (31)..(306): Homolog of NCBI NO: 26452129 NR Description: unknown protein [Arabidopsis thaliana]
  misc_feature (38)..(313): Homolog of NCBI NO: 34902414 NR Description: Putative FH protein interacting protein FIP1
  misc_feature (53)..(308): Homolog of NCBI NO: 15217869 NR Description: FH protein interacting protein FIP1; protein id: supported by cDNA: 30245., supported by cDNA: gi_13877828, by cDNA: gi_15912222, supported by cDNA: gi_16323497, supported
  misc_feature (42)..(310): Homolog of NCBI NO: 34906818 NR Description: contains EST C91668(E31216)~similar to FH protein
  misc_feature (63)..(306): Homolog of NCBI NO: 29788871 NR Description: putative ABA-responsive protein [Oryza sativa
  misc_feature (173)..(310): Homolog of NCBI NO: 33146631 NR Description: putative FH protein interacting protein FIP1
  misc_feature (148)..(313): Homolog of NCBI NO: 15240044 NR Description: ABA-responsive protein - like; protein id:
  misc_feature (173)..(295): Homolog of NCBI NO: 25405043 NR Description: protein TEL1S.3 [imported] - Arabidopsis thaliana
  misc_feature (76)..(76): Xaa is any aa, unknown or other
ELPHFPTPSTPLPASISLDPTTAPTSLRAQMQPPATEMHPAADAATSAATAQADTTARAAVPASDPPPPPPAPAAXTVDPPPPPPAPAPKTVTWSEKLTSDSPTHVHAAAAAESSQYVSRGPASSSKGAVEAMRETLSRWGKSWGETTKLVESLSRDTWQHFKTGPSFTEAAMGRLAQGTKVLAEGGYEKIFKQTFEVLPDEELKICYACYLSTSAGPVMGVLYISTAKIAFCSDNPLSYKAGNKTEWSYYKVVIPLHQLRAANPSVSKVNPAEKYIQVVSVEGHEFWFMGFLMYDKAAASLQEALASARELQP

SEQ ID NO: 8488 - protein, 284 aa, Zea mays subsp. mays
  peptide (1)..(284): Ceres Seq. ID no. 12387011
  misc_feature (160)..(236): Pfam Name: GRAM domain Pfam Description: GRAM domain
  misc_feature (1)..(276): Homolog of NCBI NO: 18399985 NR Description: Expressed protein; protein id: At2g22475.1, by cDNA: 32573. [Arabidopsis thaliana]
  misc_feature (1)..(276): Homolog of NCBI NO: 21592789 NR Description: unknown [Arabidopsis thaliana]
  misc_feature (1)..(276): Homolog of NCBI NO: 26452129 NR Description: unknown protein [Arabidopsis thaliana]
  misc_feature (8)..(283): Homolog of NCBI NO: 34902414 NR Description: Putative FH protein interacting protein FIP1
  misc_feature (23)..(278): Homolog of NCBI NO: 15217869 NR Description: FH protein interacting protein FIP1; protein id: supported by cDNA: 30245., supported by cDNA: gi_13877828, by cDNA: gi_15912222, supported by cDNA: gi_16323497, supported
  misc_feature (12)..(280): Homolog of NCBI NO: 34906818 NR Description: contains EST C91668(E31216)~similar to FH protein
  misc_feature (33)..(276): Homolog of NCBI NO: 29788871 NR Description: putative ABA-responsive protein [Oryza sativa
  misc_feature (143)..(280): Homolog of NCBI NO: 33146631 NR Description: putative FH protein interacting protein FIP1
  misc_feature (118)..(283): Homolog of NCBI NO: 15240044 NR Description: ABA-responsive protein - like; protein id:
  misc_feature (143)..(265): Homolog of NCBI NO: 25405043 NR Description: protein TEL1S.3 [imported] - Arabidopsis thaliana
  misc_feature (46)..(46): Xaa is any aa, unknown or other
MQPPATEMHPAADAATSAATAQADTTARAAVPASDPPPPPPAPAAXTVDPPPPPPAPAPKTVTWSEKLTSDSPTHVHAAAAAESSQYVSRGPASSSKGAVEAMRETLSRWGKSWGETTKLVESLSRDTWQHFKTGPSFTEAAMGRLAQGTKVLAEGGYEKIFKQTFEVLPDEELKICYACYLSTSAGPVMGVLYISTAKIAFCSDNPLSYKAGNKTEWSYYKVVIPLHQLRAANPSVSKVNPAEKYIQVVSVEGHEFWFMGFLMYDKAAASLQEALASARELQP

SEQ ID NO: 8489 - protein, 277 aa, Zea mays subsp. mays
  peptide (1)..(277): Ceres Seq. ID no. 12387012
  misc_feature (153)..(229): Pfam Name: GRAM domain Pfam Description: GRAM domain
  misc_feature (1)..(269): Homolog of NCBI NO: 18399985 NR Description: Expressed protein; protein id: At2g22475.1, by cDNA: 32573. [Arabidopsis thaliana]
  misc_feature (1)..(269): Homolog of NCBI NO: 21592789 NR Description: unknown [Arabidopsis thaliana]
  misc_feature (1)..(269): Homolog of NCBI NO: 26452129 NR Description: unknown protein [Arabidopsis thaliana]
  misc_feature (1)..(276): Homolog of NCBI NO: 34902414 NR Description: Putative FH protein interacting protein FIP1
  misc_feature (16)..(271): Homolog of NCBI NO: 15217869 NR Description: FH protein interacting protein FIP1; protein id: supported by cDNA: 30245., supported by cDNA: gi_13877828, by cDNA: gi_15912222, supported by cDNA: gi_16323497, supported
  misc_feature (5)..(273): Homolog of NCBI NO: 34906818 NR Description: contains EST C91668(E31216)~similar to FH protein
  misc_feature (26)..(269): Homolog of NCBI NO: 29788871 NR Description: putative ABA-responsive protein [Oryza sativa
  misc_feature (136)..(273): Homolog of NCBI NO: 33146631 NR Description: putative FH protein interacting protein FIP1
  misc_feature (111)..(276): Homolog of NCBI NO: 15240044 NR Description: ABA-responsive protein - like; protein id:
  misc_feature (136)..(258): Homolog of NCBI NO: 25405043 NR Description: protein TEL1S.3 [imported] - Arabidopsis thaliana
  misc_feature (39)..(39): Xaa is any aa, unknown or other
MHPAADAATSAATAQADTTARAAVPASDPPPPPPAPAAXTVDPPPPPPAPAPKTVTWSEKLTSDSPTHVHAAAAAESSQYVSRGPASSSKGAVEAMRETLSRWGKSWGETTKLVESLSRDTWQHFKTGPSFTEAAMGRLAQGTKVLAEGGYEKIFKQTFEVLPDEELKICYACYLSTSAGPVMGVLYISTAKIAFCSDNPLSYKAGNKTEWSYYKVVIPLHQLRAANPSVSKVNPAEKYIQVVSVEGHEFWFMGFLMYDKAAASLQEALASARELQP

SEQ ID NO: 8490 - DNA, 1500 bp, Zea mays subsp. mays
  misc_feature (1)..(1500): Ceres Seq. ID no. 12408444
  misc_feature: MA Experiment ID: 108529 Result: Down-regulated in Transcription
  misc_feature: MA Experiment 108529 PARAMETER Experiment Name: Zm_Imbibed_Seeds_P Parameter: Age (day) Value: 5 vs. 2
  misc_feature: MA Experiment 108529 PARAMETER Experiment Name: Zm_Imbibed_Seeds_P Parameter: Organism Value: Zea mays
  misc_feature: MA Experiment 108529 PARAMETER Experiment Name: Zm_Imbibed_Seeds_P Parameter: Plant Line Value: 35A19
  misc_feature: MA Experiment 108529 PARAMETER Experiment Name: Zm_Imbibed_Seeds_P Parameter: Tissue Value: Roots vs. Embryo
  misc_feature: MA Experiment ID: 108536 Result: Up-regulated in Transcription
  misc_feature: MA Experiment 108536 PARAMETER Experiment Name: Zm_Meristem_P Parameter: Age (day) Value: 8
  misc_feature: MA Experiment 108536 PARAMETER Experiment Name: Zm_Meristem_P Parameter: Organism Value: Zea mays
  misc_feature: MA Experiment 108536 PARAMETER Experiment Name: Zm_Meristem_P Parameter: Plant Line Value: 35A19
  misc_feature: MA Experiment 108536 PARAMETER Experiment Name: Zm_Meristem_P Parameter: Tissue Value: Shoot Meristem vs. Above Shoot Meristem
  misc_feature: MA Experiment ID: 20000535 Result: Up-regulated in Transcription
  misc_feature: MA Experiment 20000535 PARAMETER Experiment Name: Zm_Hybrid_Seed_Dev_P Parameter: DAP Value: 30 vs. 12
  misc_feature: MA Experiment 20000535 PARAMETER Experiment Name: Zm_Hybrid_Seed_Dev_P Parameter: Organism Value: Zea mays
  misc_feature: MA Experiment 20000535 PARAMETER Experiment Name: Zm_Hybrid_Seed_Dev_P Parameter: Plant Line Value: 35A19
  misc_feature: MA Experiment 20000535 PARAMETER Experiment Name: Zm_Hybrid_Seed_Dev_P Parameter: Tissue Value: Embryo vs. Unfert Floret
aagttcgatccagattatagcagctagctcaccgtcaccgacatacagtacaatagcagcttattagcttgtgtcagtccatccatccatccatggagaaactcgtctacttcgcgaccattatatccttatccatggcggcgctgctagtgccactccgcgtacagtgcgaagaagcagctagagctgctgctgccagaagctgccatgccggcaccggagcttctgcttctgcaccagccgcagcagcagcgtggaaaaggagctgcggcggcggcaaggcggggaagcagcagccgcaggtggagggcatgttcgtgttcgggagctcgctggtggacaacggcaacaacaactttctcaacggctccggcgtgcgcgcagactacctcccctacggcgtggacttccccctcggcccctccggccgtttctccaacggccgcaacgtcatcgacgcgctcggcgagctcctcggcctccccgggctcgtcccacccttcgccgacccgcgcacccggcgggcccgcgccgcgctgcgcggcgtcaacttcgcctccggcggctccggcatcctggagcacaccgggcagggcaaggtggtgagcctgcggcagcagatcaccaactttgagtcggtgacccttcctgacctgcgggcccaactgcgtggaccagctgcggccgccaaccactggatcaagggtcaagattccttccacaagtgctacctctccaagtgcctcttcgtcatcggcacaggtggcaatgactacctgctcgactacttcaaccccgggaacggcacccaaggtgggccgcccttgtcagagttcactgcgtctctcatcaccaagctctccggacatcttcagaggttgtacgctcttggcgcacggaagtttgtgatcttctcgatccagccgaccgggtgcacccccgtggtacgggcgttcctcaacatcaccggcggcgcctgcatcgagccggtgaacgacgcggtggcgctcttcaacgccgagctcaggcggctggtggatggcgcgaggcggcgcatgcccgccgccaggttcgcctttatcgactcctacaggatcatcaaggacatgctggaccaccccgccaaacatggcgttagggagacgagcagagcctgctgcgagatgtcgaggagctcgtcgggcgtgctgtgcaagaagcaggggcccatctgcagcgaccggacggagtacgtcttcttcgacgggctgcacccgacggacgccgtgaacgccaggatcgcgcgcaagggctacggctccagctcgcccgaccacgcctaccccatcaacgtcaagaagctagccatgctgtagcccttgtagaagctagccatgcatgcttgtaacctagctttgtactagtagtaataatctagaattaatgcctacctcatcaacgccaacatcgttcgactacttactagtagtactagttctctgtgaaatagtctaataagcc

SEQ ID NO: 8491 - protein, 420 aa, Zea mays subsp. mays
  peptide (1)..(420): Ceres Seq. ID no. 12408445
  misc_feature (75)..(399): Pfam Name: GDSL-like Lipase/Acylhydrolase Pfam Description: GDSL-like Lipase/Acylhydrolase
  misc_feature (68)..(420): Homolog of NCBI NO: 15220514 NR Description: lipase/hydrolase, putative; protein id: supported by cDNA: 23556., supported by cDNA: gi_18086454
  misc_feature (68)..(420): Homolog of NCBI NO: 21592417 NR Description: lipase/hydrolase, putative [Arabidopsis thaliana]
  misc_feature (62)..(420): Homolog of NCBI NO: 34909504 NR Description: putative GDSL-motif lipase/hydrolase-like protein
  misc_feature (66)..(420): Homolog of NCBI NO: 18398991 NR Description: unknown protein; protein id: At1g33811.1, by cDNA: gi_20466731 [Arabidopsis thaliana] unknown protein [Arabidopsis thaliana]
  misc_feature (69)..(418): Homolog of NCBI NO: 34910808 NR Description: GDSL-motif lipase/hydrolase-like protein [Oryza
  misc_feature (66)..(420): Homolog of NCBI NO: 21553940 NR Description: GDSL-motif lipase/hydrolase-like protein
  misc_feature (53)..(420): Homolog of NCBI NO: 21594055 NR Description: lipase/hydrolase, putative [Arabidopsis thaliana]
  misc_feature (66)..(420): Homolog of NCBI NO: 15242458 NR Description: GDSL-motif lipase/hydrolase-like protein; protein At5g45670.1, supported by cDNA: 18389., supported by cDNA:
  misc_feature (53)..(420): Homolog of NCBI NO: 15220512 NR Description: lipase/hydrolase, putative; protein id: supported by cDNA: 6680., supported by cDNA: gi_15215767
  misc_feature (75)..(420): Homolog of NCBI NO: 7485419 NR Description: hypothetical protein F13C5.140 - Arabidopsis >gi|2832625|emb|CAA16754.1| putative protein [Arabidopsis >gi|7268691|emb|CAB78899.1| putative protein [Arabidopsis
MEKLVYFATIISLSMAALLVPLRVQCEEAARAAAARSCHAGTGASASAPAAAAAWKRSCGGGKAGKQQPQVEGMFVFGSSLVDNGNNNFLNGSGVRADYLPYGVDFPLGPSGRFSNGRNVIDALGELLGLPGLVPPFADPRTRRARAALRGVNFASGGSGILEHTGQGKVVSLRQQITNFESVTLPDLRAQLRGPAAAANHWIKGQDSFHKCYLSKCLFVIGTGGNDYLLDYFNPGNGTQGGPPLSEFTASLITKLSGHLQRLYALGARKFVIFSIQPTGCTPVVRAFLNITGGACIEPVNDAVALFNAELRRLVDGARRRMPAARFAFIDSYRIIKDMLDHPAKHGVRETSRACCEMSRSSSGVLCKKQGPICSDRTEYVFFDGLHPTDAVNARIARKGYGSSSPDHAYPINVKKLAML

SEQ ID NO: 8492 - protein, 406 aa, Zea mays subsp. mays
  peptide (1)..(406): Ceres Seq. ID no. 12408446
  misc_feature (61)..(385): Pfam Name: GDSL-like Lipase/Acylhydrolase Pfam Description: GDSL-like Lipase/Acylhydrolase
  misc_feature (61)..(406): Homolog of NCBI NO: 7485419 NR Description: hypothetical protein F13C5.140 - Arabidopsis >gi|2832625|emb|CAA16754.1| putative protein [Arabidopsis >gi|7268691|emb|CAB78899.1| putative protein [Arabidopsis
  misc_feature (54)..(406): Homolog of NCBI NO: 15220514 NR Description: lipase/hydrolase, putative; protein id: supported by cDNA: 23556., supported by cDNA: gi_18086454
  misc_feature (54)..(406): Homolog of NCBI NO: 21592417 NR Description: lipase/hydrolase, putative [Arabidopsis thaliana]
  misc_feature (48)..(406): Homolog of NCBI NO: 34909504 NR Description: putative GDSL-motif lipase/hydrolase-like protein
  misc_feature (52)..(406): Homolog of NCBI NO: 18398991 NR Description: unknown protein; protein id: At1g33811.1, by cDNA: gi_20466731 [Arabidopsis thaliana] unknown protein [Arabidopsis thaliana]
  misc_feature (55)..(404): Homolog of NCBI NO: 34910808 NR Description: GDSL-motif lipase/hydrolase-like protein [Oryza
  misc_feature (52)..(406): Homolog of NCBI NO: 21553940 NR Description: GDSL-motif lipase/hydrolase-like protein
  misc_feature (39)..(406): Homolog of NCBI NO: 21594055 NR Description: lipase/hydrolase, putative [Arabidopsis thaliana]
  misc_feature (52)..(406): Homolog of NCBI NO: 15242458 NR Description: GDSL-motif lipase/hydrolase-like protein; protein At5g45670.1, supported by cDNA: 18389., supported by cDNA:
  misc_feature (39)..(406): Homolog of NCBI NO: 15220512 NR Description: lipase/hydrolase, putative; protein id: supported by cDNA: 6680., supported by cDNA: gi_15215767
MAALLVPLRVQCEEAARAAAARSCHAGTGASASAPAAAAAWKRSCGGGKAGKQQPQVEGMFVFGSSLVDNGNNNFLNGSGVRADYLPYGVDFPLGPSGRFSNGRNVIDALGELLGLPGLVPPFADPRTRRARAALRGVNFASGGSGILEHTGQGKVVSLRQQITNFESVTLPDLRAQLRGPAAAANHWIKGQDSFHKCYLSKCLFVIGTGGNDYLLDYFNPGNGTQGGPPLSEFTASLITKLSGHLQRLYALGARKFVIFSIQPTGCTPVVRAFLNITGGACIEPVNDAVALFNAELRRLVDGARRRMPAARFAFIDSYRIIKDMLDHPAKHGVRETSRACCEMSRSSSGVLCKKQGPICSDRTEYVFFDGLHPTDAVNARIARKGYGSSSPDHAYPINVKKLAML

SEQ ID NO: 8493 - protein, 347 aa, Zea mays subsp. mays
  peptide (1)..(347): Ceres Seq. ID no. 12408447
  misc_feature (2)..(326): Pfam Name: GDSL-like Lipase/Acylhydrolase Pfam Description: GDSL-like Lipase/Acylhydrolase
  misc_feature (1)..(347): Homolog of NCBI NO: 15220514 NR Description: lipase/hydrolase, putative; protein id: supported by cDNA: 23556., supported by cDNA: gi_18086454
  misc_feature (1)..(347): Homolog of NCBI NO: 21592417 NR Description: lipase/hydrolase, putative [Arabidopsis thaliana]
  misc_feature (1)..(347): Homolog of NCBI NO: 34909504 NR Description: putative GDSL-motif lipase/hydrolase-like protein
  misc_feature (1)..(347): Homolog of NCBI NO: 18398991 NR Description: unknown protein; protein id: At1g33811.1, by cDNA: gi_20466731 [Arabidopsis thaliana] unknown protein [Arabidopsis thaliana]
  misc_feature (1)..(345): Homolog of NCBI NO: 34910808 NR Description: GDSL-motif lipase/hydrolase-like protein [Oryza
  misc_feature (1)..(347): Homolog of NCBI NO: 21553940 NR Description: GDSL-motif lipase/hydrolase-like protein
  misc_feature (1)..(347): Homolog of NCBI NO: 21594055 NR Description: lipase/hydrolase, putative [Arabidopsis thaliana]
  misc_feature (1)..(347): Homolog of NCBI NO: 15242458 NR Description: GDSL-motif lipase/hydrolase-like protein; protein At5g45670.1, supported by cDNA: 18389., supported by cDNA:
  misc_feature (1)..(347): Homolog of NCBI NO: 15220512 NR Description: lipase/hydrolase, putative; protein id: supported by cDNA: 6680., supported by cDNA: gi_15215767
  misc_feature (2)..(347): Homolog of NCBI NO: 7485419 NR Description: hypothetical protein F13C5.140 - Arabidopsis >gi|2832625|emb|CAA16754.1| putative protein [Arabidopsis >gi|7268691|emb|CAB78899.1| putative protein [Arabidopsis
MFVFGSSLVDNGNNNFLNGSGVRADYLPYGVDFPLGPSGRFSNGRNVIDALGELLGLPGLVPPFADPRTRRARAALRGVNFASGGSGILEHTGQGKVVSLRQQITNFESVTLPDLRAQLRGPAAAANHWIKGQDSFHKCYLSKCLFVIGTGGNDYLLDYFNPGNGTQGGPPLSEFTASLITKLSGHLQRLYALGARKFVIFSIQPTGCTPVVRAFLNITGGACIEPVNDAVALFNAELRRLVDGARRRMPAARFAFIDSYRIIKDMLDHPAKHGVRETSRACCEMSRSSSGVLCKKQGPICSDRTEYVFFDGLHPTDAVNARIARKGYGSSSPDHAYPINVKKLAML

SEQ ID NO: 8494 - DNA, 1094 bp, Zea mays subsp. mays
  misc_feature (1)..(1094): Ceres Seq. ID no. 12359506
  misc_feature: MA Experiment ID: 108527 Result: Up-regulated in Transcription
  misc_feature: MA Experiment 108527 PARAMETER Experiment Name: Zm_5mM_NO_P Parameter: Age (day) Value: 8
  misc_feature: MA Experiment 108527 PARAMETER Experiment Name: Zm_5mM_NO_P Parameter: Organism Value: Zea mays
  misc_feature: MA Experiment 108527 PARAMETER Experiment Name: Zm_5mM_NO_P Parameter: Plant Line Value: 35A19
  misc_feature: MA Experiment 108527 PARAMETER Experiment Name: Zm_5mM_NO_P Parameter: Timepoint (hr) Value: 6
  misc_feature: MA Experiment 108527 PARAMETER Experiment Name: Zm_5mM_NO_P Parameter: Tissue Value: Aerial
  misc_feature: MA Experiment 108527 PARAMETER Experiment Name: Zm_5mM_NO_P Parameter: Treatment Value: 5mM NO vs. No Treatment
  misc_feature: MA Experiment ID: 108529 Result: Down-regulated in Transcription
  misc_feature: MA Experiment 108529 PARAMETER Experiment Name: Zm_Imbibed_Seeds_P Parameter: Age (day) Value: 5 vs. 2
  misc_feature: MA Experiment 108529 PARAMETER Experiment Name: Zm_Imbibed_Seeds_P Parameter: Organism Value: Zea mays
  misc_feature: MA Experiment 108529 PARAMETER Experiment Name: Zm_Imbibed_Seeds_P Parameter: Plant Line Value: 35A19
  misc_feature: MA Experiment 108529 PARAMETER Experiment Name: Zm_Imbibed_Seeds_P Parameter: Tissue Value: Roots vs. Embryo
  misc_feature: MA Experiment ID: 108536 Result: Up-regulated in Transcription
  misc_feature: MA Experiment 108536 PARAMETER Experiment Name: Zm_Meristem_P Parameter: Age (day) Value: 8
  misc_feature: MA Experiment 108536 PARAMETER Experiment Name: Zm_Meristem_P Parameter: Organism Value: Zea mays
  misc_feature: MA Experiment 108536 PARAMETER Experiment Name: Zm_Meristem_P Parameter: Plant Line Value: 35A19
  misc_feature: MA Experiment 108536 PARAMETER Experiment Name: Zm_Meristem_P Parameter: Tissue Value: Shoot Meristem vs. Above Shoot Meristem
  misc_feature: MA Experiment ID: 108544 Result: Down-regulated in Transcription
  misc_feature: MA Experiment ID: 108546 Result: Down-regulated in Transcription
  misc_feature: MA Experiment 108546 PARAMETER Experiment Name: Zm_Imbibed_Seeds_P Parameter: Age (day) Value: 3 vs. 2
  misc_feature: MA Experiment 108546 PARAMETER Experiment Name: Zm_Imbibed_Seeds_P Parameter: Organism Value: Zea mays
  misc_feature: MA Experiment 108546 PARAMETER Experiment Name: Zm_Imbibed_Seeds_P Parameter: Plant Line Value: 35A19
  misc_feature: MA Experiment 108546 PARAMETER Experiment Name: Zm_Imbibed_Seeds_P Parameter: Tissue Value: Roots vs. Embryo
  misc_feature: MA Experiment ID: 108556 Result: Down-regulated in Transcription
  misc_feature: MA Experiment 108556 PARAMETER Experiment Name: Zm_Drought_P Parameter: Age (day) Value: 9
  misc_feature: MA Experiment 108556 PARAMETER Experiment Name: Zm_Drought_P Parameter: Organism Value: Zea mays
  misc_feature: MA Experiment 108556 PARAMETER Experiment Name: Zm_Drought_P Parameter: Plant Line Value: 35A19
  misc_feature: MA Experiment 108556 PARAMETER Experiment Name: Zm_Drought_P Parameter: Timepoint (hr) Value: 24
  misc_feature: MA Experiment 108556 PARAMETER Experiment Name: Zm_Drought_P Parameter: Tissue Value: Aerial
  misc_feature: MA Experiment 108556 PARAMETER Experiment Name: Zm_Drought_P Parameter: Treatment Value: Drought vs. No Drought
  misc_feature: MA Experiment ID: 108597 Result: Down-regulated in Transcription
  misc_feature: MA Experiment 108597 PARAMETER Experiment Name: Zm_100uM_ABA_P Parameter: Age (day) Value: 9
  misc_feature: MA Experiment 108597 PARAMETER Experiment Name: Zm_100uM_ABA_P Parameter: Organism Value: Zea mays
  misc_feature: MA Experiment 108597 PARAMETER Experiment Name: Zm_100uM_ABA_P Parameter: Plant Line Value: 35A19
  misc_feature: MA Experiment 108597 PARAMETER Experiment Name: Zm_100uM_ABA_P Parameter: Timepoint (hr) Value: 24
  misc_feature: MA Experiment 108597 PARAMETER Experiment Name: Zm_100uM_ABA_P Parameter: Tissue Value: Aerial
  misc_feature: MA Experiment 108597 PARAMETER Experiment Name: Zm_100uM_ABA_P Parameter: Treatment Value: 100uM ABA vs. No Treatment
  misc_feature: MA Experiment ID: 108687 Result: Down-regulated in Transcription
  misc_feature: MA Experiment 108687 PARAMETER Experiment Name: Zm_Embryos-Flowers__P Parameter: Tissue Value: Embryo vs. Aerial+
  misc_feature: MA Experiment ID: 20000477 Result: Down-regulated in Transcription
  misc_feature: MA Experiment 20000477 PARAMETER Experiment Name: Zm_5mM_SA_P Parameter: Age (day) Value: 10
  misc_feature: MA Experiment 20000477 PARAMETER Experiment Name: Zm_5mM_SA_P Parameter: Organism Value: Zea mays
  misc_feature: MA Experiment 20000477 PARAMETER Experiment Name: Zm_5mM_SA_P Parameter: Plant Line Value: 35A19
  misc_feature: MA Experiment 20000477 PARAMETER Experiment Name: Zm_5mM_SA_P Parameter: Timepoint (hr) Value: 48
  misc_feature: MA Experiment 20000477 PARAMETER Experiment Name: Zm_5mM_SA_P Parameter: Tissue Value: Aerial
  misc_feature: MA Experiment 20000477 PARAMETER Experiment Name: Zm_5mM_SA_P Parameter: Treatment Value: 5mM SA vs. No Treatment
  misc_feature: MA Experiment ID: 20000479 Result: Down-regulated in Transcription
  misc_feature: MA Experiment 20000479 PARAMETER Experiment Name: Zm_Drought_P Parameter: Age (day) Value: 10
  misc_feature: MA Experiment 20000479 PARAMETER Experiment Name: Zm_Drought_P Parameter: Organism Value: Zea mays
  misc_feature: MA Experiment 20000479 PARAMETER Experiment Name: Zm_Drought_P Parameter: Plant Line Value: 35A19
  misc_feature: MA Experiment 20000479 PARAMETER Experiment Name: Zm_Drought_P Parameter: Timepoint (hr) Value: 48
  misc_feature: MA Experiment 20000479 PARAMETER Experiment Name: Zm_Drought_P Parameter: Tissue Value: Aerial
  misc_feature: MA Experiment 20000479 PARAMETER Experiment Name: Zm_Drought_P Parameter: Treatment Value: Drought vs. No Drought
  misc_feature: MA Experiment ID: 20000480 Result: Down-regulated in Transcription
  misc_feature: MA Experiment 20000480 PARAMETER Experiment Name: Zm_Drought_P Parameter: Age (day) Value: 11
  misc_feature: MA Experiment 20000480 PARAMETER Experiment Name: Zm_Drought_P Parameter: Organism Value: Zea mays
  misc_feature: MA Experiment 20000480 PARAMETER Experiment Name: Zm_Drought_P Parameter: Plant Line Value: 35A19
  misc_feature: MA Experiment 20000480 PARAMETER Experiment Name: Zm_Drought_P Parameter: Timepoint (hr) Value: 72
  misc_feature: MA Experiment 20000480 PARAMETER Experiment Name: Zm_Drought_P Parameter: Tissue Value: Aerial
  misc_feature: MA Experiment 20000480 PARAMETER Experiment Name: Zm_Drought_P Parameter: Treatment Value: Drought vs. No Drought
agcaacctcccttcctttccctcccccacccctcctgctgcagtctctcctcctcagcggacccggtcctggatggccgccttcttcgctgctgctccgccgccggcggcgggtgctctcgcgtcgttccaccacgaggagcagcagcgtcaggacgccgccgaggagctgtaccacgtggacgacgacgtcggcggccagcaggggaagctgtgcgccaggggccactggcgccccgccgaggacgccaagctcaaggagctcgtcgcgcagtacgggccccagaactggaacctcatcgccgagaggctggacggcagatcagggaagagctgccgcctgcggtggttcaaccagctagacccgcggatcaaccgccgggccttctccggcgaggaggaggagcggctgctggcggcgcaccgcgcgtacggcaacaagtgggcgctcatcgcgcgcctcttccccggccgcaccgacaacgccgtcaagaaccactggcacgtcctcatggcgcgcaagcagcgggagcacaccggcgcgctccgccggcgcaagccctcgtcctcgccctcgccggacccggcgccgccgccgccgcaattggcgcccgtcgtcgtcctcctccaccaccaccagcagcaccacgccggctcgcctccgcgcgccgccgctcacgcgcagttacacggcagcggacacccgcgcgcacagcggcggcgagtccgacgagaccgcgtccacctgcaccaccgacctgtccctcggctccgccgccccccctgcttctaccagagtggctacgacgcggccccgcgcgccgcggccttcgcgccgagcgcgcgctccgccttctccgcgccgccggcgtcggcgcgccatggcgagccacgctccgacgacaaggtgtcgccgcccttcttcgacttcctcggcgtcggcgcggcatgatcggggagggggcccccgcggcggtgtacaggaggcgggccgaaagacgcgtagtttagctttagggtccagttaatgatcaagaacatggcctgagagaggagaaagaatggtgatgaactggtgtcgtggcactgcagagt

SEQ ID NO: 8495 - protein, 335 aa, Zea mays subsp. mays
  peptide (1)..(335): Ceres Seq. ID no. 12359507
  misc_feature (205)..(260): Pfam Name: Extensin-like region Pfam Description: Extensin-like region
QPPFLSLPHPSCCSLSSSADPVLDGRLLRCCSAAGGGCSRVVPPRGAAASGRRRGAVPRGRRRRRPAGEAVRQGPLAPRRGRQAQGARRAVRAPELEPHRREAGRQIREELPPAVVQPARPADQPPGLLRRGGGAAAGGAPRVRQQVGAHRAPLPRPHRQRRQEPLARPHGAQAAGAHRRAPPAQALVLALAGPGAAAAAIGARRRPPPPPPAAPRRLASARRRSRAVTRQRTPARTAAASPTRPRPPAPPTCPSAPPPPLLLPEWLRRGPARRGLRAERALRLLRAAGVGAPWRATLRRQGVAALLRLPRRRRGMIGEGAPAAVYRRRAERRVV

SEQ ID NO: 8496 - protein, 316 aa, Zea mays subsp. mays
  peptide (1)..(316): Ceres Seq. ID no. 12359508
  misc_feature (74)..(120): Pfam Name: Myb-like DNA-binding domain Pfam Description: Myb-like DNA-binding domain
  misc_feature (74)..(191): Homolog of NCBI NO: 18396049 NR Description: myb-related protein, putative; protein id: supported by cDNA: gi_13430157 [Arabidopsis thaliana]
  misc_feature (74)..(191): Homolog of NCBI NO: 25403271 NR Description: protein T24P13.16 [imported] - Arabidopsis >gi|9295726|gb|AAF87032.1|AC006535_10 T24P13.16 [Arabidopsis
  misc_feature (73)..(199): Homolog of NCBI NO: 15222362 NR Description: MYB-family transcription factor, putative; id: At1g69560.1, supported by cDNA: gi_7644365 [Arabidopsis
  misc_feature (66)..(194): Homolog of NCBI NO: 9759057 NR Description: Myb-like transcription factor-like protein
  misc_feature (66)..(194): Homolog of NCBI NO: 15238028 NR Description: MYB56 R2R3-MYB factor family member; protein id:
  misc_feature (71)..(185): Homolog of NCBI NO: 21321780 NR Description: putative Myb/Myb-related protein [Oryza sativa
  misc_feature (72)..(193): Homolog of NCBI NO: 6979341 NR Description: myb-like protein [Oryza sativa]
  misc_feature (71)..(179): Homolog of NCBI NO: 31980093 NR Description: MYB transcription factor R2R3 type [Populus
  misc_feature (70)..(212): Homolog of NCBI NO: 18406019 NR Description: expressed protein; protein id: At3g29020.1, by cDNA: gi_9864076 [Arabidopsis thaliana]
  misc_feature (71)..(192): Homolog of NCBI NO: 11358543 NR Description: myb-related transcription factor MYB54 [imported] Arabidopsis thaliana >gi|3941472|gb|AAC83612.1| putative
SNLPSFPSPTPPAAVSPPQRTRSWMAAFFAAAPPPAAGALASFHHEEQQRQDAAEELYHVDDDVGGQQGKLCARGHWRPAEDAKLKELVAQYGPQNWNLIAERLDGRSGKSCRLRWFNQLDPRINRRAFSGEEEERLLAAHRAYGNKWALIARLFPGRTDNAVKNHWHVLMARKQREHTGALRRRKPSSSPSPDPAPPPPQLAPVVVLLHHHQQHHAGSPPRAAAHAQLHGSGHPRAQRRRVRRDRVHLHHRPVPRLRRPPCFYQSGYDAAPRAAAFAPSARSAFSAPPASARHGEPRSDDKVSPPFFDFLGVGAA

SEQ ID NO: 8497 - protein, 292 aa, Zea mays subsp. mays
  peptide (1)..(292): Ceres Seq. ID no. 12359509
  misc_feature (50)..(96): Pfam Name: Myb-like DNA-binding domain Pfam Description: Myb-like DNA-binding domain
  misc_feature (50)..(167): Homolog of NCBI NO: 18396049 NR Description: myb-related protein, putative; protein id: supported by cDNA: gi_13430157 [Arabidopsis thaliana]
  misc_feature (50)..(167): Homolog of NCBI NO: 25403271 NR Description: protein T24P13.16 [imported] - Arabidopsis >gi|9295726|gb|AAF87032.1|AC006535_10 T24P13.16 [Arabidopsis
  misc_feature (49)..(175): Homolog of NCBI NO: 15222362 NR Description: MYB-family transcription factor, putative; id: At1g69560.1, supported by cDNA: gi_7644365 [Arabidopsis
  misc_feature (42)..(170): Homolog of NCBI NO: 9759057 NR Description: Myb-like transcription factor-like protein
  misc_feature (42)..(170): Homolog of NCBI NO: 15238028 NR Description: MYB56 R2R3-MYB factor family member; protein id:
  misc_feature (47)..(161): Homolog of NCBI NO: 21321780 NR Description: putative Myb/Myb-related protein [Oryza sativa
  misc_feature (48)..(169): Homolog of NCBI NO: 6979341 NR Description: myb-like protein [Oryza sativa]
  misc_feature (47)..(155): Homolog of NCBI NO: 31980093 NR Description: MYB transcription factor R2R3 type [Populus
  misc_feature (46)..(188): Homolog of NCBI NO: 18406019 NR Description: expressed protein; protein id: At3g29020.1, by cDNA: gi_9864076 [Arabidopsis thaliana]
  misc_feature (47)..(168): Homolog of NCBI NO: 11358543 NR Description: myb-related transcription factor MYB54 [imported] Arabidopsis thaliana >gi|3941472|gb|AAC83612.1| putative
MAAFFAAAPPPAAGALASFHHEEQQRQDAAEELYHVDDDVGGQQGKLCARGHWRPAEDAKLKELVAQYGPQNWNLIAERLDGRSGKSCRLRWFNQLDPRINRRAFSGEEEERLLAAHRAYGNKWALIARLFPGRTDNAVKNHWHVLMARKQREHTGALRRRKPSSSPSPDPAPPPPQLAPVVVLLHHHQQHHAGSPPRAAAHAQLHGSGHPRAQRRRVRRDRVHLHHRPVPRLRRPPCFYQSGYDAAPRAAAFAPSARSAFSAPPASARHGEPRSDDKVSPPFFDFLGVGAA

SEQ ID NO: 8498 - DNA, 1621 bp, Zea mays subsp. mays
  misc_feature (1)..(1621): Ceres Seq. ID no. 12408436
  misc_feature: MA Experiment ID: 108527 Result: Up-regulated in Transcription
  misc_feature: MA Experiment 108527 PARAMETER Experiment Name: Zm_5mM_NO_P Parameter: Age (day) Value: 8
  misc_feature: MA Experiment 108527 PARAMETER Experiment Name: Zm_5mM_NO_P Parameter: Organism Value: Zea mays
  misc_feature: MA Experiment 108527 PARAMETER Experiment Name: Zm_5mM_NO_P Parameter: Plant Line Value: 35A19
  misc_feature: MA Experiment 108527 PARAMETER Experiment Name: Zm_5mM_NO_P Parameter: Timepoint (hr) Value: 6
  misc_feature: MA Experiment 108527 PARAMETER Experiment Name: Zm_5mM_NO_P Parameter: Tissue Value: Aerial
  misc_feature: MA Experiment 108527 PARAMETER Experiment Name: Zm_5mM_NO_P Parameter: Treatment Value: 5mM NO vs. No Treatment
  misc_feature: MA Experiment ID: 108544 Result: Down-regulated in Transcription
  misc_feature: MA Experiment ID: 20000626 Result: Up-regulated in Transcription
  misc_feature: MA Experiment 20000626 PARAMETER Experiment Name: Zm_Herbicide-Treatments_P Parameter: Timepoint (hr) Value: 12
  misc_feature: MA Experiment 20000626 PARAMETER Experiment Name: Zm_Herbicide-Treatments_P Parameter: Tissue Value: Aerial
  misc_feature: MA Experiment 20000626 PARAMETER Experiment Name: Zm_Herbicide-Treatments_P Parameter: Treatment Value: Roundup vs. No Treatment
ctctcttttccgccctccacccctcgcgagctctccacccctccacacgaccctcctcggcggcggcggcggcgatgcagatggcggcgaccaccaccgagtcccaaccggccgtgccgcctcaacaccctcacgcccacccccacgcgcccccgcagcatgctcatccgcaccaccacatgccgcagccacggtgggtcgtcatcccgtacccgccgccgccgcccatggtggccgcgccaccaccaccgccgcagtttgccaagcacttcgctgctgggccgccgccgccgccccaagctggtgctgggcgccgcacgccgaccccgccctcgtctggatccggcgggaacgggtgcgaagaaaataaaaccatttgggtcggtgacctccagtactggatggatgaaaactacctacataactgcttcgggcccagcggcgaggtggttacaataaaagttatccgcaataggcaaacaggacagtcagaggggtatggatttgttgagttcttttctcatgcatcagcagagaaagctcttcagaattttactggtcatgtgatgccaaacactgaccggccatttaaattgaactgggcatcgtatagcatgggtgaaaagcgatctgaagtggcttctgatcactcgatatttgttggcgatctagctgctgatgtcactgatgaaatgctgctggagcttttctccagcaagtaccgctcggtgaaaggagctaaagttattattgatgcaaacacaggccgttccaggggctatggatttgtcaggtttggagacgacaacgacaaatctcatgccatgtctgaaatgaatggtgtatattgctctacgaggccaattcgtataggacctgcgactcccagaagatcttcaggtgattctggctcctcgactcctggtcattcagatggtgattcttctaacagaacggtatatgttggtgggcttgaccccaatgtcagtgaagatgaactgagaaaagcctttgccaaatatgatcttgcctctgtgaaaattcctctaggaaagcaatgtggctttgttcaatttgttagcagaactgatgctgaagaagcactacaaggattaaatggatcactcattggaaagcaggcagttcgcctttcatgggtccgcagcccatcacataagcagtctaggggtgactccgtcaacaggaggaacaacatgtactatggcacaccattctacggcggatatggctatgcctccccggtgccacacccaaacatgtacgctgcagcgtatggcacgtacccgctatatggcaaccagcagctagtgagctagagagctcccctccgacgtgtcccctctgacgggaaacaaaggttttggtccggtgagcatagtagcgtcaggtgagaaggtgcctttataaggctgtcctaagaagtgggcgagatatgttgttgcatcgttatcgttatggtgcctgtaactgttgtgtgtgccgtgtgcgtccggaagaattggatggaatggaactcgtggcttgttgtagtacatcagagagtcatgttattctttcaagaaattttgacttggaaataaattaaactattgtttgtgcg

SEQ ID NO: 8499 - protein, 444 aa, Zea mays subsp. mays
  peptide (1)..(444): Ceres Seq. ID no. 12408437
  misc_feature (218)..(290): Pfam Name: RNA recognition motif. (a.k.a. RRM, RBD, or RNP domain) Pfam Description: RNA recognition motif. (a.k.a. RRM, RBD, or RNP
  misc_feature (62)..(437): Homolog of NCBI NO: 15594035 NR Description: nucleic acid binding protein [Nicotiana tabacum]
  misc_feature (62)..(316): Homolog of NCBI NO: 9663769 NR Description: RNA Binding Protein 47 [Nicotiana plumbaginifolia]
  misc_feature (302)..(444): Homolog of NCBI NO: 9663769 NR Description: RNA Binding Protein 47 [Nicotiana plumbaginifolia]
  misc_feature (61)..(441): Homolog of NCBI NO: 34896988 NR Description: putative RNA binding protein [Oryza sativa]
  misc_feature (104)..(316): Homolog of NCBI NO: 7489196 NR Description: RNA binding protein homolog - common tobacco >gi|2708532|gb|AAB92518.1| putative RNA binding protein
  misc_feature (302)..(444): Homolog of NCBI NO: 7489196 NR Description: RNA binding protein homolog - common tobacco >gi|2708532|gb|AAB92518.1| putative RNA binding protein
  misc_feature (21)..(444): Homolog of NCBI NO: 15220241 NR Description: RNA binding protein 47 (RBP47), putative; protein At1g47500.1 [Arabidopsis thaliana] >gi|25386564|pir||C96515
  misc_feature (104)..(316): Homolog of NCBI NO: 7489112 NR Description: DNA binding protein ACBF - common tobacco
  misc_feature (302)..(444): Homolog of NCBI NO: 7489112 NR Description: DNA binding protein ACBF - common tobacco
  misc_feature (21)..(444): Homolog of NCBI NO: 15220233 NR Description: RNA binding protein 47 (RBP47), putative; protein At1g47490.1, supported by cDNA: gi_12744992, supported by cDNA: supported by cDNA: gi_17065623 [Arabidopsis thaliana] 3 PF|00076
LFSALHPSRALHPSTRPSSAAAAAMQMAATTTESQPAVPPQHPHAHPHAPPQHAHPHHHMPQPRWVVIPYPPPPPMVAAPPPPPQFAKHFAAGPPPPPQAGAGRRTPTPPSSGSGGNGCEENKTIWVGDLQYWMDENYLHNCFGPSGEVVTIKVIRNRQTGQSEGYGFVEFFSHASAEKALQNFTGHVMPNTDRPFKLNWASYSMGEKRSEVASDHSIFVGDLAADVTDEMLLELFSSKYRSVKGAKVIIDANTGRSRGYGFVRFGDDNDKSHAMSEMNGVYCSTRPIRIGPATPRRSSGDSGSSTPGHSDGDSSNRTVYVGGLDPNVSEDELRKAFAKYDLASVKIPLGKQCGFVQFVSRTDAEEALQGLNGSLIGKQAVRLSWVRSPSHKQSRGDSVNRRNNMYYGTPFYGGYGYASPVPHPNMYAAAYGTYPLYGNQQLVS
